United States Patent Application Publication US 2007/0214517 A1 - sequence listing, part 5

SEQ ID NO: 5898 - DNA, 1164 bp, Zea mays subsp. mays
  misc_feature (1)..(1164): Ceres Seq. ID no. 12405567
  misc_feature: MA Experiment ID: 108528 Result: Up-regulated in Transcription
  misc_feature: MA Experiment 108528 PARAMETER Experiment Name: Zm_Imbibed_Seeds_P Parameter: Age (day) Value: 5 vs. 2
  misc_feature: MA Experiment 108528 PARAMETER Experiment Name: Zm_Imbibed_Seeds_P Parameter: Organism Value: Zea mays
  misc_feature: MA Experiment 108528 PARAMETER Experiment Name: Zm_Imbibed_Seeds_P Parameter: Plant Line Value: 35A19
  misc_feature: MA Experiment 108528 PARAMETER Experiment Name: Zm_Imbibed_Seeds_P Parameter: Tissue Value: Aerial vs. Embryo
  misc_feature: MA Experiment ID: 108530 Result: Up-regulated in Transcription
  misc_feature: MA Experiment 108530 PARAMETER Experiment Name: Zm_Imbibed_Seeds_P Parameter: Age (day) Value: 6 vs. 2
  misc_feature: MA Experiment 108530 PARAMETER Experiment Name: Zm_Imbibed_Seeds_P Parameter: Organism Value: Zea mays
  misc_feature: MA Experiment 108530 PARAMETER Experiment Name: Zm_Imbibed_Seeds_P Parameter: Plant Line Value: 35A19
  misc_feature: MA Experiment 108530 PARAMETER Experiment Name: Zm_Imbibed_Seeds_P Parameter: Tissue Value: Aerial vs. Embryo
  misc_feature: MA Experiment ID: 108543 Result: Up-regulated in Transcription
  misc_feature: MA Experiment ID: 108545 Result: Up-regulated in Transcription
  misc_feature: MA Experiment 108545 PARAMETER Experiment Name: Zm_Imbibed_Seeds_P Parameter: Age (day) Value: 3 vs. 2
  misc_feature: MA Experiment 108545 PARAMETER Experiment Name: Zm_Imbibed_Seeds_P Parameter: Organism Value: Zea mays
  misc_feature: MA Experiment 108545 PARAMETER Experiment Name: Zm_Imbibed_Seeds_P Parameter: Plant Line Value: 35A19
  misc_feature: MA Experiment 108545 PARAMETER Experiment Name: Zm_Imbibed_Seeds_P Parameter: Tissue Value: Aerial vs. Embryo
  misc_feature: MA Experiment ID: 108546 Result: Down-regulated in Transcription
  misc_feature: MA Experiment 108546 PARAMETER Experiment Name: Zm_Imbibed_Seeds_P Parameter: Age (day) Value: 3 vs. 2
  misc_feature: MA Experiment 108546 PARAMETER Experiment Name: Zm_Imbibed_Seeds_P Parameter: Organism Value: Zea mays
  misc_feature: MA Experiment 108546 PARAMETER Experiment Name: Zm_Imbibed_Seeds_P Parameter: Plant Line Value: 35A19
  misc_feature: MA Experiment 108546 PARAMETER Experiment Name: Zm_Imbibed_Seeds_P Parameter: Tissue Value: Roots vs. Embryo
  misc_feature: MA Experiment ID: 108547 Result: Up-regulated in Transcription
  misc_feature: MA Experiment 108547 PARAMETER Experiment Name: Zm_Imbibed_Seeds_P Parameter: Age (day) Value: 4 vs. 2
  misc_feature: MA Experiment 108547 PARAMETER Experiment Name: Zm_Imbibed_Seeds_P Parameter: Organism Value: Zea mays
  misc_feature: MA Experiment 108547 PARAMETER Experiment Name: Zm_Imbibed_Seeds_P Parameter: Plant Line Value: 35A19
  misc_feature: MA Experiment 108547 PARAMETER Experiment Name: Zm_Imbibed_Seeds_P Parameter: Tissue Value: Aerial vs. Embryo
  misc_feature: MA Experiment ID: 108559 Result: Down-regulated in Transcription
  misc_feature: MA Experiment 108559 PARAMETER Experiment Name: Zm_5mM_NO_P Parameter: Age (day) Value: 8
  misc_feature: MA Experiment 108559 PARAMETER Experiment Name: Zm_5mM_NO_P Parameter: Organism Value: Zea mays
  misc_feature: MA Experiment 108559 PARAMETER Experiment Name: Zm_5mM_NO_P Parameter: Plant Line Value: 35A19
  misc_feature: MA Experiment 108559 PARAMETER Experiment Name: Zm_5mM_NO_P Parameter: Timepoint (hr) Value: 12
  misc_feature: MA Experiment 108559 PARAMETER Experiment Name: Zm_5mM_NO_P Parameter: Tissue Value: Aerial
  misc_feature: MA Experiment 108559 PARAMETER Experiment Name: Zm_5mM_NO_P Parameter: Treatment Value: 5mM NO vs. No Treatment
  misc_feature: MA Experiment ID: 108687 Result: Down-regulated in Transcription
  misc_feature: MA Experiment 108687 PARAMETER Experiment Name: Zm_Embryos-Flowers__P Parameter: Tissue Value: Embryo vs. Aerial+
  misc_feature: MA Experiment ID: 20000478 Result: Down-regulated in Transcription
  misc_feature: MA Experiment 20000478 PARAMETER Experiment Name: Zm_5mM_SA_P Parameter: Age (day) Value: 11
  misc_feature: MA Experiment 20000478 PARAMETER Experiment Name: Zm_5mM_SA_P Parameter: Organism Value: Zea mays
  misc_feature: MA Experiment 20000478 PARAMETER Experiment Name: Zm_5mM_SA_P Parameter: Plant Line Value: 35A19
  misc_feature: MA Experiment 20000478 PARAMETER Experiment Name: Zm_5mM_SA_P Parameter: Timepoint (hr) Value: 72
  misc_feature: MA Experiment 20000478 PARAMETER Experiment Name: Zm_5mM_SA_P Parameter: Tissue Value: Aerial
  misc_feature: MA Experiment 20000478 PARAMETER Experiment Name: Zm_5mM_SA_P Parameter: Treatment Value: 5mM SA vs. No Treatment
  misc_feature: MA Experiment ID: 20000487 Result: Down-regulated in Transcription
  misc_feature: MA Experiment 20000487 PARAMETER Experiment Name: Zm_50mM_NH4NO3_L_to_H_P Parameter: Organism Value: Zea mays
  misc_feature: MA Experiment 20000487 PARAMETER Experiment Name: Zm_50mM_NH4NO3_L_to_H_P Parameter: Timepoint (hr) Value: 4
  misc_feature: MA Experiment 20000487 PARAMETER Experiment Name: Zm_50mM_NH4NO3_L_to_H_P Parameter: Tissue Value: Leaves
  misc_feature: MA Experiment 20000487 PARAMETER Experiment Name: Zm_50mM_NH4NO3_L_to_H_P Parameter: Treatment Value: 50mM NH4NO3 vs. 100mM Mannitol
  misc_feature: MA Experiment ID: 20000626 Result: Down-regulated in Transcription
  misc_feature: MA Experiment 20000626 PARAMETER Experiment Name: Zm_Herbicide-Treatments_P Parameter: Timepoint (hr) Value: 12
  misc_feature: MA Experiment 20000626 PARAMETER Experiment Name: Zm_Herbicide-Treatments_P Parameter: Tissue Value: Aerial
  misc_feature: MA Experiment 20000626 PARAMETER Experiment Name: Zm_Herbicide-Treatments_P Parameter: Treatment Value: Roundup vs. No Treatment
aaaaaagtaccactacgactccgcctccggctccgagagcagcagcctcagtaccaccagtccagtccagcctccagctaggggaagaagaagaagagcgaaggaaggggacgggggcgaggaaggagccagagcagacccaatccctcaatggcttcctctcgcgctctcgctctcgctctcttcctcctctgcgccctgctgcccgcgccccctgtctcggccacattgctgttcggcggcggcgagtcggccaagaaggcgggcgtcgacgcggagtggcggccggccactgcgacgtggtacggcgaggcagagggcgacggcagcgacggcggcgcgtgcgggtacgggacgctggtggacgtggtgccgatgaaggcgcgggtggggtcggtgagccccgtgctgttcaaggacggcgagggctgcggcgcctgctacaaggtcaggtgcctggaccgcggcgtgtgctcgcgccgtgccgtcacggtggtcgtcacggactagtgccccggcgggctgtgcgcgttcggccgcacccacttcgacctcagcggcgccgcgttcagcaggatggccgtcgccggggccggcggccggctgcgcgaccggggccagctgtccgtcgtgtacaggaggacggcctgcaagtacggcgggaagaacatcgcgttccgtgtgaacgagggctcgactaacttctggctctcgctgctcgtcgagttcgaggacggcgagggcgacataggatccatgcagataaagcaggccaactcggtggagtggctggacatgcggcacgtgtggggggcaacctggtgcctggtgcggggcccgctcgtgggccccttctccgtgaggctcaccacgctgtccgcgcggaagacgctcacgggcccgcgacgtgatccccaggaactggacgcccaaggccacctacacctcgcgcctcaacttccagccgtctctctaggtctaggacgagggagggacccaccgcggcgactggggcccacgttttatcggccccggacactgccctgtgggcccgttgcaaaacgaggaatcagtcagtccagagtgtttttttttttttttccctgtatgcagatgcaggcaaccttcgtatggtttggtttttatcttatcgtagtcgtagct

SEQ ID NO: 5899 - protein, 232 aa, Zea mays subsp. mays
  peptide (1)..(232): Ceres Seq. ID no. 12405568
  misc_feature (79)..(232): Pfam Name: HlyD family secretion protein Pfam Description: HlyD family secretion protein
KSTTTTPPPAPRAAASVPPVQSSLQLGEEEEERRKGTGARKEPEQTQSLNGFLSRSRSRSLPPLRPAARAPCLGHIAVRRRRVGQEGGRRRGVAAGHCDVVRRGRGRRQRRRRVRVRDAGGRGADEGAGGVGEPRAVQGRRGLRRLLQGQVPGPRRVLAPCRHGGRHGLVPRRAVRVRPHPLRPQRRRVQQDGRRRGRRPAARPGPAVRRVQEDGLQVRREEHRVPCERGLD

SEQ ID NO: 5900 - protein, 196 aa, Zea mays subsp. mays
  peptide (1)..(196): Ceres Seq. ID no. 12405569
  misc_feature (32)..(107): Pfam Name: Pollen allergen Pfam Description: Pollen allergen
  misc_feature (1)..(107): Homolog of NCBI NO: 38346623 NR Description: OSJNBa0074L08.17 [Oryza sativa (japonica
  misc_feature (1)..(65): Homolog of NCBI NO: 21666634 NR Description: beta-expansin [Oryza sativa]
  misc_feature (1)..(107): Homolog of NCBI NO: 11357194 NR Description: beta-expansin [imported] - Arabidopsis thaliana
  misc_feature (1)..(107): Homolog of NCBI NO: 15225423 NR Description: beta-expansin pollen allergen protein; protein
  misc_feature (1)..(128): Homolog of NCBI NO: 18417157 NR Description: beta-expansin pollen allergen protein; protein At4g28250.1, supported by cDNA: 33023., supported by cDNA:
  misc_feature (1)..(128): Homolog of NCBI NO: 21592834 NR Description: putative beta-expansin/allergen protein
  misc_feature (1)..(111): Homolog of NCBI NO: 7484871 NR Description: cim1 protein homolog F26K10.130 - Arabidopsis
  misc_feature (1)..(106): Homolog of NCBI NO: 20138423 NR Description: Putative beta-expansin 2 precursor (At-EXPB2)
  misc_feature (1)..(106): Homolog of NCBI NO: 25404942 NR Description: protein F1E22.6 [imported] - Arabidopsis thaliana
  misc_feature (1)..(106): Homolog of NCBI NO: 30697231 NR Description: beta-expansin, putative (EXBP2) [Arabidopsis
MAVAGAGGRLRDRGQLSVVYRRTACKYGGKNIAFRVNEGSTNFWLSLLVEFEDGEGDIGSMQIKQANSVEWLDMRHVWGATWCLVRGPLVGPFSVRLTTLSARKTLTGPRRDPQELDAQGHLHLAPQLPAVSLGLGRGRDPPRRLGPTFYRPRTLPCGPVAKRGISQSRVFFFFFPCMQMQATFVWFGFYLIVVVA

SEQ ID NO: 5901 - protein, 136 aa, Zea mays subsp. mays
  peptide (1)..(136): Ceres Seq. ID no. 12405570
  misc_feature (1)..(47): Homolog of NCBI NO: 38346623 NR Description: OSJNBa0074L08.17 [Oryza sativa (japonica
  misc_feature (1)..(47): Homolog of NCBI NO: 11357194 NR Description: beta-expansin [imported] - Arabidopsis thaliana
  misc_feature (1)..(47): Homolog of NCBI NO: 15225423 NR Description: beta-expansin pollen allergen protein; protein
  misc_feature (1)..(68): Homolog of NCBI NO: 18417157 NR Description: beta-expansin pollen allergen protein; protein At4g28250.1, supported by cDNA: 33023., supported by cDNA:
  misc_feature (1)..(68): Homolog of NCBI NO: 21592834 NR Description: putative beta-expansin/allergen protein
  misc_feature (1)..(51): Homolog of NCBI NO: 7484871 NR Description: cim1 protein homolog F26K10.130 - Arabidopsis
  misc_feature (1)..(46): Homolog of NCBI NO: 20138423 NR Description: Putative beta-expansin 2 precursor (At-EXPB2)
  misc_feature (1)..(46): Homolog of NCBI NO: 25404942 NR Description: protein F1E22.6 [imported] - Arabidopsis thaliana
  misc_feature (1)..(46): Homolog of NCBI NO: 30697231 NR Description: beta-expansin, putative (EXBP2) [Arabidopsis
  misc_feature (1)..(46): Homolog of NCBI NO: 1076486 NR Description: cim1 protein - soybean >gi|555616|gb|AAA50175.1|
MQIKQANSVEWLDMRHVWGATWCLVRGPLVGPFSVRLTTLSARKTLTGPRRDPQELDAQGHLHLAPQLPAVSLGLGRGRDPPRRLGPTFYRPRTLPCGPVAKRGISQSRVFFFFFPCMQMQATFVWFGFYLIVVVA

SEQ ID NO: 5902 - DNA, 1774 bp, Zea mays subsp. mays
  misc_feature (1)..(1774): Ceres Seq. ID no. 12409287
  misc_feature: MA Experiment ID: 108543 Result: Down-regulated in Transcription
  misc_feature: MA Experiment ID: 20000480 Result: Up-regulated in Transcription
  misc_feature: MA Experiment 20000480 PARAMETER Experiment Name: Zm_Drought_P Parameter: Age (day) Value: 11
  misc_feature: MA Experiment 20000480 PARAMETER Experiment Name: Zm_Drought_P Parameter: Organism Value: Zea mays
  misc_feature: MA Experiment 20000480 PARAMETER Experiment Name: Zm_Drought_P Parameter: Plant Line Value: 35A19
  misc_feature: MA Experiment 20000480 PARAMETER Experiment Name: Zm_Drought_P Parameter: Timepoint (hr) Value: 72
  misc_feature: MA Experiment 20000480 PARAMETER Experiment Name: Zm_Drought_P Parameter: Tissue Value: Aerial
  misc_feature: MA Experiment 20000480 PARAMETER Experiment Name: Zm_Drought_P Parameter: Treatment Value: Drought vs. No Drought
aacgcctccgctttcattcttctcttcccctcggcttcgagggttgtttttatttctttctttcctttttccgttttttattttatttttttcttttttcgttccttttctcgttccccccgttggggttttgagctccgacgaaccctaataatcgccggggaccggcggacgatcgcccgccggcatgcaccatcagcagcggatgaagcaggcggcggcggccgcggccgcggcgcagcagcagcagctgatgcagcaggcactgctcctgcagcagcagcagcagtcgcaggcgcagccgccctttttccccgggcaccacccgcaccccggcctcctcgccgcaccacagatagagcccatagtcagtggaaacctgcctcctgggtttgattcaagtacatgccgcagcgtgtatgttggcaatatccatcttcaagtgacggacacagtactgcaggaagtcttccaaagcattggtccagtagaagggtgcaagctcatcagaaaagaaaagtcatcctttggtttcattgactactatgaccgcagatatgctgcactggcaattttatctctcaatggcagacaactgtatggtcagccgattaaagtcaattgggcatatacaagtactccgagggaggacacatcaggtcattttaatatttttgttggggatctttgcccggaagtcactgatgctactttgtttgcatttttctctggatactctacttgctcagatgctagggttatgtgggaccagaaaacaggacgatccagagggtttggttttgtttctttcaggaaccagcaggatgctcaaagtgcgataaatgacttgaatgggaagtggcttgggaaccgtcaaattcgttgcaattgggcaacgaaaggtgctaatgctggtgaagagaaacaaattctggacactaaggttgacctgtcaaatggttcatcagaatctggaaaagagaatccaaatgatgatggtcctgaaaataaccctcagtttactactgtttatgttggcaatcttcctcacgaggctaccatgaatgatgtgcacctgtttttccattcactgggggctggttcaattgaggaagtccgtgtaactcgtgataaaggctttggctttgtgaggtacagcacccatgaggaggctgcattggcaattcagatgggtaatggccaacttattggcgggaggcagataaagtgttcctggggaagcaagccgactccacaagggacagcatccttgcctctgcctcccccagcactggcaccattctccactggagtgtcggccaccgacttgctggcctaccagcgcctgactctgagcaagatggcctcgaacccagccctaatgggtcagcacgccttgaagcaggtcgctgcattggggattggcggcggagccagccagtccatctatgatggcggcttccagggcatcaatactgccaccagcacaacttccgtccagcagcagcagcagctcatgtactactagagtactactactccatgaggcacccagctacctatcccttcaagaggaaggcgaggatgaatggatgatgccccttactatacccctatacatatagtagatgaagtcattactaggacctttttttccctaatctttttaagacccatctaagtaacatgtcctgtctatgctagctatataattgtgtatttctggatacataaaggcaaggttcttagtagtataatcttctgtgtttgaccg

SEQ ID NO: 5903 - protein, 446 aa, Zea mays subsp. mays
  peptide (1)..(446): Ceres Seq. ID no. 12409288
  misc_feature (77)..(137): Pfam Name: RNA recognition motif. (a.k.a. RRM, RBD, or RNP domain) Pfam Description: RNA recognition motif. (a.k.a. RRM, RBD, or RNP
  misc_feature (55)..(349): Homolog of NCBI NO: 23928438 NR Description: putative oligouridylate binding protein [Zea mays]
  misc_feature (343)..(446): Homolog of NCBI NO: 23928438 NR Description: putative oligouridylate binding protein [Zea mays]
  misc_feature (1)..(57): Homolog of NCBI NO: 23928438 NR Description: putative oligouridylate binding protein [Zea mays]
  misc_feature (3)..(347): Homolog of NCBI NO: 22208507 NR Description: putative oligouridylate binding protein [Sorghum
  misc_feature (348)..(446): Homolog of NCBI NO: 22208507 NR Description: putative oligouridylate binding protein [Sorghum
  misc_feature (188)..(429): Homolog of NCBI NO: 4680340 NR Description: putative nucleolysin [Oryza sativa subsp. indica]
  misc_feature (1)..(137): Homolog of NCBI NO: 4680340 NR Description: putative nucleolysin [Oryza sativa subsp. indica]
  misc_feature (188)..(429): Homolog of NCBI NO: 4680498 NR Description: TIA-1 related protein [Oryza sativa]
  misc_feature (57)..(137): Homolog of NCBI NO: 4680498 NR Description: TIA-1 related protein [Oryza sativa]
  misc_feature (18)..(446): Homolog of NCBI NO: 23237933 NR Description: putative oligouridylate binding protein [Oryza
MHHQQRMKQAAAAAAAAQQQQLMQQALLLQQQQQSQAQPPFFPGHHPHPGLLAAPQIEPIVSGNLPPGFDSSTCRSVYVGNIHLQVTDTVLQEVFQSIGPVEGCKLIRKEKSSFGFIDYYDRRYAALAILSLNGRQLYGQPIKVNWAYTSTPREDTSGHFNIFVGDLCPEVTDATLFAFFSGYSTCSDARVMWDQKTGRSRGFGFVSFRNQQDAQSAINDLNGKWLGNRQIRCNWATKGANAGEEKQILDTKVDLSNGSSESGKENPNDDGPENNPQFTTVYVGNLPHEATMNDVHLFFHSLGAGSIEEVRVTRDKGFGFVRYSTHEEAALAIQMGNGQLIGGRQIKCSWGSKPTPQGTASLPLPPPALAPFSTGVSATDLLAYQRLTLSKMASNPALMGQHALKQVAALGIGGGASQSIYDGGFQGINTATSTTSVQQQQQLMYY

SEQ ID NO: 5904 - protein, 440 aa, Zea mays subsp. mays
  peptide (1)..(440): Ceres Seq. ID no. 12409289
  misc_feature (71)..(131): Pfam Name: RNA recognition motif. (a.k.a. RRM, RBD, or RNP domain) Pfam Description: RNA recognition motif. (a.k.a. RRM, RBD, or RNP
  misc_feature (49)..(343): Homolog of NCBI NO: 23928438 NR Description: putative oligouridylate binding protein [Zea mays]
  misc_feature (337)..(440): Homolog of NCBI NO: 23928438 NR Description: putative oligouridylate binding protein [Zea mays]
  misc_feature (1)..(51): Homolog of NCBI NO: 23928438 NR Description: putative oligouridylate binding protein [Zea mays]
  misc_feature (1)..(341): Homolog of NCBI NO: 22208507 NR Description: putative oligouridylate binding protein [Sorghum
  misc_feature (342)..(440): Homolog of NCBI NO: 22208507 NR Description: putative oligouridylate binding protein [Sorghum
  misc_feature (182)..(423): Homolog of NCBI NO: 4680340 NR Description: putative nucleolysin [Oryza sativa subsp. indica]
  misc_feature (1)..(131): Homolog of NCBI NO: 4680340 NR Description: putative nucleolysin [Oryza sativa subsp. indica]
  misc_feature (182)..(423): Homolog of NCBI NO: 4680498 NR Description: TIA-1 related protein [Oryza sativa]
  misc_feature (51)..(131): Homolog of NCBI NO: 4680498 NR Description: TIA-1 related protein [Oryza sativa]
  misc_feature (12)..(440): Homolog of NCBI NO: 23237933 NR Description: putative oligouridylate binding protein [Oryza
MKQAAAAAAAAQQQQLMQQALLLQQQQQSQAQPPFFPGHHPHPGLLAAPQIEPIVSGNLPPGFDSSTCRSVYVGNIHLQVTDTVLQEVFQSIGPVEGCKLIRKEKSSFGFIDYYDRRYAALAILSLNGRQLYGQPIKVNWAYTSTPREDTSGHFNIFVGDLCPEVTDATLFAFFSGYSTCSDARVMWDQKTGRSRGFGFVSFRNQQDAQSAINDLNGKWLGNRQIRCNWATKGANAGEEKQILDTKVDLSNGSSESGKENPNDDGPENNPQFTTVYVGNLPHEATMNDVHLFFHSLGAGSIEEVRVTRDKGFGFVRYSTHEEAALAIQMGNGQLIGGRQIKCSWGSKPTPQGTASLPLPPPALAPFSTGVSATDLLAYQRLTLSKMASNPALMGQHALKQVAALGIGGGASQSIYDGGFQGINTATSTTSVQQQQQLMYY

SEQ ID NO: 5905 - protein, 424 aa, Zea mays subsp. mays
  peptide (1)..(424): Ceres Seq. ID no. 12409290
  misc_feature (55)..(115): Pfam Name: RNA recognition motif. (a.k.a. RRM, RBD, or RNP domain) Pfam Description: RNA recognition motif. (a.k.a. RRM, RBD, or RNP
  misc_feature (33)..(327): Homolog of NCBI NO: 23928438 NR Description: putative oligouridylate binding protein [Zea mays]
  misc_feature (321)..(424): Homolog of NCBI NO: 23928438 NR Description: putative oligouridylate binding protein [Zea mays]
  misc_feature (1)..(35): Homolog of NCBI NO: 23928438 NR Description: putative oligouridylate binding protein [Zea mays]
  misc_feature (1)..(325): Homolog of NCBI NO: 22208507 NR Description: putative oligouridylate binding protein [Sorghum
  misc_feature (326)..(424): Homolog of NCBI NO: 22208507 NR Description: putative oligouridylate binding protein [Sorghum
  misc_feature (166)..(407): Homolog of NCBI NO: 4680340 NR Description: putative nucleolysin [Oryza sativa subsp. indica]
  misc_feature (1)..(115): Homolog of NCBI NO: 4680340 NR Description: putative nucleolysin [Oryza sativa subsp. indica]
  misc_feature (166)..(407): Homolog of NCBI NO: 4680498 NR Description: TIA-1 related protein [Oryza sativa]
  misc_feature (35)..(115): Homolog of NCBI NO: 4680498 NR Description: TIA-1 related protein [Oryza sativa]
  misc_feature (1)..(424): Homolog of NCBI NO: 23237933 NR Description: putative oligouridylate binding protein [Oryza
MQQALLLQQQQQSQAQPPFFPGHHPHPGLLAAPQIEPIVSGNLPPGFDSSTCRSVYVGNIHLQVTDTVLQEVFQSIGPVEGCKLIRKEKSSFGFIDYYDRRYAALAILSLNGRQLYGQPIKVNWAYTSTPREDTSGHFNIFVGDLCPEVTDATLFAFFSGYSTCSDARVMWDQKTGRSRGFGFVSFRNQQDAQSAINDLNGKWLGNRQIRCNWATKGANAGEEKQILDTKVDLSNGSSESGKENPNDDGPENNPQFTTVYVGNLPHEATMNDVHLFFHSLGAGSIEEVRVTRDKGFGFVRYSTHEEAALAIQMGNGQLIGGRQIKCSWGSKPTPQGTASLPLPPPALAPFSTGVSATDLLAYQRLTLSKMASNPALMGQHALKQVAALGIGGGASQSIYDGGFQGINTATSTTSVQQQQQLMYY

SEQ ID NO: 5906 - DNA, 1320 bp, Zea mays subsp. mays
  misc_feature (1)..(1320): Ceres Seq. ID no. 12409283
  misc_feature: MA Experiment ID: 108522 Result: Down-regulated in Transcription
  misc_feature: MA Experiment 108522 PARAMETER Experiment Name: Zm_42deg_Heat_P Parameter: Age (day) Value: 8
  misc_feature: MA Experiment 108522 PARAMETER Experiment Name: Zm_42deg_Heat_P Parameter: Organism Value: Zea mays
  misc_feature: MA Experiment 108522 PARAMETER Experiment Name: Zm_42deg_Heat_P Parameter: Plant Line Value: 35A19
  misc_feature: MA Experiment 108522 PARAMETER Experiment Name: Zm_42deg_Heat_P Parameter: Temperature (deg C) Value: 42 vs. 22
  misc_feature: MA Experiment 108522 PARAMETER Experiment Name: Zm_42deg_Heat_P Parameter: Timepoint (hr) Value: 1
  misc_feature: MA Experiment 108522 PARAMETER Experiment Name: Zm_42deg_Heat_P Parameter: Tissue Value: Aerial
  misc_feature: MA Experiment ID: 108556 Result: Down-regulated in Transcription
  misc_feature: MA Experiment 108556 PARAMETER Experiment Name: Zm_Drought_P Parameter: Age (day) Value: 9
  misc_feature: MA Experiment 108556 PARAMETER Experiment Name: Zm_Drought_P Parameter: Organism Value: Zea mays
  misc_feature: MA Experiment 108556 PARAMETER Experiment Name: Zm_Drought_P Parameter: Plant Line Value: 35A19
  misc_feature: MA Experiment 108556 PARAMETER Experiment Name: Zm_Drought_P Parameter: Timepoint (hr) Value: 24
  misc_feature: MA Experiment 108556 PARAMETER Experiment Name: Zm_Drought_P Parameter: Tissue Value: Aerial
  misc_feature: MA Experiment 108556 PARAMETER Experiment Name: Zm_Drought_P Parameter: Treatment Value: Drought vs. No Drought
agaaaggattctatactaatgcttgagtgtcgccttgttcaacttctcaaccaaggcagagagagttttcatccggcagccgccgagcctgagatccctgcaccgccgcccgccggcccgccggaatggagttcgccttagtcgagagtgaatcgttctcgccttcctgccccacgcttaccatgccagcgctgtcgattggcaacgtggggcagctcgccgtcgaccttctcatatcctcgtcgcgggcgaggcgggtggcctacctcgacgagccctccgtgctgccctgcgccggcaacgacgccttcggccctgacgccgtcggcgacctcgcactcgctctcgaagcttatgaatctacatctcataagctggctttcattcagcaaaggtctccagttactacaggaatgatggtttcatttgcaaaaaatgttgctgatttcataagcagcatcgggaaggaccatattgtcattatatcaagtttagattctggaaagaggagagtgattgatgcatccagtgacatgcaggtgtattacctttcaagttgcaatgaagatggttctgatccagaatatgagaaattggggtggaaaaagcttgaggattacgatccatctcagaaacgttggaattatcttgctagcctggttaagggtggtggtctttcagaagatatggatgatgatactgatgagatgacaataaatgattactatgcaagcttgccatttgcagcactattctctgcctgcaaggctaaaggcttgaaagtttcttgtgtcctgtgctactgctcggaaggcgacaacatgccagaatctttccagttagctgaagcaatatgcaaacttctaggtcatggccctgagaaattccatggaaatgggtcaaatgggtggatcgttcccttgtcatggaaatcagtttatggaccaccacctgatatgtctatcttttagtgttgaattatgatctggtgaagttgccatcacggaaaatgctgagtagaatcgaggatgttgaactcttcatttagacagagtaccagaagtatccaggaaggtgagttgcagacgtttgtggtcagttggtaaaggattactgaacactcaaggatggaacttctgcaggcaccatgatactgaacccttaaatgcatgaatcagaatatttttgcaacttgtactgtggctactgagagtcagatctttgtcaactcaggtctgctagggtgcttaccatcatactgccgtttccattctaaccatggaattccaagcttctcgtctgccgttttggcagttttgc

SEQ ID NO: 5907 - protein, 281 aa, Zea mays subsp. mays
  peptide (1)..(281): Ceres Seq. ID no. 12409284
  misc_feature (1)..(281): Homolog of NCBI NO: 21594933 NR Description: unknown [Arabidopsis thaliana]
  misc_feature (101)..(281): Homolog of NCBI NO: 30794081 NR Description: unknown protein [Arabidopsis thaliana]
  misc_feature (17)..(163): Homolog of NCBI NO: 37589726 NR Description: Unknown (protein for MGC:73278) [Danio rerio]
  misc_feature (209)..(276): Homolog of NCBI NO: 37589726 NR Description: Unknown (protein for MGC:73278) [Danio rerio]
  misc_feature (17)..(192): Homolog of NCBI NO: 19527372 NR Description: Clast3 protein; expressed sequence AW545363 [Mus >gi|9857631|dbj|BAB11962.1| Clast3 protein [Mus musculus]
  misc_feature (17)..(148): Homolog of NCBI NO: 28829982 NR Description: similar to Arabidopsis thaliana (Mouse-ear Genomic DNA, chromosome 3, TAC clone:K13E13 [Dictyostelium
  misc_feature (17)..(192): Homolog of NCBI NO: 22726189 NR Description: hepatocellular carcinoma susceptibility protein;
  misc_feature (17)..(192): Homolog of NCBI NO: 27680767 NR Description: similar to Clast3 protein; expressed sequence
  misc_feature (12)..(163): Homolog of NCBI NO: 6841170 NR Description: HSPC260 [Homo sapiens]
  misc_feature (1)..(281): Homolog of NCBI NO: 18402055 NR Description: expressed protein; protein id: At3g18940.1, by cDNA: 75. [Arabidopsis thaliana] >gi|9280311|dbj|BAB01690.1|
MEFALVESESFSPSCPTLTMPALSIGNVGQLAVDLLISSSRARRVAYLDEPSVLPCAGNDAFGPDAVGDLALALEAYESTSHKLAFIQQRSPVTTGMMVSFAKNVADFISSIGKDHIVIISSLDSGKRRVIDASSDMQVYYLSSCNEDGSDPEYEKLGWKKLEDYDPSQKRWNYLASLVKGGGLSEDMDDDTDEMTINDYYASLPFAALFSACKAKGLKVSCVLCYCSEGDNMPESFQLAEAICKLLGHGPEKFHGNGSNGWIVPLSWKSVYGPPPDMSIF

SEQ ID NO: 5908 - protein, 262 aa, Zea mays subsp. mays
  peptide (1)..(262): Ceres Seq. ID no. 12409285
  misc_feature (1)..(262): Homolog of NCBI NO: 18402055 NR Description: expressed protein; protein id: At3g18940.1, by cDNA: 75. [Arabidopsis thaliana] >gi|9280311|dbj|BAB01690.1|
  misc_feature (1)..(262): Homolog of NCBI NO: 21594933 NR Description: unknown [Arabidopsis thaliana]
  misc_feature (82)..(262): Homolog of NCBI NO: 30794081 NR Description: unknown protein [Arabidopsis thaliana]
  misc_feature (1)..(144): Homolog of NCBI NO: 37589726 NR Description: Unknown (protein for MGC:73278) [Danio rerio]
  misc_feature (190)..(257): Homolog of NCBI NO: 37589726 NR Description: Unknown (protein for MGC:73278) [Danio rerio]
  misc_feature (1)..(173): Homolog of NCBI NO: 19527372 NR Description: Clast3 protein; expressed sequence AW545363 [Mus >gi|9857631|dbj|BAB11962.1| Clast3 protein [Mus musculus]
  misc_feature (1)..(129): Homolog of NCBI NO: 28829982 NR Description: similar to Arabidopsis thaliana (Mouse-ear Genomic DNA, chromosome 3, TAC clone:K13E13 [Dictyostelium
  misc_feature (1)..(173): Homolog of NCBI NO: 22726189 NR Description: hepatocellular carcinoma susceptibility protein;
  misc_feature (1)..(173): Homolog of NCBI NO: 27680767 NR Description: similar to Clast3 protein; expressed sequence
  misc_feature (1)..(144): Homolog of NCBI NO: 6841170 NR Description: HSPC260 [Homo sapiens]
MPALSIGNVGQLAVDLLISSSRARRVAYLDEPSVLPCAGNDAFGPDAVGDLALALEAYESTSHKLAFIQQRSPVTTGMMVSFAKNVADFISSIGKDHIVIISSLDSGKRRVIDASSDMQVYYLSSCNEDGSDPEYEKLGWKKLEDYDPSQKRWNYLASLVKGGGLSEDMDDDTDEMTINDYYASLPFAALFSACKAKGLKVSCVLCYCSEGDNMPESFQLAEAICKLLGHGPEKFHGNGSNGWIVPLSWKSVYGPPPDMSIF

SEQ ID NO: 5909 - protein, 185 aa, Zea mays subsp. mays
  peptide (1)..(185): Ceres Seq. ID no. 12409286
  misc_feature (1)..(185): Homolog of NCBI NO: 18402055 NR Description: expressed protein; protein id: At3g18940.1, by cDNA: 75. [Arabidopsis thaliana] >gi|9280311|dbj|BAB01690.1|
  misc_feature (1)..(185): Homolog of NCBI NO: 21594933 NR Description: unknown [Arabidopsis thaliana]
  misc_feature (5)..(185): Homolog of NCBI NO: 30794081 NR Description: unknown protein [Arabidopsis thaliana]
  misc_feature (1)..(67): Homolog of NCBI NO: 37589726 NR Description: Unknown (protein for MGC:73278) [Danio rerio]
  misc_feature (113)..(180): Homolog of NCBI NO: 37589726 NR Description: Unknown (protein for MGC:73278) [Danio rerio]
  misc_feature (1)..(96): Homolog of NCBI NO: 19527372 NR Description: Clast3 protein; expressed sequence AW545363 [Mus >gi|9857631|dbj|BAB11962.1| Clast3 protein [Mus musculus]
  misc_feature (1)..(52): Homolog of NCBI NO: 28829982 NR Description: similar to Arabidopsis thaliana (Mouse-ear Genomic DNA, chromosome 3, TAC clone:K13E13 [Dictyostelium
  misc_feature (1)..(96): Homolog of NCBI NO: 22726189 NR Description: hepatocellular carcinoma susceptibility protein;
  misc_feature (1)..(96): Homolog of NCBI NO: 27680767 NR Description: similar to Clast3 protein; expressed sequence
  misc_feature (1)..(67): Homolog of NCBI NO: 6841170 NR Description: HSPC260 [Homo sapiens]
MMVSFAKNVADFISSIGKDHIVIISSLDSGKRRVIDASSDMQVYYLSSCNEDGSDPEYEKLGWKKLEDYDPSQKRWNYLASLVKGGGLSEDMDDDTDEMTINDYYASLPFAALFSACKAKGLKVSCVLCYCSEGDNMPESFQLAEAICKLLGHGPEKFHGNGSNGWIVPLSWKSVYGPPPDMSIF

SEQ ID NO: 5910 - DNA, 1518 bp, Zea mays subsp. mays
  misc_feature (1)..(1518): Ceres Seq. ID no. 12409279
  misc_feature: MA Experiment ID: 108597 Result: Up-regulated in Transcription
  misc_feature: MA Experiment 108597 PARAMETER Experiment Name: Zm_100uM_ABA_P Parameter: Age (day) Value: 9
  misc_feature: MA Experiment 108597 PARAMETER Experiment Name: Zm_100uM_ABA_P Parameter: Organism Value: Zea mays
  misc_feature: MA Experiment 108597 PARAMETER Experiment Name: Zm_100uM_ABA_P Parameter: Plant Line Value: 35A19
  misc_feature: MA Experiment 108597 PARAMETER Experiment Name: Zm_100uM_ABA_P Parameter: Timepoint (hr) Value: 24
  misc_feature: MA Experiment 108597 PARAMETER Experiment Name: Zm_100uM_ABA_P Parameter: Tissue Value: Aerial
  misc_feature: MA Experiment 108597 PARAMETER Experiment Name: Zm_100uM_ABA_P Parameter: Treatment Value: 100uM ABA vs. No Treatment
ttttttcgcctataattactcttccccgtgcgccctcgcgaggtcgaacccccaaggcgaggcgacgaaaccctcgccagtccccaactcgaacctcagtcaggcggcgtgagggagggagagttcgaggaccgaggcggcgtcgggcgagatgaagcttaacgtcaagaccctcaagggcaccaacttcgagatcgaggcgagccccgatgcgtcggttgctgacgtgaagaggatcattgagaccactcagggtcagagtacctaccgggcggaccagcaaatgcttatataccaagggaaaattctcaaggatgagaccactttggaaagcaacggagttgctgagaacagcttccttgttataatgttgtccaaggctaaggcatcgtcgagtggagcttctaccactactgctgcaaaagctcctgcaactctggcccaacctgctgcccctgtgccccctgctgcatcagttgcaagaacaccaacacaggctcctgttgccacagctgaaacggcacctccaagtgcccaacctcaggctgctccagctgctacggttgctgctactgatgatgctgatgtgtacagtcaggcagcttcaaaccttgtatctggcaacagtctagaacagactatccaacaaattcttgacatgggtggtggtacatgggaacgtgatacagttgttcgtgctctacgtgctgcatacaataaccctgagagagctatagactacctgtattctggaattcctgagaatgtggaggctcagcctgttgcccgagcacctgctgctggccaacaaacaaatcagcaggccgcatcacccgctcagccagcagttgcattgccagtgcagccatcacctgcctctgcagggcctaatgcaaatcctttgaacctttttcctcagggtgttccaagtggtgggtccaacccaggcgttattccaggtgctggatctggtgcccttgatgccttgcgacagcttccacagtttcaagcactccttcagttagtccaggctaatcctcaaatcttgcagccaatgcttcaagagctaggtaaacaaaacccacaaattctgcggttgattcaggaaaatcaagctgagtttctccgcttggtgaatgaatctcctgagggtggtcctggagggaacatactaggtcaactggcagctgctgtgccacaaacgctgacagttaccccagaggaacgggaggctatccagcggctcgagggaatggggttcaaccgtgagcttgtgctagaagttttctttgcatgcaacaaggacgaagagcttacagccaactaccttctggatcatggccatgagtttgacgagcagcagcaatagacgtggggtggatggaggaaaccgaggcagttgcagaacagcgagtgtcgttcttatgctatgctgctgactatcttttatttccatatatatttgttcggaatgctttctaagtacatattaattcaatatcaagcgttataccgtgc

SEQ ID NO: 5911 - protein, 405 aa, Zea mays subsp. mays
  peptide (1)..(405): Ceres Seq. ID no. 12409280
  misc_feature (1)..(78): Pfam Name: Ubiquitin family Pfam Description: Ubiquitin family
  misc_feature (1)..(402): Homolog of NCBI NO: 5640111 NR Description: RAD23 protein [Lycopersicon esculentum]
  misc_feature (1)..(403): Homolog of NCBI NO: 15240922 NR Description: DNA repair protein RAD23 homolog; protein id: supported by cDNA: 36697., supported by cDNA: gi_14335003, by cDNA: gi_16648837, supported by cDNA: gi_19548080 [Arabidopsis
  misc_feature (1)..(403): Homolog of NCBI NO: 14335004 NR Description: unknown protein [Arabidopsis thaliana]
  misc_feature (1)..(402): Homolog of NCBI NO: 38175472 NR Description: putative osRAD23 [Oryza sativa (japonica
  misc_feature (1)..(402): Homolog of NCBI NO: 7446462 NR Description: RAD23 protein homolog - rice
  misc_feature (1)..(351): Homolog of NCBI NO: 7446459 NR Description: RAD23 protein, isoform I - carrot
  misc_feature (1)..(402): Homolog of NCBI NO: 15232924 NR Description: putative RAD23; protein id: At3g02540.1, by cDNA: gi_14517453 [Arabidopsis thaliana] putative RAD23 [Arabidopsis thaliana] >gi|14517454|gb|AAK62617.1|
  misc_feature (1)..(402): Homolog of NCBI NO: 7446460 NR Description: RAD23 protein, isoform II - carrot
  misc_feature (51)..(402): Homolog of NCBI NO: 30409726 NR Description: RAD23-like protein [Arabidopsis thaliana]
  misc_feature (1)..(327): Homolog of NCBI NO: 30409730 NR Description: RAD23-like protein [Arabidopsis thaliana]
MKLNVKTLKGTNFEIEASPDASVADVKRIIETTQGQSTYRADQQMLIYQGKILKDETTLESNGVAENSFLVIMLSKAKASSSGASTTTAAKAPATLAQPAAPVPPAASVARTPTQAPVATAETAPPSAQPQAAPAATVAATDDADVYSQAASNLVSGNSLEQTIQQILDMGGGTWERDTVVRALRAAYNNPERAIDYLYSGIPENVEAQPVARAPAAGQQTNQQAASPAQPAVALPVQPSPASAGPNANPLNLFPQGVPSGGSNPGVIPGAGSGALDALRQLPQFQALLQLVQANPQILQPMLQELGKQNPQILRLIQENQAEFLRLVNESPEGGPGGNILGQLAAAVPQTLTVTPEEREAIQRLEGMGFNRELVLEVFFACNKDEELTANYLLDHGHEFDEQQQ

SEQ ID NO: 5912 - protein, 361 aa, Zea mays subsp. mays
  peptide (1)..(361): Ceres Seq. ID no. 12409281
  misc_feature (115)..(157): Pfam Name: UBA/TS-N domain Pfam Description: UBA/TS-N domain
  misc_feature (1)..(358): Homolog of NCBI NO: 5640111 NR Description: RAD23 protein [Lycopersicon esculentum]
  misc_feature (1)..(359): Homolog of NCBI NO: 15240922 NR Description: DNA repair protein RAD23 homolog; protein id: supported by cDNA: 36697., supported by cDNA: gi_14335003, by cDNA: gi_16648837, supported by cDNA: gi_19548080 [Arabidopsis
  misc_feature (1)..(359): Homolog of NCBI NO: 14335004 NR Description: unknown protein [Arabidopsis thaliana]
  misc_feature (1)..(358): Homolog of NCBI NO: 38175472 NR Description: putative osRAD23 [Oryza sativa (japonica
  misc_feature (1)..(358): Homolog of NCBI NO: 7446462 NR Description: RAD23 protein homolog - rice
  misc_feature (1)..(307): Homolog of NCBI NO: 7446459 NR Description: RAD23 protein, isoform I - carrot
  misc_feature (1)..(358): Homolog of NCBI NO: 15232924 NR Description: putative RAD23; protein id: At3g02540.1, by cDNA: gi_14517453 [Arabidopsis thaliana] putative RAD23 [Arabidopsis thaliana] >gi|14517454|gb|AAK62617.1|
  misc_feature (1)..(358): Homolog of NCBI NO: 7446460 NR Description: RAD23 protein, isoform II - carrot
  misc_feature (7)..(358): Homolog of NCBI NO: 30409726 NR Description: RAD23-like protein [Arabidopsis thaliana]
  misc_feature (1)..(283): Homolog of NCBI NO: 30409730 NR Description: RAD23-like protein [Arabidopsis thaliana]
MLIYQGKILKDETTLESNGVAENSFLVIMLSKAKASSSGASTTTAAKAPATLAQPAAPVPPAASVARTPTQAPVATAETAPPSAQPQAAPAATVAATDDADVYSQAASNLVSGNSLEQTIQQILDMGGGTWERDTVVRALRAAYNNPERAIDYLYSGIPENVEAQPVARAPAAGQQTNQQAASPAQPAVALPVQPSPASAGPNANPLNLFPQGVPSGGSNPGVIPGAGSGALDALRQLPQFQALLQLVQANPQILQPMLQELGKQNPQILRLIQENQAEFLRLVNESPEGGPGGNILGQLAAAVPQTLTVTPEEREAIQRLEGMGFNRELVLEVFFACNKDEELTANYLLDHGHEFDEQQQ

SEQ ID NO: 5913 - protein, 333 aa, Zea mays subsp. mays
  peptide (1)..(333): Ceres Seq. ID no. 12409282
  misc_feature (87)..(129): Pfam Name: UBA/TS-N domain Pfam Description: UBA/TS-N domain
  misc_feature (1)..(330): Homolog of NCBI NO: 5640111 NR Description: RAD23 protein [Lycopersicon esculentum]
  misc_feature (1)..(331): Homolog of NCBI NO: 15240922 NR Description: DNA repair protein RAD23 homolog; protein id: supported by cDNA: 36697., supported by cDNA: gi_14335003, by cDNA: gi_16648837, supported by cDNA: gi_19548080 [Arabidopsis
  misc_feature (1)..(331): Homolog of NCBI NO: 14335004 NR Description: unknown protein [Arabidopsis thaliana]
  misc_feature (1)..(330): Homolog of NCBI NO: 38175472 NR Description: putative osRAD23 [Oryza sativa (japonica
  misc_feature (1)..(330): Homolog of NCBI NO: 7446462 NR Description: RAD23 protein homolog - rice
  misc_feature (1)..(279): Homolog of NCBI NO: 7446459 NR Description: RAD23 protein, isoform I - carrot
  misc_feature (1)..(330): Homolog of NCBI NO: 15232924 NR Description: putative RAD23; protein id: At3g02540.1, by cDNA: gi_14517453 [Arabidopsis thaliana] putative RAD23 [Arabidopsis thaliana] >gi|14517454|gb|AAK62617.1|
  misc_feature (1)..(330): Homolog of NCBI NO: 7446460 NR Description: RAD23 protein, isoform II - carrot
  misc_feature (1)..(330): Homolog of NCBI NO: 30409726 NR Description: RAD23-like protein [Arabidopsis thaliana]
  misc_feature (1)..(255): Homolog of NCBI NO: 30409730 NR Description: RAD23-like protein [Arabidopsis thaliana]
MLSKAKASSSGASTTTAAKAPATLAQPAAPVPPAASVARTPTQAPVATAETAPPSAQPQAAPAATVAATDDADVYSQAASNLVSGNSLEQTIQQILDMGGGTWERDTVVRALRAAYNNPERAIDYLYSGIPENVEAQPVARAPAAGQQTNQQAASPAQPAVALPVQPSPASAGPNANPLNLFPQGVPSGGSNPGVIPGAGSGALDALRQLPQFQALLQLVQANPQILQPMLQELGKQNPQILRLIQENQAEFLRLVNESPEGGPGGNILGQLAAAVPQTLTVTPEEREAIQRLEGMGFNRELVLEVFFACNKDEELTANYLLDHGHEFDEQQQ

SEQ ID NO: 5914 - DNA, 1676 bp, Zea mays subsp. mays
  misc_feature (1)..(1676): Ceres Seq. ID no. 12359529
  misc_feature: MA Experiment ID: 108529 Result: Up-regulated in Transcription
  misc_feature: MA Experiment 108529 PARAMETER Experiment Name: Zm_Imbibed_Seeds_P Parameter: Age (day) Value: 5 vs. 2
  misc_feature: MA Experiment 108529 PARAMETER Experiment Name: Zm_Imbibed_Seeds_P Parameter: Organism Value: Zea mays
  misc_feature: MA Experiment 108529 PARAMETER Experiment Name: Zm_Imbibed_Seeds_P Parameter: Plant Line Value: 35A19
  misc_feature: MA Experiment 108529 PARAMETER Experiment Name: Zm_Imbibed_Seeds_P Parameter: Tissue Value: Roots vs. Embryo
  misc_feature: MA Experiment ID: 108535 Result: Down-regulated in Transcription
  misc_feature: MA Experiment 108535 PARAMETER Experiment Name: Zm_Meristem_P Parameter: Age (day) Value: 8
  misc_feature: MA Experiment 108535 PARAMETER Experiment Name: Zm_Meristem_P Parameter: Organism Value: Zea mays
  misc_feature: MA Experiment 108535 PARAMETER Experiment Name: Zm_Meristem_P Parameter: Plant Line Value: 35A19
  misc_feature: MA Experiment 108535 PARAMETER Experiment Name: Zm_Meristem_P Parameter: Tissue Value: Root Meristem vs. Above Root Meristem
  misc_feature: MA Experiment ID: 20000108 Result: Down-regulated in Transcription
  misc_feature: MA Experiment 20000108 PARAMETER Experiment Name: Zm_Root-Tips_P Parameter: Age (day) Value: 12
  misc_feature: MA Experiment 20000108 PARAMETER Experiment Name: Zm_Root-Tips_P Parameter: Organism Value: Zea mays
  misc_feature: MA Experiment 20000108 PARAMETER Experiment Name: Zm_Root-Tips_P Parameter: Tissue Value: Root tips vs. Root mid region    35
  misc_feature: MA Experiment 20000108 PARAMETER Experiment Name: Zm_Root-Tips_P Parameter: Tissue Value: Root tips vs. Root mid region   Sequence Listing-Misc Features (4)
gtacaagtacaaggatacagccgcaggcccgcagaggaagaggagagcctactctcctgccatggccgcgccgagtccgctcccccgcttcctgatactcctgctcgccgtaacctcctccgcgtttgccgccgccgcggcaaccggggctccggtggtgggggaggactacgtccgtccgccgccggcgcggtgccaccgcaaggcactccttagcctcttcccttggagcaagaaggaggagtccgccgcctcctccgatccgcagcaggtgcacatttctctagctggagaaaagcacatgagaataacatgggttaccaatgataactctgtcccatctgtggtggactatggaactaaagaaagtacatacacaatgaaatctcaaggagaaagcacatcctacagctacttattgtatagttcaggaaaaattcatcatgttgtcatcggacctcttgaagataacactatttattactaccgatgtggagggcagggtccagaattccaatttaagaccccgccctcccaatttcctttgtcattggctgttgttggtgatcttggtcagactagttggacaacatcaaccctgaatcacattaagcagtgtgagcatgatatgcttttactccctggtgatctatcttatgctgattatatgcaacacttgtgggattccttcggcacattggtggagccacttgctagcaaccggccttggatggtgacagaaggcaaccatgagaaggagcacattccattttttgagtcaggatttcaatcttataatgcacgatggaaaatgccttatgaagagagcggatctagatcaaatttgtactactcttttgaagttgctggtgcacacatcataatgctaggttcatacacagattatgatgatagctcagatcagtatgcttggctaaaggctgatcttgccaaggttgatagaaagaggacaccctggctcattgtgttgttgcacgtaccatggtacaatagcaattgggctcatcagggtgaaggcgacagtatgatggcttcaatggagcctttgctgtacgctgctcatgtggatatggtaatagcaggtcatgtccatgcttatgaacgtgcggagcgagtctacaattccagacctgatccttgtggcgctgtccacataactatcggcgacggtgggaaccgtgaaggcttggcccgcaggtaccgtaacccgaagccagcgtggtcggtcttcagggaagcgagctttgggcacggcgagctaaagatcgtgaactccacccatgcccactggacctggcacagaaacgacgacgaagagccggtgagaaccgatgacgtgtggataaactctcttgctggttcagggtgcatccaggagggcagccgtgaccgtgagtcgaggaagatcctgatgtctccttgatgcttagcagtatagcttgggcctgcgatgtactgtgtatataatgcgtgctacttgataatctaacacctagtaaaagttaatgcgtcgtgctgcttgcctgcgtgtatactggagactggtttgatctggcgcgtttgctgctcttgttgtgttgtaccactatggatgtttgtagcaaagtgacatacgacggtgttgtaatggactgaagatgaatagatgatgttcc

SEQ ID NO: 5915 - protein, 480 aa, Zea mays subsp. mays
  peptide (1)..(480): Ceres Seq. ID no. 12359530
  misc_feature (182)..(373): Pfam Name: Calcineurin-like phosphoesterase Pfam Description: Calcineurin-like phosphoesterase
  misc_feature (21)..(480): Homolog of NCBI NO: 34896986 NR Description: putative purple acid phosphatase [Oryza sativa]
  misc_feature (33)..(480): Homolog of NCBI NO: 22331208 NR Description: purple acid phosphatase, putative; protein id: supported by cDNA: gi_17064823, supported by cDNA: gi_20259847
  misc_feature (33)..(480): Homolog of NCBI NO: 25229112 NR Description: putative purple acid phosphatase [Arabidopsis
  misc_feature (84)..(472): Homolog of NCBI NO: 22331756 NR Description: purple acid phosphatase-like protein; protein id: supported by cDNA: gi_20257494 [Arabidopsis thaliana]
  misc_feature (84)..(472): Homolog of NCBI NO: 11358734 NR Description: acid phosphatase (EC 3.1.3.2) purple F3C22.220,
  misc_feature (35)..(468): Homolog of NCBI NO: 21741737 NR Description: OSJNBa0073L04.17 [Oryza sativa (japonica
  misc_feature (88)..(457): Homolog of NCBI NO: 15231688 NR Description: (NM_115141) purple acid phosphatase-like protein; id: At3g52810.1, supported by cDNA: gi_20257492 [Arabidopsis
  misc_feature (88)..(463): Homolog of NCBI NO: 15231682 NR Description: (NM_115138) purple acid phosphatase-like protein; id: At3g52780.1, supported by cDNA: gi_20257490 [Arabidopsis
  misc_feature (88)..(375): Homolog of NCBI NO: 30693705 NR Description: purple acid phosphatase (PAP20) [Arabidopsis
  misc_feature (88)..(453): Homolog of NCBI NO: 19879917 NR Description: acid phosphatase [Oryza sativa]
YKYKDTAAGPQRKRRAYSPAMAAPSPLPRFLILLLAVTSSAFAAAAATGAPVVGEDYVRPPPARCHRKALLSLFPWSKKEESAASSDPQQVHISLAGEKHMRITWVTNDNSVPSVVDYGTKESTYTMKSQGESTSYSYLLYSSGKIHHVVIGPLEDNTIYYYRCGGQGPEFQFKTPPSQFPLSLAVVGDLGQTSWTTSTLNHIKQCEHDMLLLPGDLSYADYMQHLWDSFGTLVEPLASNRPWMVTEGNHEKEHIPFFESGFQSYNARWKMPYEESGSRSNLYYSFEVAGAHIIMLGSYTDYDDSSDQYAWLKADLAKVDRKRTPWLIVLLHVPWYNSNWAHQGEGDSMMASMEPLLYAAHVDMVIAGHVHAYERAERVYNSRPDPCGAVHITIGDGGNREGLARRYRNPKPAWSVFREASFGHGELKIVNSTHAHWTWHRNDDEEPVRTDDVWINSLAGSGCIQEGSRDRESRKILMSP

SEQ ID NO: 5916 - protein, 460 aa, Zea mays subsp. mays
  peptide (1)..(460): Ceres Seq. ID no. 12359531
  misc_feature (162)..(353): Pfam Name: Calcineurin-like phosphoesterase Pfam Description: Calcineurin-like phosphoesterase
  misc_feature (1)..(460): Homolog of NCBI NO: 34896986 NR Description: putative purple acid phosphatase [Oryza sativa]
  misc_feature (13)..(460): Homolog of NCBI NO: 22331208 NR Description: purple acid phosphatase, putative; protein id: supported by cDNA: gi_17064823, supported by cDNA: gi_20259847
  misc_feature (13)..(460): Homolog of NCBI NO: 25229112 NR Description: putative purple acid phosphatase [Arabidopsis
  misc_feature (64)..(452): Homolog of NCBI NO: 22331756 NR Description: purple acid phosphatase-like protein; protein id: supported by cDNA: gi_20257494 [Arabidopsis thaliana]
  misc_feature (64)..(452): Homolog of NCBI NO: 11358734 NR Description: acid phosphatase (EC 3.1.3.2) purple F3C22.220,
  misc_feature (15)..(448): Homolog of NCBI NO: 21741737 NR Description: OSJNBa0073L04.17 [Oryza sativa (japonica
  misc_feature (68)..(437): Homolog of NCBI NO: 15231688 NR Description: (NM_115141) purple acid phosphatase-like protein; id: At3g52810.1, supported by cDNA: gi_20257492 [Arabidopsis
  misc_feature (68)..(443): Homolog of NCBI NO: 15231682 NR Description: (NM_115138) purple acid phosphatase-like protein; id: At3g52780.1, supported by cDNA: gi_20257490 [Arabidopsis
  misc_feature (68)..(355): Homolog of NCBI NO: 30693705 NR Description: purple acid phosphatase (PAP20) [Arabidopsis
  misc_feature (68)..(433): Homolog of NCBI NO: 19879917 NR Description: acid phosphatase [Oryza sativa]
MAAPSPLPRFLILLLAVTSSAFAAAAATGAPVVGEDYVRPPPARCHRKALLSLFPWSKKEESAASSDPQQVHISLAGEKHMRITWVTNDNSVPSVVDYGTKESTYTMKSQGESTSYSYLLYSSGKIHHVVIGPLEDNTIYYYRCGGQGPEFQFKTPPSQFPLSLAVVGDLGQTSWTTSTLNHIKQCEHDMLLLPGDLSYADYMQHLWDSFGTLVEPLASNRPWMVTEGNHEKEHIPFFESGFQSYNARWKMPYEESGSRSNLYYSFEVAGAHIIMLGSYTDYDDSSDQYAWLKADLAKVDRKRTPWLIVLLHVPWYNSNWAHQGEGDSMMASMEPLLYAAHVDMVIAGHVHAYERAERVYNSRPDPCGAVHITIGDGGNREGLARRYRNPKPAWSVFREASFGHGELKIVNSTHAHWTWHRNDDEEPVRTDDVWINSLAGSGCIQEGSRDRESRKILMSP

SEQ ID NO: 5917 - protein, 380 aa, Zea mays subsp. mays
  peptide (1)..(380): Ceres Seq. ID no. 12359532
  misc_feature (82)..(273): Pfam Name: Calcineurin-like phosphoesterase Pfam Description: Calcineurin-like phosphoesterase
  misc_feature (1)..(380): Homolog of NCBI NO: 34896986 NR Description: putative purple acid phosphatase [Oryza sativa]
  misc_feature (1)..(380): Homolog of NCBI NO: 22331208 NR Description: purple acid phosphatase, putative; protein id: supported by cDNA: gi_17064823, supported by cDNA: gi_20259847
  misc_feature (1)..(380): Homolog of NCBI NO: 25229112 NR Description: putative purple acid phosphatase [Arabidopsis
  misc_feature (1)..(372): Homolog of NCBI NO: 22331756 NR Description: purple acid phosphatase-like protein; protein id: supported by cDNA: gi_20257494 [Arabidopsis thaliana]
  misc_feature (1)..(372): Homolog of NCBI NO: 11358734 NR Description: acid phosphatase (EC 3.1.3.2) purple F3C22.220,
  misc_feature (1)..(368): Homolog of NCBI NO: 21741737 NR Description: OSJNBa0073L04.17 [Oryza sativa (japonica
  misc_feature (1)..(357): Homolog of NCBI NO: 15231688 NR Description: (NM_115141) purple acid phosphatase-like protein; id: At3g52810.1, supported by cDNA: gi_20257492 [Arabidopsis
  misc_feature (1)..(363): Homolog of NCBI NO: 15231682 NR Description: (NM_115138) purple acid phosphatase-like protein; id: At3g52780.1, supported by cDNA: gi_20257490 [Arabidopsis
  misc_feature (1)..(275): Homolog of NCBI NO: 30693705 NR Description: purple acid phosphatase (PAP20) [Arabidopsis
  misc_feature (1)..(353): Homolog of NCBI NO: 19879917 NR Description: acid phosphatase [Oryza sativa]
MRITWVTNDNSVPSVVDYGTKESTYTMKSQGESTSYSYLLYSSGKIHHVVIGPLEDNTIYYYRCGGQGPEFQFKTPPSQFPLSLAVVGDLGQTSWTTSTLNHIKQCEHDMLLLPGDLSYADYMQHLWDSFGTLVEPLASNRPWMVTEGNHEKEHIPFFESGFQSYNARWKMPYEESGSRSNLYYSFEVAGAHIIMLGSYTDYDDSSDQYAWLKADLAKVDRKRTPWLIVLLHVPWYNSNWAHQGEGDSMMASMEPLLYAAHVDMVIAGHVHAYERAERVYNSRPDPCGAVHITIGDGGNREGLARRYRNPKPAWSVFREASFGHGELKIVNSTHAHWTWHRNDDEEPVRTDDVWINSLAGSGCIQEGSRDRESRKILMSP

SEQ ID NO: 5918 - DNA, 1551 bp, Zea mays subsp. mays
  misc_feature (1)..(1551): Ceres Seq. ID no. 12344145
  misc_feature: MA Experiment ID: 108544 Result: Up-regulated in Transcription
attcctactccgagtcgccacctgcatttgtctatcggtcaggagcatggaggggagacggctttcacgccagcagttgcgctcgctaccggacgccgcgtccttctcgccggaagtcgcggccagcccggggctcgtcggctccggccagttgggtctcggtctctcggcggcgttcgagactctgccgccgattttggtagaagtgaatggctttacaaggacactgattttgaataggccaaagcagttaaatgcactctcctcgaccatgattatgggactcttgaggtgtttcactgcttatgagaaagacgatggagttaaattgttgattatgaagggtaaaggaagagcattttgtgctggaggtgatgttgctgcagttgttcgatctatacataaagacagctggaaatatggtgctgatttcttccgaaatgaatttttgttgaattacataattgcaacttataccaaacctcaggtttctcttcttagtggaatcgtcatgggtggaggtgctggcgtttctttacatggaaggtttagagttgccaccgataacacggtttttgcaatgccagaaacagctctgggtctctttccagatataggggcctcatattttctgtctcggcttcctggattctatggagagtatgttggtcttgctggtgccagattggatggtggggaaatgcttgcatgtggtctggcaactcattttgtccagtcaaatagtctgctatcgctggaagaatcacttaaaaaggtggatacttccaatgcttttgcagtgtgtggtatcatcgatcaatttgctcaacaaccatcactgaaagaaagcagctctttgaataggttggaaatcatcaacaaatgcttttccaaaaggacagtcgaagaaattatatccgctcttgaagtagaggcctcaaattcggcagatgaatgggttgctacaacaatccagtccttgaagaaggcttctcctaccagtctgaaaatctctctgagatcgataagagaagggaggacacaaactgttggggagtgcttgcagcgggaatatagaatggtctgccatgtcatgcgtggtgacttcagcagagacttctttgagggatgcagggctatattgctagataaagatcgaaacccaaagtggatgcctccaaggttggaacaagtgcatgatgaggctgttgaacagtatttctccagaattgatgatccacagtgggaagacttgaacctacctgctagacgctcccacggaagaaatatcgagtccaagctttgatcgaaggtcatgggagaaaggtggaactctggaacggagcctcggtagtggtcagaataacacattattgcacatcatctcaagtttgaagagtctgcagactattgataaaataaaaacatgaatgtgccatataggtcaacttgtatcacagaaagaaactctttgctgtttatacgtggagactggagtcatatgcatttttaaataattataagtaataaaatcgaaaaagaaatcgttgg

SEQ ID NO: 5919 - protein, 434 aa, Zea mays subsp. mays
  peptide (1)..(434): Ceres Seq. ID no. 12344146
  misc_feature (74)..(244): Pfam Name: Enoyl-CoA hydratase/isomerase family Pfam Description: Enoyl-CoA hydratase/isomerase family
  misc_feature (65)..(425): Homolog of NCBI NO: 15239206 NR Description: 3-hydroxyisobutyryl-coenzyme A hydrolase; protein
  misc_feature (65)..(434): Homolog of NCBI NO: 15224549 NR Description: 3-hydroxyisobutyryl-coenzyme A hydrolase; protein
  misc_feature (91)..(423): Homolog of NCBI NO: 6014701 NR Description: enoyl-CoA-hydratase [Avicennia marina]
  misc_feature (65)..(425): Homolog of NCBI NO: 15224539 NR Description: 3-hydroxyisobutyryl-coenzyme A hydrolase; protein
  misc_feature (65)..(323): Homolog of NCBI NO: 30695218 NR Description: enoyl-CoA hydratase/isomerase family [Arabidopsis
  misc_feature (304)..(423): Homolog of NCBI NO: 30695218 NR Description: enoyl-CoA hydratase/isomerase family [Arabidopsis
  misc_feature (223)..(434): Homolog of NCBI NO: 37537052 NR Description: putative enoyl-CoA-hydratase [Oryza sativa
  misc_feature (161)..(423): Homolog of NCBI NO: 2688820 NR Description: enoyl-CoA hydratase [Prunus armeniaca]
  misc_feature (65)..(424): Homolog of NCBI NO: 22329062 NR Description: enoyl-CoA hydratase - like protein; protein id: supported by cDNA: gi_19424018, supported by cDNA: gi_21281144
  misc_feature (63)..(421): Homolog of NCBI NO: 30679729 NR Description: 3-hydroxyisobutyryl-coenzyme A hydrolase
FLLRVATCICLSVRSMEGRRLSRQQLRSLPDAASFSPEVAASPGLVGSGQLGLGLSAAFETLPPILVEVNGFTRTLILNRPKQLNALSSTMIMGLLRCFTAYEKDDGVKLLIMKGKGRAFCAGGDVAAVVRSIHKDSWKYGADFFRNEFLLNYIIATYTKPQVSLLSGIVMGGGAGVSLHGRFRVATDNTVFAMPETALGLFPDIGASYFLSRLPGFYGEYVGLAGARLDGGEMLACGLATHFVQSNSLLSLEESLKKVDTSNAFAVCGIIDQFAQQPSLKESSSLNRLEIINKCFSKRTVEEIISALEVEASNSADEWVATTIQSLKKASPTSLKISLRSIREGRTQTVGECLQREYRMVCHVMRGDFSRDFFEGCRAILLDKDRNPKWMPPRLEQVHDEAVEQYFSRIDDPQWEDLNLPARRSHGRNIESKL

SEQ ID NO: 5920 - protein, 419 aa, Zea mays subsp. mays
  peptide (1)..(419): Ceres Seq. ID no. 12344147
  misc_feature (59)..(229): Pfam Name: Enoyl-CoA hydratase/isomerase family Pfam Description: Enoyl-CoA hydratase/isomerase family
  misc_feature (50)..(410): Homolog of NCBI NO: 15239206 NR Description: 3-hydroxyisobutyryl-coenzyme A hydrolase; protein
  misc_feature (50)..(419): Homolog of NCBI NO: 15224549 NR Description: 3-hydroxyisobutyryl-coenzyme A hydrolase; protein
  misc_feature (76)..(408): Homolog of NCBI NO: 6014701 NR Description: enoyl-CoA-hydratase [Avicennia marina]
  misc_feature (50)..(410): Homolog of NCBI NO: 15224539 NR Description: 3-hydroxyisobutyryl-coenzyme A hydrolase; protein
  misc_feature (50)..(308): Homolog of NCBI NO: 30695218 NR Description: enoyl-CoA hydratase/isomerase family [Arabidopsis
  misc_feature (289)..(408): Homolog of NCBI NO: 30695218 NR Description: enoyl-CoA hydratase/isomerase family [Arabidopsis
  misc_feature (208)..(419): Homolog of NCBI NO: 37537052 NR Description: putative enoyl-CoA-hydratase [Oryza sativa
  misc_feature (146)..(408): Homolog of NCBI NO: 2688820 NR Description: enoyl-CoA hydratase [Prunus armeniaca]
  misc_feature (50)..(409): Homolog of NCBI NO: 22329062 NR Description: enoyl-CoA hydratase - like protein; protein id: supported by cDNA: gi_19424018, supported by cDNA: gi_21281144
  misc_feature (48)..(406): Homolog of NCBI NO: 30679729 NR Description: 3-hydroxyisobutyryl-coenzyme A hydrolase
MEGRRLSRQQLRSLPDAASFSPEVAASPGLVGSGQLGLGLSAAFETLPPILVEVNGFTRTLILNRPKQLNALSSTMIMGLLRCFTAYEKDDGVKLLIMKGKGRAFCAGGDVAAVVRSIHKDSWKYGADFFRNEFLLNYIIATYTKPQVSLLSGIVMGGGAGVSLHGRFRVATDNTVFAMPETALGLFPDIGASYFLSRLPGFYGEYVGLAGARLDGGEMLACGLATHFVQSNSLLSLEESLKKVDTSNAFAVCGIIDQFAQQPSLKESSSLNRLEIINKCFSKRTVEEIISALEVEASNSADEWVATTIQSLKKASPTSLKISLRSIREGRTQTVGECLQREYRMVCHVMRGDFSRDFFEGCRAILLDKDRNPKWMPPRLEQVHDEAVEQYFSRIDDPQWEDLNLPARRSHGRNIESKL

SEQ ID NO: 5921 - protein, 344 aa, Zea mays subsp. mays
  peptide (1)..(344): Ceres Seq. ID no. 12344148
  misc_feature (1)..(154): Pfam Name: Enoyl-CoA hydratase/isomerase family Pfam Description: Enoyl-CoA hydratase/isomerase family
  misc_feature (1)..(344): Homolog of NCBI NO: 15224549 NR Description: 3-hydroxyisobutyryl-coenzyme A hydrolase; protein
  misc_feature (1)..(333): Homolog of NCBI NO: 6014701 NR Description: enoyl-CoA-hydratase [Avicennia marina]
  misc_feature (1)..(335): Homolog of NCBI NO: 15224539 NR Description: 3-hydroxyisobutyryl-coenzyme A hydrolase; protein
  misc_feature (1)..(233): Homolog of NCBI NO: 30695218 NR Description: enoyl-CoA hydratase/isomerase family [Arabidopsis
  misc_feature (214)..(333): Homolog of NCBI NO: 30695218 NR Description: enoyl-CoA hydratase/isomerase family [Arabidopsis
  misc_feature (1)..(335): Homolog of NCBI NO: 15239206 NR Description: 3-hydroxyisobutyryl-coenzyme A hydrolase; protein
  misc_feature (133)..(344): Homolog of NCBI NO: 37537052 NR Description: putative enoyl-CoA-hydratase [Oryza sativa
  misc_feature (71)..(333): Homolog of NCBI NO: 2688820 NR Description: enoyl-CoA hydratase [Prunus armeniaca]
  misc_feature (1)..(334): Homolog of NCBI NO: 22329062 NR Description: enoyl-CoA hydratase - like protein; protein id: supported by cDNA: gi_19424018, supported by cDNA: gi_21281144
  misc_feature (1)..(331): Homolog of NCBI NO: 30679729 NR Description: 3-hydroxyisobutyryl-coenzyme A hydrolase
MIMGLLRCFTAYEKDDGVKLLIMKGKGRAFCAGGDVAAVVRSIHKDSWKYGADFFRNEFLLNYIIATYTKPQVSLLSGIVMGGGAGVSLHGRFRVATDNTVFAMPETALGLFPDIGASYFLSRLPGFYGEYVGLAGARLDGGEMLACGLATHFVQSNSLLSLEESLKKVDTSNAFAVCGIIDQFAQQPSLKESSSLNRLEIINKCFSKRTVEEIISALEVEASNSADEWVATTIQSLKKASPTSLKISLRSIREGRTQTVGECLQREYRMVCHVMRGDFSRDFFEGCRAILLDKDRNPKWMPPRLEQVHDEAVEQYFSRIDDPQWEDLNLPARRSHGRNIESKL

SEQ ID NO: 5922 - DNA, 2017 bp, Zea mays subsp. mays
  misc_feature (1)..(2017): Ceres Seq. ID no. 12405563
  misc_feature: MA Experiment ID: 108504 Result: Down-regulated in Transcription
  misc_feature: MA Experiment 108504 PARAMETER Experiment Name: Zm_Drought_P Parameter: Age (day) Value: 8
  misc_feature: MA Experiment 108504 PARAMETER Experiment Name: Zm_Drought_P Parameter: Organism Value: Zea mays
  misc_feature: MA Experiment 108504 PARAMETER Experiment Name: Zm_Drought_P Parameter: Plant Line Value: 35A19
  misc_feature: MA Experiment 108504 PARAMETER Experiment Name: Zm_Drought_P Parameter: Timepoint (hr) Value: 12
  misc_feature: MA Experiment 108504 PARAMETER Experiment Name: Zm_Drought_P Parameter: Tissue Value: Aerial
  misc_feature: MA Experiment 108504 PARAMETER Experiment Name: Zm_Drought_P Parameter: Treatment Value: Drought vs. No Drought
  misc_feature: MA Experiment ID: 108528 Result: Down-regulated in Transcription
  misc_feature: MA Experiment 108528 PARAMETER Experiment Name: Zm_Imbibed_Seeds_P Parameter: Age (day) Value: 5 vs. 2
  misc_feature: MA Experiment 108528 PARAMETER Experiment Name: Zm_Imbibed_Seeds_P Parameter: Organism Value: Zea mays
  misc_feature: MA Experiment 108528 PARAMETER Experiment Name: Zm_Imbibed_Seeds_P Parameter: Plant Line Value: 35A19
  misc_feature: MA Experiment 108528 PARAMETER Experiment Name: Zm_Imbibed_Seeds_P Parameter: Tissue Value: Aerial vs. Embryo
  misc_feature: MA Experiment ID: 108530 Result: Down-regulated in Transcription
  misc_feature: MA Experiment 108530 PARAMETER Experiment Name: Zm_Imbibed_Seeds_P Parameter: Age (day) Value: 6 vs. 2
  misc_feature: MA Experiment 108530 PARAMETER Experiment Name: Zm_Imbibed_Seeds_P Parameter: Organism Value: Zea mays
  misc_feature: MA Experiment 108530 PARAMETER Experiment Name: Zm_Imbibed_Seeds_P Parameter: Plant Line Value: 35A19
  misc_feature: MA Experiment 108530 PARAMETER Experiment Name: Zm_Imbibed_Seeds_P Parameter: Tissue Value: Aerial vs. Embryo
  misc_feature: MA Experiment ID: 108535 Result: Up-regulated in Transcription
  misc_feature: MA Experiment 108535 PARAMETER Experiment Name: Zm_Meristem_P Parameter: Age (day) Value: 8
  misc_feature: MA Experiment 108535 PARAMETER Experiment Name: Zm_Meristem_P Parameter: Organism Value: Zea mays
  misc_feature: MA Experiment 108535 PARAMETER Experiment Name: Zm_Meristem_P Parameter: Plant Line Value: 35A19
  misc_feature: MA Experiment 108535 PARAMETER Experiment Name: Zm_Meristem_P Parameter: Tissue Value: Root Meristem vs. Above Root Meristem
  misc_feature: MA Experiment ID: 108543 Result: Up-regulated in Transcription
  misc_feature: MA Experiment ID: 108597 Result: Down-regulated in Transcription
  misc_feature: MA Experiment 108597 PARAMETER Experiment Name: Zm_100uM_ABA_P Parameter: Age (day) Value: 9
  misc_feature: MA Experiment 108597 PARAMETER Experiment Name: Zm_100uM_ABA_P Parameter: Organism Value: Zea mays
  misc_feature: MA Experiment 108597 PARAMETER Experiment Name: Zm_100uM_ABA_P Parameter: Plant Line Value: 35A19
  misc_feature: MA Experiment 108597 PARAMETER Experiment Name: Zm_100uM_ABA_P Parameter: Timepoint (hr) Value: 24
  misc_feature: MA Experiment 108597 PARAMETER Experiment Name: Zm_100uM_ABA_P Parameter: Tissue Value: Aerial
  misc_feature: MA Experiment 108597 PARAMETER Experiment Name: Zm_100uM_ABA_P Parameter: Treatment Value: 100uM ABA vs. No Treatment
  misc_feature: MA Experiment ID: 108687 Result: Down-regulated in Transcription
  misc_feature: MA Experiment 108687 PARAMETER Experiment Name: Zm_Embryos-Flowers__P Parameter: Tissue Value: Embryo vs. Aerial+
  misc_feature: MA Experiment ID: 108689 Result: Down-regulated in Transcription
  misc_feature: MA Experiment 108689 PARAMETER Experiment Name: Zm_Drought_Roots_P Parameter: Age (day) Value: 9
  misc_feature: MA Experiment 108689 PARAMETER Experiment Name: Zm_Drought_Roots_P Parameter: Organism Value: Zea mays
  misc_feature: MA Experiment 108689 PARAMETER Experiment Name: Zm_Drought_Roots_P Parameter: Plant Line Value: 35A19
  misc_feature: MA Experiment 108689 PARAMETER Experiment Name: Zm_Drought_Roots_P Parameter: Timepoint (hr) Value: 24
  misc_feature: MA Experiment 108689 PARAMETER Experiment Name: Zm_Drought_Roots_P Parameter: Tissue Value: Roots
  misc_feature: MA Experiment 108689 PARAMETER Experiment Name: Zm_Drought_Roots_P Parameter: Treatment Value: Drought vs. No Drought
  misc_feature: MA Experiment ID: 20000108 Result: Up-regulated in Transcription
  misc_feature: MA Experiment 20000108 PARAMETER Experiment Name: Zm_Root-Tips_P Parameter: Age (day) Value: 12
  misc_feature: MA Experiment 20000108 PARAMETER Experiment Name: Zm_Root-Tips_P Parameter: Organism Value: Zea mays
  misc_feature: MA Experiment 20000108 PARAMETER Experiment Name: Zm_Root-Tips_P Parameter: Tissue Value: Root tips vs. Root mid region    35
  misc_feature: MA Experiment 20000108 PARAMETER Experiment Name: Zm_Root-Tips_P Parameter: Tissue Value: Root tips vs. Root mid region   Sequence Listing-Misc Features (4)
  misc_feature: MA Experiment ID: 20000477 Result: Down-regulated in Transcription
  misc_feature: MA Experiment 20000477 PARAMETER Experiment Name: Zm_5mM_SA_P Parameter: Age (day) Value: 10
  misc_feature: MA Experiment 20000477 PARAMETER Experiment Name: Zm_5mM_SA_P Parameter: Organism Value: Zea mays
  misc_feature: MA Experiment 20000477 PARAMETER Experiment Name: Zm_5mM_SA_P Parameter: Plant Line Value: 35A19
  misc_feature: MA Experiment 20000477 PARAMETER Experiment Name: Zm_5mM_SA_P Parameter: Timepoint (hr) Value: 48
  misc_feature: MA Experiment 20000477 PARAMETER Experiment Name: Zm_5mM_SA_P Parameter: Tissue Value: Aerial
  misc_feature: MA Experiment 20000477 PARAMETER Experiment Name: Zm_5mM_SA_P Parameter: Treatment Value: 5mM SA vs. No Treatment
  misc_feature: MA Experiment ID: 20000479 Result: Down-regulated in Transcription
  misc_feature: MA Experiment 20000479 PARAMETER Experiment Name: Zm_Drought_P Parameter: Age (day) Value: 10
  misc_feature: MA Experiment 20000479 PARAMETER Experiment Name: Zm_Drought_P Parameter: Organism Value: Zea mays
  misc_feature: MA Experiment 20000479 PARAMETER Experiment Name: Zm_Drought_P Parameter: Plant Line Value: 35A19
  misc_feature: MA Experiment 20000479 PARAMETER Experiment Name: Zm_Drought_P Parameter: Timepoint (hr) Value: 48
  misc_feature: MA Experiment 20000479 PARAMETER Experiment Name: Zm_Drought_P Parameter: Tissue Value: Aerial
  misc_feature: MA Experiment 20000479 PARAMETER Experiment Name: Zm_Drought_P Parameter: Treatment Value: Drought vs. No Drought
  misc_feature: MA Experiment ID: 20000480 Result: Down-regulated in Transcription
  misc_feature: MA Experiment 20000480 PARAMETER Experiment Name: Zm_Drought_P Parameter: Age (day) Value: 11
  misc_feature: MA Experiment 20000480 PARAMETER Experiment Name: Zm_Drought_P Parameter: Organism Value: Zea mays
  misc_feature: MA Experiment 20000480 PARAMETER Experiment Name: Zm_Drought_P Parameter: Plant Line Value: 35A19
  misc_feature: MA Experiment 20000480 PARAMETER Experiment Name: Zm_Drought_P Parameter: Timepoint (hr) Value: 72
  misc_feature: MA Experiment 20000480 PARAMETER Experiment Name: Zm_Drought_P Parameter: Tissue Value: Aerial
  misc_feature: MA Experiment 20000480 PARAMETER Experiment Name: Zm_Drought_P Parameter: Treatment Value: Drought vs. No Drought
aatcaggctcgcggccgagccaccgaggagcaaagcaaagctctcgttggtcgtggcggcagcggcggcgcgcggtgtcgagctgcggcgctgaaggcaagagagccgcgcgccgtgaagagtcgtcgtcgatccccgtccgagctccgtcgcttcattgatgaatgccgaagctatagcggtccttgctcgttccaaggttcgatgccccggtcgccgcccggatgacactgccaaccccggtggtagccggcgttgcggctggcgccgccgcgctgctactggccgccgccctcgccgtggcgtggtggtggctcgtgatcgtgaggcggcgccggcgccgtgaccggagctccgacaccggatcctcgtcggaggctcctcctcccacgctggcggagtggggccggtgcggccgcacctcgtcggcgcccgagttccacggcgccaggcagttctcgctggaggagctggcgcacgccaccaacggcttcgccgaggccaacctggtcggcgcgggggcctttggcctggtgtacaagggcctgctgctagacggcaccgtcgtcgccatcaagcgccgcgcgggcgcgccgcgccaggacttcgcaaacgagatcaggaggctgtcagagatctggcaccgcaacgtcgtgacgttgatcggcttctgccaagaaggcggtctacagatgctggtgttcgaatacctgcccaacgccagtgtcagcggccacttgtacgacaccggcaaggagaggatgaccaggctggagttcaagcagaggctgtcaatagccattggagcagctaaaggtctgagtcacctccacagcctggcgccgccgctgatccacagggacttcaagacgagcaacgtgctggtcgacgagaacttcatcgccaaggtgtccgacgccgggatccacaggctgctgcgagggactgatggtggcgccgtcgccgctccggcgagtcgcggtgtcttccaagacccggagtgagtagtagcaaaccagcccggcctggatgaaatgtacgttctgctgccatctggattcttaccatgcatgcatgcactgcgttcctggcgtgctcgcttgcactgcagggtacattcatcggcgcaggcgcagctctctgagagcagcgacgtgtacagcttcggggtgttccttgtggagctggtcacaggcagggaggctgcggggctgatgccgccggggtccagcaaggactctctcgctcaatggatggaggcgcgtttcggctcgaacgagctggtcgacccgaggctgggagggagcttcacctcggagggtatggcggaggtggtgggcctggcgtccagctgcctgagcccgtcggcgaggcggcggcccaggatgcggctggtggcggcggagctggaccggatcctggagaaggagatggccctgaccaccgtcatgggcgatggcggcaccgccatcgtcacgctcggcagccagctcttcacgtcctgactgaccgggatccgatggctggcatggcatcatcgacccaaggaggaagcatggtcgccgacgacgagacccccgcgttgcttccttcgtgtcctgggccgggagctgaacgacgcaacgcaacgcgatgcaagcagttcgtggccggtgattctccagctcactgctccacctcaggaaatttcaagagaccgcgacaggcgcgcgaacctgtgtcctgcattttcttcagtcttccatgttcagagttccgttggatttcatccagcagctcagccaaaatatgtgcatatgtaaaaattcacatctggaattggaagatggaatttatactagtactagattagacgcagaggctgagaggcatattttggggtgtggaacctcatcagccagggtcacttatttccatttgtttattctttctctgaaacaacaacatgcgatgcgacactgcagctctcccaaaccgaactgtacccaaccgaagcgtgtcagtccagttcaatttt

SEQ ID NO: 5923 - protein, 259 aa, Zea mays subsp. mays
  peptide (1)..(259): Ceres Seq. ID no. 12405564
  misc_feature (1)..(259): Homolog of NCBI NO: 34907204 NR Description: serine/threonine protein kinase-like protein
  misc_feature (7)..(259): Homolog of NCBI NO: 30688460 NR Description: protein kinase family [Arabidopsis thaliana]
  misc_feature (7)..(259): Homolog of NCBI NO: 26453311 NR Description: putative protein kinase [Arabidopsis thaliana]
  misc_feature (7)..(259): Homolog of NCBI NO: 1402888 NR Description: unknown [Arabidopsis thaliana]
  misc_feature (15)..(258): Homolog of NCBI NO: 34907096 NR Description: putative serine/threonine protein kinase [Oryza
  misc_feature (1)..(259): Homolog of NCBI NO: 34909240 NR Description: putative receptor protein kinase [Oryza sativa
  misc_feature (5)..(242): Homolog of NCBI NO: 15218207 NR Description: protein kinase, putative; protein id: At1g52290.1
  misc_feature (78)..(234): Homolog of NCBI NO: 29367569 NR Description: putative receptor protein kinase [Oryza sativa
  misc_feature (2)..(259): Homolog of NCBI NO: 15240547 NR Description: leucine-rich repeat transmembrane protein kinase, protein id: At5g49770.1 [Arabidopsis thaliana]
  misc_feature (45)..(237): Homolog of NCBI NO: 34896906 NR Description: putative kinase [Oryza sativa (japonica
MTLPTPVVAGVAAGAAALLLAAALAVAWWWLVIVRRRRRRDRSSDTGSSSEAPPPTLAEWGRCGRTSSAPEFHGARQFSLEELAHATNGFAEANLVGAGAFGLVYKGLLLDGTVVAIKRRAGAPRQDFANEIRRLSEIWHRNVVTLIGFCQEGGLQMLVFEYLPNASVSGHLYDTGKERMTRLEFKQRLSIAIGAAKGLSHLHSLAPPLIHRDFKTSNVLVDENFIAKVSDAGIHRLLRGTDGGAVAAPASRGVFQDPE

SEQ ID NO: 5924 - protein, 200 aa, Zea mays subsp. mays
  peptide (1)..(200): Ceres Seq. ID no. 12405565
MDGGAFRLERAGRPEAGRELHLGGYGGGGGPGVQLPEPVGEAAAQDAAGGGGAGPDPGEGDGPDHRHGRWRHRHRHARQPALHVLTDRDPMAGMASSTQGGSMVADDETPALLPSCPGPGAERRNATRCKQFVAGDSPAHCSTSGNFKRPRQAREPVSCIFFSLPCSEFRWISSSSSAKICAYVKIHIWNWKMEFILVLD

SEQ ID NO: 5925 - protein, 156 aa, Zea mays subsp. mays
  peptide (1)..(156): Ceres Seq. ID no. 12405566
  misc_feature (27)..(156): Homolog of NCBI NO: 34907204 NR Description: serine/threonine protein kinase-like protein
  misc_feature (34)..(154): Homolog of NCBI NO: 30688460 NR Description: protein kinase family [Arabidopsis thaliana]
  misc_feature (34)..(154): Homolog of NCBI NO: 26453311 NR Description: putative protein kinase [Arabidopsis thaliana]
  misc_feature (34)..(154): Homolog of NCBI NO: 1402888 NR Description: unknown [Arabidopsis thaliana]
  misc_feature (36)..(156): Homolog of NCBI NO: 34907096 NR Description: putative serine/threonine protein kinase [Oryza
  misc_feature (34)..(134): Homolog of NCBI NO: 34909240 NR Description: putative receptor protein kinase [Oryza sativa
  misc_feature (30)..(156): Homolog of NCBI NO: 15218207 NR Description: protein kinase, putative; protein id: At1g52290.1
  misc_feature (30)..(126): Homolog of NCBI NO: 29367569 NR Description: putative receptor protein kinase [Oryza sativa
  misc_feature (34)..(129): Homolog of NCBI NO: 15240547 NR Description: leucine-rich repeat transmembrane protein kinase, protein id: At5g49770.1 [Arabidopsis thaliana]
  misc_feature (30)..(135): Homolog of NCBI NO: 34896906 NR Description: putative kinase [Oryza sativa (japonica
MYVLLPSGFLPCMHALRSWRARLHCRVHSSAQAQLSESSDVYSFGVFLVELVTGREAAGLMPPGSSKDSLAQWMEARFGSNELVDPRLGGSFTSEGMAEVVGLASSCLSPSARRRPRMRLVAAELDRILEKEMALTTVMGDGGTAIVTLGSQLFTS

SEQ ID NO: 5926 - DNA, 1047 bp, Zea mays subsp. mays
  misc_feature (1)..(1047): Ceres Seq. ID no. 12349973
  misc_feature: MA Experiment ID: 108523 Result: Down-regulated in Transcription
  misc_feature: MA Experiment 108523 PARAMETER Experiment Name: Zm_42deg_Heat_P Parameter: Age (day) Value: 8
  misc_feature: MA Experiment 108523 PARAMETER Experiment Name: Zm_42deg_Heat_P Parameter: Organism Value: Zea mays
  misc_feature: MA Experiment 108523 PARAMETER Experiment Name: Zm_42deg_Heat_P Parameter: Plant Line Value: 35A19
  misc_feature: MA Experiment 108523 PARAMETER Experiment Name: Zm_42deg_Heat_P Parameter: Temperature (deg C) Value: 42 vs. 22
  misc_feature: MA Experiment 108523 PARAMETER Experiment Name: Zm_42deg_Heat_P Parameter: Timepoint (hr) Value: 6
  misc_feature: MA Experiment 108523 PARAMETER Experiment Name: Zm_42deg_Heat_P Parameter: Tissue Value: Aerial
  misc_feature: MA Experiment ID: 108528 Result: Up-regulated in Transcription
  misc_feature: MA Experiment 108528 PARAMETER Experiment Name: Zm_Imbibed_Seeds_P Parameter: Age (day) Value: 5 vs. 2
  misc_feature: MA Experiment 108528 PARAMETER Experiment Name: Zm_Imbibed_Seeds_P Parameter: Organism Value: Zea mays
  misc_feature: MA Experiment 108528 PARAMETER Experiment Name: Zm_Imbibed_Seeds_P Parameter: Plant Line Value: 35A19
  misc_feature: MA Experiment 108528 PARAMETER Experiment Name: Zm_Imbibed_Seeds_P Parameter: Tissue Value: Aerial vs. Embryo
  misc_feature: MA Experiment ID: 108530 Result: Up-regulated in Transcription
  misc_feature: MA Experiment 108530 PARAMETER Experiment Name: Zm_Imbibed_Seeds_P Parameter: Age (day) Value: 6 vs. 2
  misc_feature: MA Experiment 108530 PARAMETER Experiment Name: Zm_Imbibed_Seeds_P Parameter: Organism Value: Zea mays
  misc_feature: MA Experiment 108530 PARAMETER Experiment Name: Zm_Imbibed_Seeds_P Parameter: Plant Line Value: 35A19
  misc_feature: MA Experiment 108530 PARAMETER Experiment Name: Zm_Imbibed_Seeds_P Parameter: Tissue Value: Aerial vs. Embryo
  misc_feature: MA Experiment ID: 108534 Result: Up-regulated in Transcription
  misc_feature: MA Experiment 108534 PARAMETER Experiment Name: Zm_4deg_Cold_P Parameter: Age (hr) Value: 8
  misc_feature: MA Experiment 108534 PARAMETER Experiment Name: Zm_4deg_Cold_P Parameter: Organism Value: Zea mays
  misc_feature: MA Experiment 108534 PARAMETER Experiment Name: Zm_4deg_Cold_P Parameter: Plant Line Value: 35A19
  misc_feature: MA Experiment 108534 PARAMETER Experiment Name: Zm_4deg_Cold_P Parameter: Temperature (deg C) Value: 4 vs. 22
  misc_feature: MA Experiment 108534 PARAMETER Experiment Name: Zm_4deg_Cold_P Parameter: Timepoint (hr) Value: 6
  misc_feature: MA Experiment 108534 PARAMETER Experiment Name: Zm_4deg_Cold_P Parameter: Tissue Value: Aerial
  misc_feature: MA Experiment ID: 108536 Result: Down-regulated in Transcription
  misc_feature: MA Experiment 108536 PARAMETER Experiment Name: Zm_Meristem_P Parameter: Age (day) Value: 8
  misc_feature: MA Experiment 108536 PARAMETER Experiment Name: Zm_Meristem_P Parameter: Organism Value: Zea mays
  misc_feature: MA Experiment 108536 PARAMETER Experiment Name: Zm_Meristem_P Parameter: Plant Line Value: 35A19
  misc_feature: MA Experiment 108536 PARAMETER Experiment Name: Zm_Meristem_P Parameter: Tissue Value: Shoot Meristem vs. Above Shoot Meristem
  misc_feature: MA Experiment ID: 108543 Result: Up-regulated in Transcription
  misc_feature: MA Experiment ID: 108545 Result: Up-regulated in Transcription
  misc_feature: MA Experiment 108545 PARAMETER Experiment Name: Zm_Imbibed_Seeds_P Parameter: Age (day) Value: 3 vs. 2
  misc_feature: MA Experiment 108545 PARAMETER Experiment Name: Zm_Imbibed_Seeds_P Parameter: Organism Value: Zea mays
  misc_feature: MA Experiment 108545 PARAMETER Experiment Name: Zm_Imbibed_Seeds_P Parameter: Plant Line Value: 35A19
  misc_feature: MA Experiment 108545 PARAMETER Experiment Name: Zm_Imbibed_Seeds_P Parameter: Tissue Value: Aerial vs. Embryo
  misc_feature: MA Experiment ID: 108547 Result: Up-regulated in Transcription
  misc_feature: MA Experiment 108547 PARAMETER Experiment Name: Zm_Imbibed_Seeds_P Parameter: Age (day) Value: 4 vs. 2
  misc_feature: MA Experiment 108547 PARAMETER Experiment Name: Zm_Imbibed_Seeds_P Parameter: Organism Value: Zea mays
  misc_feature: MA Experiment 108547 PARAMETER Experiment Name: Zm_Imbibed_Seeds_P Parameter: Plant Line Value: 35A19
  misc_feature: MA Experiment 108547 PARAMETER Experiment Name: Zm_Imbibed_Seeds_P Parameter: Tissue Value: Aerial vs. Embryo
  misc_feature: MA Experiment ID: 20000492 Result: Down-regulated in Transcription
  misc_feature: MA Experiment 20000492 PARAMETER Experiment Name: Zm_Hybrid_Seed_Dev_P Parameter: DAP Value: 12
  misc_feature: MA Experiment 20000492 PARAMETER Experiment Name: Zm_Hybrid_Seed_Dev_P Parameter: Organism Value: Zea mays
  misc_feature: MA Experiment 20000492 PARAMETER Experiment Name: Zm_Hybrid_Seed_Dev_P Parameter: Plant Line Value: 35A19
  misc_feature: MA Experiment 20000492 PARAMETER Experiment Name: Zm_Hybrid_Seed_Dev_P Parameter: Tissue Value: Fert Kernel vs. Unfert Floret
  misc_feature: MA Experiment ID: 20000535 Result: Down-regulated in Transcription
  misc_feature: MA Experiment 20000535 PARAMETER Experiment Name: Zm_Hybrid_Seed_Dev_P Parameter: DAP Value: 30 vs. 12
  misc_feature: MA Experiment 20000535 PARAMETER Experiment Name: Zm_Hybrid_Seed_Dev_P Parameter: Organism Value: Zea mays
  misc_feature: MA Experiment 20000535 PARAMETER Experiment Name: Zm_Hybrid_Seed_Dev_P Parameter: Plant Line Value: 35A19
  misc_feature: MA Experiment 20000535 PARAMETER Experiment Name: Zm_Hybrid_Seed_Dev_P Parameter: Tissue Value: Embryo vs. Unfert Floret
cacgccacgctctccaacgccacagcttgcgcccgcaatggcactcgtctccgcctcctcgtcctccaccaccgccgtcacggcgctccccaggaatgggcagcgggcgtcgtcctccttcctcggcggcaagacgctgctgagacaggccgaggcggcccggccgtcgttcgccgtgcgcgccgcggcggaccccaacaggccgatctggttccccggcagcacccctccgccgtggctcgacggcagccttcccggcgacttcggctttgatccctggggcctcggatctgacccggagagcctgcggtggaacgtgcaggcggagctggtgcactgccggtgggcgatgctcggcgcggcgggcatcttcatcccggagttcctgaccaagatcggcgtcctcaacacgcccttctggtacaccgccggcgagcagcagtacttcaccgacaccaccaccctcttcatcatcgagctcatcctcatcggctgggccgagggccgccgctgggctgacatcatcaagcccggaagcgtcaacaccgaccccatcttccccagcaacaagctcaccggcaccgacgtcgggtaccctggtggcctctggtttgacccgctcggctggggcagcggctcgccggagaagatcaaggagctgcgcaccaaggagatcaagaacggacgcctcgccatgctcgccgtcatgggcgcctggttccaggccgagtacaccggcaccggccccatcgacaacctcttcgcccacctcgccgaccctggccacgccaccatcttccaggccttcacccccaaatgaggagttgaacttattattagcattttgaggagtgctaccacacatgcatcgtcaggttgatggccgatatatatgaaacttcacattttttttggtggggaaggactgctgagtagactgtcaatgatggaatgctcgtggtgcgagtgcgatgcatggtgtacttgtactatgttgtaaccagtgtaaaaaggggatactcgttagatgttatgccatgttcactg

SEQ ID NO: 5927 - protein, 272 aa, Zea mays subsp. mays
  peptide (1)..(272): Ceres Seq. ID no. 12349974
  misc_feature (75)..(243): Pfam Name: Chlorophyll A-B binding protein Pfam Description: Chlorophyll A-B binding protein
  misc_feature (13)..(272): Homolog of NCBI NO: 34393511 NR Description: putative photosystem I antenna protein [Oryza
  misc_feature (13)..(272): Homolog of NCBI NO: 1076724 NR Description: LHCI-680, photosystem I antenna protein - barley
  misc_feature (13)..(272): Homolog of NCBI NO: 7443233 NR Description: chlorophyll a/b-binding protein type II, I - Lolium temulentum >gi|551047|emb|CAA55864.1| type II LHCI
  misc_feature (15)..(272): Homolog of NCBI NO: 115765 NR Description: Chlorophyll A-B binding protein 7, chloroplast
  misc_feature (16)..(272): Homolog of NCBI NO: 11277627 NR Description: PS I antenna protein Lhca2 [imported] - thaliana >gi|4741940|gb|AAD28767.1|AF134120_1 Lhca2 protein thaliana] >gi|15451180|gb|AAK96861.1| Lhca2 protein [Arabidopsis
  misc_feature (15)..(272): Homolog of NCBI NO: 115766 NR Description: Chlorophyll A-B binding protein, chloroplast
  misc_feature (16)..(272): Homolog of NCBI NO: 15233120 NR Description: light-harvesting chlorophyll a/b binding protein; id: At3g61470.1, supported by cDNA: 123159., supported by cDNA:
  misc_feature (13)..(272): Homolog of NCBI NO: 2306981 NR Description: photosystem I antenna protein [Oryza sativa]
  misc_feature (14)..(272): Homolog of NCBI NO: 18376587 NR Description: putative chlorophyll A-B binding protein of LHCI
  misc_feature (15)..(272): Homolog of NCBI NO: 2129879 NR Description: chlorophyll a/b-binding protein type II precursor,
TPRSPTPQLAPAMALVSASSSSTTAVTALPRNGQRASSSFLGGKTLLRQAEAARPSFAVRAAADPNRPIWFPGSTPPPWLDGSLPGDFGFDPWGLGSDPESLRWNVQAELVHCRWAMLGAAGIFIPEFLTKIGVLNTPFWYTAGEQQYFTDTTTLFIIELILIGWAEGRRWADIIKPGSVNTDPIFPSNKLTGTDVGYPGGLWFDPLGWGSGSPEKIKELRTKEIKNGRLAMLAVMGAWFQAEYTGTGPIDNLFAHLADPGHATIFQAFTPK

SEQ ID NO: 5928 - protein, 260 aa, Zea mays subsp. mays
  peptide (1)..(260): Ceres Seq. ID no. 12349975
  misc_feature (63)..(231): Pfam Name: Chlorophyll A-B binding protein Pfam Description: Chlorophyll A-B binding protein
  misc_feature (1)..(260): Homolog of NCBI NO: 34393511 NR Description: putative photosystem I antenna protein [Oryza
  misc_feature (1)..(260): Homolog of NCBI NO: 1076724 NR Description: LHCI-680, photosystem I antenna protein - barley
  misc_feature (1)..(260): Homolog of NCBI NO: 7443233 NR Description: chlorophyll a/b-binding protein type II, I - Lolium temulentum >gi|551047|emb|CAA55864.1| type II LHCI
  misc_feature (3)..(260): Homolog of NCBI NO: 115765 NR Description: Chlorophyll A-B binding protein 7, chloroplast
  misc_feature (4)..(260): Homolog of NCBI NO: 11277627 NR Description: PS I antenna protein Lhca2 [imported] - thaliana >gi|4741940|gb|AAD28767.1|AF134120_1 Lhca2 protein thaliana] >gi|15451180|gb|AAK96861.1| Lhca2 protein [Arabidopsis
  misc_feature (3)..(260): Homolog of NCBI NO: 115766 NR Description: Chlorophyll A-B binding protein, chloroplast
  misc_feature (4)..(260): Homolog of NCBI NO: 15233120 NR Description: light-harvesting chlorophyll a/b binding protein; id: At3g61470.1, supported by cDNA: 123159., supported by cDNA:
  misc_feature (1)..(260): Homolog of NCBI NO: 2306981 NR Description: photosystem I antenna protein [Oryza sativa]
  misc_feature (2)..(260): Homolog of NCBI NO: 18376587 NR Description: putative chlorophyll A-B binding protein of LHCI
  misc_feature (3)..(260): Homolog of NCBI NO: 2129879 NR Description: chlorophyll a/b-binding protein type II precursor,
MALVSASSSSTTAVTALPRNGQRASSSFLGGKTLLRQAEAARPSFAVRAAADPNRPIWFPGSTPPPWLDGSLPGDFGFDPWGLGSDPESLRWNVQAELVHCRWAMLGAAGIFIPEFLTKIGVLNTPFWYTAGEQQYFTDTTTLFIIELILIGWAEGRRWADIIKPGSVNTDPIFPSNKLTGTDVGYPGGLWFDPLGWGSGSPEKIKELRTKEIKNGRLAMLAVMGAWFQAEYTGTGPIDNLFAHLADPGHATIFQAFTPK

SEQ ID NO: 5929 - protein, 156 aa, Zea mays subsp. mays
  peptide (1)..(156): Ceres Seq. ID no. 12349976
  misc_feature (1)..(127): Pfam Name: Chlorophyll A-B binding protein Pfam Description: Chlorophyll A-B binding protein
  misc_feature (1)..(156): Homolog of NCBI NO: 34393511 NR Description: putative photosystem I antenna protein [Oryza
  misc_feature (1)..(156): Homolog of NCBI NO: 1076724 NR Description: LHCI-680, photosystem I antenna protein - barley
  misc_feature (1)..(156): Homolog of NCBI NO: 7443233 NR Description: chlorophyll a/b-binding protein type II, I - Lolium temulentum >gi|551047|emb|CAA55864.1| type II LHCI
  misc_feature (1)..(156): Homolog of NCBI NO: 115765 NR Description: Chlorophyll A-B binding protein 7, chloroplast
  misc_feature (1)..(156): Homolog of NCBI NO: 11277627 NR Description: PS I antenna protein Lhca2 [imported] - thaliana >gi|4741940|gb|AAD28767.1|AF134120_1 Lhca2 protein thaliana] >gi|15451180|gb|AAK96861.1| Lhca2 protein [Arabidopsis
  misc_feature (1)..(156): Homolog of NCBI NO: 115766 NR Description: Chlorophyll A-B binding protein, chloroplast
  misc_feature (1)..(156): Homolog of NCBI NO: 15233120 NR Description: light-harvesting chlorophyll a/b binding protein; id: At3g61470.1, supported by cDNA: 123159., supported by cDNA:
  misc_feature (1)..(156): Homolog of NCBI NO: 2306981 NR Description: photosystem I antenna protein [Oryza sativa]
  misc_feature (1)..(156): Homolog of NCBI NO: 18376587 NR Description: putative chlorophyll A-B binding protein of LHCI
  misc_feature (1)..(156): Homolog of NCBI NO: 2129879 NR Description: chlorophyll a/b-binding protein type II precursor,
MLGAAGIFIPEFLTKIGVLNTPFWYTAGEQQYFTDTTTLFIIELILIGWAEGRRWADIIKPGSVNTDPIFPSNKLTGTDVGYPGGLWFDPLGWGSGSPEKIKELRTKEIKNGRLAMLAVMGAWFQAEYTGTGPIDNLFAHLADPGHATIFQAFTPK

SEQ ID NO: 5930 - DNA, 1531 bp, Zea mays subsp. mays
  misc_feature (1)..(1531): Ceres Seq. ID no. 12358328
  misc_feature: MA Experiment ID: 108543 Result: Up-regulated in Transcription
  misc_feature: MA Experiment ID: 108544 Result: Up-regulated in Transcription
atcagcgctagcttagctatccggccgcatccgctgctcgcctcctcacttgagcgtgtgtcgtgtagcatttagtcagctgctcctgcttgctagggttagggtttgcgggcgcgcgcgcgcgtgcccgcgcgcgagctggccgcgggagggatgacgccgcaccggtcgccggcggggaccggaggaagtggcggcggagggccgccggcgctacactacctgagcggcccttacggagacaccaccttcaccaaggttttcgtgggcggcctcgcctgggagacgcggagtgaggggcttcgcgcccactttgaggtctacggggacatcctcgaggccgttgtcatcaccgaccgcgccacaggccgctccaagggctacggattcgtaaccttccaggacccagagtcggcgaggatggcctgcatggacccatatccagtgatcgatggccggccgtgctaattgcaaccttgccatcttagggcgtcctggtccagctgtgcctttcggccatcagcatatggacctgaatacctatatcagcagctttgtagaatgcatatggtccatatgttggacaacagtatattccagtttacggtggcccaaggacagtaggcccagcagtctacccatatgggcagtctggccaacctgtaccaagtgatcatgcttattctcttggttatgccccaagtcgtgttctcccactatcgaatcagaatgttaacgctgcaaatgttgtgcgcataccaccacttcaacaatttcctccaggagctccacgacctcagcaacagcttttggcccctgctcgtgcaccgccattcccacagaacaacgtttctgaacaagcgacaggttgacaaggatgccagaaagtgacgaattttaggtatcctatagtctgcagcaggactaagaaaagttgtaccgctaaattgggcggcatgcttttttcttgcaaattgttttcgtttgctctctaaagtctgcaggttgtccctatccatggttacctgaacttcttataacgtgagtgtctgatctgctccgcgggaaggggcaggcaagctcgagcgactgaagatgaagcccctcttgctcagcttctgtcagtgtctgtacattccccatctgccagacatcctgatagctgatggtctgtgcaggaccaaagtggatgccggaaatggagtccggcctccaacctgtgtataatataggtcatgtagtggtccaaatcgtagaacaggtccattctttgaaaacatctggttgtgtatattaattctcttagcaccttcagtgcatgttttcatgtctcattagagggaataggtatttcaatgtcattgcattgtcagtgagtcatgtacattattatactgaaaatgtaaactatatatgtcatctgtgtcaactgacaactgtaatcaaataatgacatccctatcttgggaaagaacatgatttattgcaagttgcaacggatggggaaaactagggatggatacggatactt

SEQ ID NO: 5931 - protein, 104 aa, Zea mays subsp. mays
  peptide (1)..(104): Ceres Seq. ID no. 12358329
  misc_feature (36)..(91): Pfam Name: RNA recognition motif. (a.k.a. RRM, RBD, or RNP domain) Pfam Description: RNA recognition motif. (a.k.a. RRM, RBD, or RNP
  misc_feature (22)..(104): Homolog of NCBI NO: 25406448 NR Description: probable RNA-binding protein, 24808-23340
  misc_feature (22)..(102): Homolog of NCBI NO: 22330665 NR Description: RRM-containing protein; protein id: At1g76460.1
  misc_feature (22)..(102): Homolog of NCBI NO: 15010636 NR Description: At1g20880/F9H16_14 [Arabidopsis thaliana]
  misc_feature (22)..(102): Homolog of NCBI NO: 23505939 NR Description: At1g20880/F9H16_14 [Arabidopsis thaliana]
  misc_feature (22)..(102): Homolog of NCBI NO: 18394923 NR Description: RRM-containing protein; protein id: At1g20880.1,
  misc_feature (22)..(102): Homolog of NCBI NO: 25518498 NR Description: hypothetical protein F9H16.14 - Arabidopsis >gi|4836901|gb|AAD30604.1|AC007369_14 Unknown protein
  misc_feature (13)..(102): Homolog of NCBI NO: 34905758 NR Description: similar to RNA-binding protein [Oryza sativa
  misc_feature (18)..(102): Homolog of NCBI NO: 34907334 NR Description: P0698A10.29 [Oryza sativa (japonica
  misc_feature (29)..(102): Homolog of NCBI NO: 18395177 NR Description: RRM-containing protein; protein id: At1g22910.1, by cDNA: gi_13605870, supported by cDNA: gi_16323281 [Arabidopsis >gi|13605871|gb|AAK32921.1|AF367334_1 At1g22910/F19G10_13
  misc_feature (29)..(102): Homolog of NCBI NO: 25518372 NR Description: hypothetical protein F19G10.13 - Arabidopsis
MTPHRSPAGTGGSGGGGPPALHYLSGPYGDTTFTKVFVGGLAWETRSEGLRAHFEVYGDILEAVVITDRATGRSKGYGFVTFQDPESARMACMDPYPVIDGRPC

SEQ ID NO: 5932 - protein, 82 aa, Zea mays subsp. mays
  peptide (1)..(82): Ceres Seq. ID no. 12358330
MGSLANLYQVIMLILLVMPQVVFSHYRIRMLTLQMLCAYHHFNNFLQELHDLSNSFWPLLVHRHSHRTTFLNKRQVDKDARK

SEQ ID NO: 5933 - protein, 73 aa, Zea mays subsp. mays
  peptide (1)..(73): Ceres Seq. ID no. 12358331
MAGRANCNLAILGRPGPAVPFGHQHMDLNTYISSFVECIWSICWTTVYSSLRWPKDSRPSSLPIWAVWPTCTK

SEQ ID NO: 5934 - DNA, 1400 bp, Zea mays subsp. mays
  misc_feature (1)..(1400): Ceres Seq. ID no. 12347987
  misc_feature: MA Experiment ID: 108523 Result: Down-regulated in Transcription
  misc_feature: MA Experiment 108523 PARAMETER Experiment Name: Zm_42deg_Heat_P Parameter: Age (day) Value: 8
  misc_feature: MA Experiment 108523 PARAMETER Experiment Name: Zm_42deg_Heat_P Parameter: Organism Value: Zea mays
  misc_feature: MA Experiment 108523 PARAMETER Experiment Name: Zm_42deg_Heat_P Parameter: Plant Line Value: 35A19
  misc_feature: MA Experiment 108523 PARAMETER Experiment Name: Zm_42deg_Heat_P Parameter: Temperature (deg C) Value: 42 vs. 22
  misc_feature: MA Experiment 108523 PARAMETER Experiment Name: Zm_42deg_Heat_P Parameter: Timepoint (hr) Value: 6
  misc_feature: MA Experiment 108523 PARAMETER Experiment Name: Zm_42deg_Heat_P Parameter: Tissue Value: Aerial
  misc_feature: MA Experiment ID: 108529 Result: Down-regulated in Transcription
  misc_feature: MA Experiment 108529 PARAMETER Experiment Name: Zm_Imbibed_Seeds_P Parameter: Age (day) Value: 5 vs. 2
  misc_feature: MA Experiment 108529 PARAMETER Experiment Name: Zm_Imbibed_Seeds_P Parameter: Organism Value: Zea mays
  misc_feature: MA Experiment 108529 PARAMETER Experiment Name: Zm_Imbibed_Seeds_P Parameter: Plant Line Value: 35A19
  misc_feature: MA Experiment 108529 PARAMETER Experiment Name: Zm_Imbibed_Seeds_P Parameter: Tissue Value: Roots vs. Embryo
  misc_feature: MA Experiment ID: 108536 Result: Down-regulated in Transcription
  misc_feature: MA Experiment 108536 PARAMETER Experiment Name: Zm_Meristem_P Parameter: Age (day) Value: 8
  misc_feature: MA Experiment 108536 PARAMETER Experiment Name: Zm_Meristem_P Parameter: Organism Value: Zea mays
  misc_feature: MA Experiment 108536 PARAMETER Experiment Name: Zm_Meristem_P Parameter: Plant Line Value: 35A19
  misc_feature: MA Experiment 108536 PARAMETER Experiment Name: Zm_Meristem_P Parameter: Tissue Value: Shoot Meristem vs. Above Shoot Meristem
  misc_feature: MA Experiment ID: 108543 Result: Up-regulated in Transcription
  misc_feature: MA Experiment ID: 108546 Result: Down-regulated in Transcription
  misc_feature: MA Experiment 108546 PARAMETER Experiment Name: Zm_Imbibed_Seeds_P Parameter: Age (day) Value: 3 vs. 2
  misc_feature: MA Experiment 108546 PARAMETER Experiment Name: Zm_Imbibed_Seeds_P Parameter: Organism Value: Zea mays
  misc_feature: MA Experiment 108546 PARAMETER Experiment Name: Zm_Imbibed_Seeds_P Parameter: Plant Line Value: 35A19
  misc_feature: MA Experiment 108546 PARAMETER Experiment Name: Zm_Imbibed_Seeds_P Parameter: Tissue Value: Roots vs. Embryo
  misc_feature: MA Experiment ID: 108556 Result: Down-regulated in Transcription
  misc_feature: MA Experiment 108556 PARAMETER Experiment Name: Zm_Drought_P Parameter: Age (day) Value: 9
  misc_feature: MA Experiment 108556 PARAMETER Experiment Name: Zm_Drought_P Parameter: Organism Value: Zea mays
  misc_feature: MA Experiment 108556 PARAMETER Experiment Name: Zm_Drought_P Parameter: Plant Line Value: 35A19
  misc_feature: MA Experiment 108556 PARAMETER Experiment Name: Zm_Drought_P Parameter: Timepoint (hr) Value: 24
  misc_feature: MA Experiment 108556 PARAMETER Experiment Name: Zm_Drought_P Parameter: Tissue Value: Aerial
  misc_feature: MA Experiment 108556 PARAMETER Experiment Name: Zm_Drought_P Parameter: Treatment Value: Drought vs. No Drought
  misc_feature: MA Experiment ID: 108597 Result: Down-regulated in Transcription
  misc_feature: MA Experiment 108597 PARAMETER Experiment Name: Zm_100uM_ABA_P Parameter: Age (day) Value: 9
  misc_feature: MA Experiment 108597 PARAMETER Experiment Name: Zm_100uM_ABA_P Parameter: Organism Value: Zea mays
  misc_feature: MA Experiment 108597 PARAMETER Experiment Name: Zm_100uM_ABA_P Parameter: Plant Line Value: 35A19
  misc_feature: MA Experiment 108597 PARAMETER Experiment Name: Zm_100uM_ABA_P Parameter: Timepoint (hr) Value: 24
  misc_feature: MA Experiment 108597 PARAMETER Experiment Name: Zm_100uM_ABA_P Parameter: Tissue Value: Aerial
  misc_feature: MA Experiment 108597 PARAMETER Experiment Name: Zm_100uM_ABA_P Parameter: Treatment Value: 100uM ABA vs. No Treatment
  misc_feature: MA Experiment ID: 108687 Result: Up-regulated in Transcription
  misc_feature: MA Experiment 108687 PARAMETER Experiment Name: Zm_Embryos-Flowers__P Parameter: Tissue Value: Embryo vs. Aerial+
  misc_feature: MA Experiment ID: 108688 Result: Down-regulated in Transcription
  misc_feature: MA Experiment 108688 PARAMETER Experiment Name: Zm_Embryos-Flowers__P Parameter: Tissue Value: Immature Flowers vs. Aerial+
  misc_feature: MA Experiment ID: 20000477 Result: Down-regulated in Transcription
  misc_feature: MA Experiment 20000477 PARAMETER Experiment Name: Zm_5mM_SA_P Parameter: Age (day) Value: 10
  misc_feature: MA Experiment 20000477 PARAMETER Experiment Name: Zm_5mM_SA_P Parameter: Organism Value: Zea mays
  misc_feature: MA Experiment 20000477 PARAMETER Experiment Name: Zm_5mM_SA_P Parameter: Plant Line Value: 35A19
  misc_feature: MA Experiment 20000477 PARAMETER Experiment Name: Zm_5mM_SA_P Parameter: Timepoint (hr) Value: 48
  misc_feature: MA Experiment 20000477 PARAMETER Experiment Name: Zm_5mM_SA_P Parameter: Tissue Value: Aerial
  misc_feature: MA Experiment 20000477 PARAMETER Experiment Name: Zm_5mM_SA_P Parameter: Treatment Value: 5mM SA vs. No Treatment
  misc_feature: MA Experiment ID: 20000478 Result: Down-regulated in Transcription
  misc_feature: MA Experiment 20000478 PARAMETER Experiment Name: Zm_5mM_SA_P Parameter: Age (day) Value: 11
  misc_feature: MA Experiment 20000478 PARAMETER Experiment Name: Zm_5mM_SA_P Parameter: Organism Value: Zea mays
  misc_feature: MA Experiment 20000478 PARAMETER Experiment Name: Zm_5mM_SA_P Parameter: Plant Line Value: 35A19
  misc_feature: MA Experiment 20000478 PARAMETER Experiment Name: Zm_5mM_SA_P Parameter: Timepoint (hr) Value: 72
  misc_feature: MA Experiment 20000478 PARAMETER Experiment Name: Zm_5mM_SA_P Parameter: Tissue Value: Aerial
  misc_feature: MA Experiment 20000478 PARAMETER Experiment Name: Zm_5mM_SA_P Parameter: Treatment Value: 5mM SA vs. No Treatment
  misc_feature: MA Experiment ID: 20000479 Result: Down-regulated in Transcription
  misc_feature: MA Experiment 20000479 PARAMETER Experiment Name: Zm_Drought_P Parameter: Age (day) Value: 10
  misc_feature: MA Experiment 20000479 PARAMETER Experiment Name: Zm_Drought_P Parameter: Organism Value: Zea mays
  misc_feature: MA Experiment 20000479 PARAMETER Experiment Name: Zm_Drought_P Parameter: Plant Line Value: 35A19
  misc_feature: MA Experiment 20000479 PARAMETER Experiment Name: Zm_Drought_P Parameter: Timepoint (hr) Value: 48
  misc_feature: MA Experiment 20000479 PARAMETER Experiment Name: Zm_Drought_P Parameter: Tissue Value: Aerial
  misc_feature: MA Experiment 20000479 PARAMETER Experiment Name: Zm_Drought_P Parameter: Treatment Value: Drought vs. No Drought
  misc_feature: MA Experiment ID: 20000480 Result: Down-regulated in Transcription
  misc_feature: MA Experiment 20000480 PARAMETER Experiment Name: Zm_Drought_P Parameter: Age (day) Value: 11
  misc_feature: MA Experiment 20000480 PARAMETER Experiment Name: Zm_Drought_P Parameter: Organism Value: Zea mays
  misc_feature: MA Experiment 20000480 PARAMETER Experiment Name: Zm_Drought_P Parameter: Plant Line Value: 35A19
  misc_feature: MA Experiment 20000480 PARAMETER Experiment Name: Zm_Drought_P Parameter: Timepoint (hr) Value: 72
  misc_feature: MA Experiment 20000480 PARAMETER Experiment Name: Zm_Drought_P Parameter: Tissue Value: Aerial
  misc_feature: MA Experiment 20000480 PARAMETER Experiment Name: Zm_Drought_P Parameter: Treatment Value: Drought vs. No Drought
  misc_feature: MA Experiment ID: 20000533 Result: Down-regulated in Transcription
  misc_feature: MA Experiment 20000533 PARAMETER Experiment Name: Zm_0.001percent_MeJA_P Parameter: Age (day) Value: 11
  misc_feature: MA Experiment 20000533 PARAMETER Experiment Name: Zm_0.001percent_MeJA_P Parameter: Organism Value: Zea mays
  misc_feature: MA Experiment 20000533 PARAMETER Experiment Name: Zm_0.001percent_MeJA_P Parameter: Plant Line Value: 35A19
  misc_feature: MA Experiment 20000533 PARAMETER Experiment Name: Zm_0.001percent_MeJA_P Parameter: Timepoint (hr) Value: 72
  misc_feature: MA Experiment 20000533 PARAMETER Experiment Name: Zm_0.001percent_MeJA_P Parameter: Tissue Value: Aerial
  misc_feature: MA Experiment 20000533 PARAMETER Experiment Name: Zm_0.001percent_MeJA_P Parameter: Treatment Value: 0.001percent MeJA vs. No Treatment
  misc_feature: MA Experiment ID: 20000534 Result: Down-regulated in Transcription
  misc_feature: MA Experiment 20000534 PARAMETER Experiment Name: Zm_Hybrid_Pollen_P Parameter: Age (day) Value: 8
  misc_feature: MA Experiment 20000534 PARAMETER Experiment Name: Zm_Hybrid_Pollen_P Parameter: Organism Value: Zea mays
  misc_feature: MA Experiment 20000534 PARAMETER Experiment Name: Zm_Hybrid_Pollen_P Parameter: Plant Line Value: 35A19
  misc_feature: MA Experiment 20000534 PARAMETER Experiment Name: Zm_Hybrid_Pollen_P Parameter: Tissue Value: Pollen vs. Aerial
  misc_feature: MA Experiment ID: 20000535 Result: Up-regulated in Transcription
  misc_feature: MA Experiment 20000535 PARAMETER Experiment Name: Zm_Hybrid_Seed_Dev_P Parameter: DAP Value: 30 vs. 12
  misc_feature: MA Experiment 20000535 PARAMETER Experiment Name: Zm_Hybrid_Seed_Dev_P Parameter: Organism Value: Zea mays
  misc_feature: MA Experiment 20000535 PARAMETER Experiment Name: Zm_Hybrid_Seed_Dev_P Parameter: Plant Line Value: 35A19
  misc_feature: MA Experiment 20000535 PARAMETER Experiment Name: Zm_Hybrid_Seed_Dev_P Parameter: Tissue Value: Embryo vs. Unfert Floret
  misc_feature: MA Experiment ID: 20000626 Result: Down-regulated in Transcription
  misc_feature: MA Experiment 20000626 PARAMETER Experiment Name: Zm_Herbicide-Treatments_P Parameter: Timepoint (hr) Value: 12
  misc_feature: MA Experiment 20000626 PARAMETER Experiment Name: Zm_Herbicide-Treatments_P Parameter: Tissue Value: Aerial
  misc_feature: MA Experiment 20000626 PARAMETER Experiment Name: Zm_Herbicide-Treatments_P Parameter: Treatment Value: Roundup vs. No Treatment
gaacatcctaatcaaaaccgctcgatcgcgcccccatcaatcaatcaatcaattctcgacctcactactcgatctctcgtctcatcagtgtgactgtgtgagtgtccgagcacggtagcacgcgcaatggacgctctgctcgtgactaccttcctcgtccccgtggtggcgctcctcctcggttccgggtccgggtccgcggcaccgctgccgcgcgccttcttcgtgttcggtgactccctcgtggacaacggcaacaacaactacctgatgacgacggcgcgcgccgacgcgccgccctacgggatcgacttccccacgcacatggccacggggaggttctccaacgggctgaacatccccgacatcatcagcgagcacctgggctcccagcccgcgctgccgtacctgagccccgacctccgcggcgcccagctcctggtgggcgccaacttcgcgtccgccggcgtcggcatcctcaacgacaccggcatacagttcgtgaacatcatcaggatcggacagcagctgcgcaacttccaggagtaccagcagaggctggcggcgttcgtcggcgaggacgcggcgcggcaggccgtcagcgacgcgctcgtgctcatcacgctcggcggcaacgacttcgtcaacaactactacctggtgcccttctccgtccgctctcgccagtttgccatccaagactacgtcccctacctcatctccgagtacaggaagatcctcacgcggctgtacgagctcggggcccggcgcgtggtggtgacgggcaccgggatgatcgggtgcgtgccggcggagctcgccatgcacagcgtcgacggcgagtgcgcgcgcgacctcacggaggcggccgacctcttcaacccgcagctggtgcagatgctctccgagctcaacgccgacatcggcgccgacgtcttcatcgccgccaacaccaaccgggtcagcttcgacttcatgttcaacccgcaggactacgggttcgtgacgtccaaggtggcgtgctgcgggcagggcccctacaacgggatcgggctgtgcacgccggcgtccaacgtgtgccccaaccgggacgtgtacgcgtactgggacgcgttccaccccacggagcgcgccaaccggatcatcgtcggccagttcatgcacggatccaccgaccacatcagccccatgaacatcagcaccatcctcgccatggacaacaggaactaggccctgcgcgtggcgtgcctcgacctcgatccatccatctctagccggctgggattgagatgccaatctgcactgccatggatccgtcccgacactggcagctataatactacgagacgacacacatagctactgcatgcatgcgtaatactactagtataagttcgtgc

SEQ ID NO: 5935 - protein, 367 aa, Zea mays subsp. mays
  peptide (1)..(367): Ceres Seq. ID no. 12347988
  misc_feature (32)..(343): Pfam Name: GDSL-like Lipase/Acylhydrolase Pfam Description: GDSL-like Lipase/Acylhydrolase
  misc_feature (1)..(366): Homolog of NCBI NO: 32489520 NR Description: OSJNBa0043L24.11 [Oryza sativa (japonica
  misc_feature (30)..(365): Homolog of NCBI NO: 15229265 NR Description: putative GDSL-motif lipase/acylhydrolase; protein
  misc_feature (13)..(364): Homolog of NCBI NO: 22758315 NR Description: putative early nodulin gene (Enod) related
  misc_feature (13)..(364): Homolog of NCBI NO: 37535146 NR Description: putative early nodulin gene (Enod) related
  misc_feature (30)..(365): Homolog of NCBI NO: 15242808 NR Description: putative protein; protein id: At5g33370.1,
  misc_feature (29)..(364): Homolog of NCBI NO: 28071322 NR Description: P0705A05.30 [Oryza sativa (japonica
  misc_feature (1)..(366): Homolog of NCBI NO: 15235421 NR Description: Proline-rich APG - like protein; protein id:
  misc_feature (4)..(363): Homolog of NCBI NO: 15238814 NR Description: putative protein; protein id: At5g18430.1
  misc_feature (16)..(360): Homolog of NCBI NO: 34909504 NR Description: putative GDSL-motif lipase/hydrolase-like protein
  misc_feature (1)..(363): Homolog of NCBI NO: 15227849 NR Description: putative GDSL-motif lipase/hydrolase; protein id:
MDALLVTTFLVPVVALLLGSGSGSAAPLPRAFFVFGDSLVDNGNNNYLMTTARADAPPYGIDFPTHMATGRFSNGLNIPDIISEHLGSQPALPYLSPDLRGAQLLVGANFASAGVGILNDTGIQFVNIIRIGQQLRNFQEYQQRLAAFVGEDAARQAVSDALVLITLGGNDFVNNYYLVPFSVRSRQFAIQDYVPYLISEYRKILTRLYELGARRVVVTGTGMIGCVPAELAMHSVDGECARDLTEAADLFNPQLVQMLSELNADIGADVFIAANTNRVSFDFMFNPQDYGFVTSKVACCGQGPYNGIGLCTPASNVCPNRDVYAYWDAFHPTERANRIIVGQFMHGSTDHISPMNISTILAMDNRN

SEQ ID NO: 5936 - protein, 319 aa, Zea mays subsp. mays
  peptide (1)..(319): Ceres Seq. ID no. 12347989
  misc_feature (1)..(295): Pfam Name: GDSL-like Lipase/Acylhydrolase Pfam Description: GDSL-like Lipase/Acylhydrolase
  misc_feature (1)..(318): Homolog of NCBI NO: 32489520 NR Description: OSJNBa0043L24.11 [Oryza sativa (japonica
  misc_feature (1)..(317): Homolog of NCBI NO: 15229265 NR Description: putative GDSL-motif lipase/acylhydrolase; protein
  misc_feature (1)..(316): Homolog of NCBI NO: 22758315 NR Description: putative early nodulin gene (Enod) related
  misc_feature (1)..(316): Homolog of NCBI NO: 37535146 NR Description: putative early nodulin gene (Enod) related
  misc_feature (1)..(317): Homolog of NCBI NO: 15242808 NR Description: putative protein; protein id: At5g33370.1,
  misc_feature (1)..(316): Homolog of NCBI NO: 28071322 NR Description: P0705A05.30 [Oryza sativa (japonica
  misc_feature (1)..(318): Homolog of NCBI NO: 15235421 NR Description: Proline-rich APG - like protein; protein id:
  misc_feature (1)..(315): Homolog of NCBI NO: 15238814 NR Description: putative protein; protein id: At5g18430.1
  misc_feature (1)..(312): Homolog of NCBI NO: 34909504 NR Description: putative GDSL-motif lipase/hydrolase-like protein
  misc_feature (1)..(315): Homolog of NCBI NO: 15227849 NR Description: putative GDSL-motif lipase/hydrolase; protein id:
MTTARADAPPYGIDFPTHMATGRFSNGLNIPDIISEHLGSQPALPYLSPDLRGAQLLVGANFASAGVGILNDTGIQFVNIIRIGQQLRNFQEYQQRLAAFVGEDAARQAVSDALVLITLGGNDFVNNYYLVPFSVRSRQFAIQDYVPYLISEYRKILTRLYELGARRVVVTGTGMIGCVPAELAMHSVDGECARDLTEAADLFNPQLVQMLSELNADIGADVFIAANTNRVSFDFMFNPQDYGFVTSKVACCGQGPYNGIGLCTPASNVCPNRDVYAYWDAFHPTERANRIIVGQFMHGSTDHISPMNISTILAMDNRN

SEQ ID NO: 5937 - protein, 301 aa, Zea mays subsp. mays
  peptide (1)..(301): Ceres Seq. ID no. 12347990
  misc_feature (1)..(277): Pfam Name: GDSL-like Lipase/Acylhydrolase Pfam Description: GDSL-like Lipase/Acylhydrolase
  misc_feature (1)..(300): Homolog of NCBI NO: 32489520 NR Description: OSJNBa0043L24.11 [Oryza sativa (japonica
  misc_feature (1)..(299): Homolog of NCBI NO: 15229265 NR Description: putative GDSL-motif lipase/acylhydrolase; protein
  misc_feature (1)..(298): Homolog of NCBI NO: 22758315 NR Description: putative early nodulin gene (Enod) related
  misc_feature (1)..(298): Homolog of NCBI NO: 37535146 NR Description: putative early nodulin gene (Enod) related
  misc_feature (1)..(299): Homolog of NCBI NO: 15242808 NR Description: putative protein; protein id: At5g33370.1,
  misc_feature (1)..(298): Homolog of NCBI NO: 28071322 NR Description: P0705A05.30 [Oryza sativa (japonica
  misc_feature (1)..(300): Homolog of NCBI NO: 15235421 NR Description: Proline-rich APG - like protein; protein id:
  misc_feature (1)..(297): Homolog of NCBI NO: 15238814 NR Description: putative protein; protein id: At5g18430.1
  misc_feature (1)..(294): Homolog of NCBI NO: 34909504 NR Description: putative GDSL-motif lipase/hydrolase-like protein
  misc_feature (1)..(297): Homolog of NCBI NO: 15227849 NR Description: putative GDSL-motif lipase/hydrolase; protein id:
MATGRFSNGLNIPDIISEHLGSQPALPYLSPDLRGAQLLVGANFASAGVGILNDTGIQFVNIIRIGQQLRNFQEYQQRLAAFVGEDAARQAVSDALVLITLGGNDFVNNYYLVPFSVRSRQFAIQDYVPYLISEYRKILTRLYELGARRVVVTGTGMIGCVPAELAMHSVDGECARDLTEAADLFNPQLVQMLSELNADIGADVFIAANTNRVSFDFMFNPQDYGFVTSKVACCGQGPYNGIGLCTPASNVCPNRDVYAYWDAFHPTERANRIIVGQFMHGSTDHISPMNISTILAMDNRN

SEQ ID NO: 5938 - DNA, 1920 bp, Zea mays subsp. mays
  misc_feature (1)..(1920): Ceres Seq. ID no. 12368597
  misc_feature: MA Experiment ID: 108527 Result: Up-regulated in Transcription
  misc_feature: MA Experiment 108527 PARAMETER Experiment Name: Zm_5mM_NO_P Parameter: Age (day) Value: 8
  misc_feature: MA Experiment 108527 PARAMETER Experiment Name: Zm_5mM_NO_P Parameter: Organism Value: Zea mays
  misc_feature: MA Experiment 108527 PARAMETER Experiment Name: Zm_5mM_NO_P Parameter: Plant Line Value: 35A19
  misc_feature: MA Experiment 108527 PARAMETER Experiment Name: Zm_5mM_NO_P Parameter: Timepoint (hr) Value: 6
  misc_feature: MA Experiment 108527 PARAMETER Experiment Name: Zm_5mM_NO_P Parameter: Tissue Value: Aerial
  misc_feature: MA Experiment 108527 PARAMETER Experiment Name: Zm_5mM_NO_P Parameter: Treatment Value: 5mM NO vs. No Treatment
  misc_feature: MA Experiment ID: 108528 Result: Up-regulated in Transcription
  misc_feature: MA Experiment 108528 PARAMETER Experiment Name: Zm_Imbibed_Seeds_P Parameter: Age (day) Value: 5 vs. 2
  misc_feature: MA Experiment 108528 PARAMETER Experiment Name: Zm_Imbibed_Seeds_P Parameter: Organism Value: Zea mays
  misc_feature: MA Experiment 108528 PARAMETER Experiment Name: Zm_Imbibed_Seeds_P Parameter: Plant Line Value: 35A19
  misc_feature: MA Experiment 108528 PARAMETER Experiment Name: Zm_Imbibed_Seeds_P Parameter: Tissue Value: Aerial vs. Embryo
  misc_feature: MA Experiment ID: 108529 Result: Up-regulated in Transcription
  misc_feature: MA Experiment 108529 PARAMETER Experiment Name: Zm_Imbibed_Seeds_P Parameter: Age (day) Value: 5 vs. 2
  misc_feature: MA Experiment 108529 PARAMETER Experiment Name: Zm_Imbibed_Seeds_P Parameter: Organism Value: Zea mays
  misc_feature: MA Experiment 108529 PARAMETER Experiment Name: Zm_Imbibed_Seeds_P Parameter: Plant Line Value: 35A19
  misc_feature: MA Experiment 108529 PARAMETER Experiment Name: Zm_Imbibed_Seeds_P Parameter: Tissue Value: Roots vs. Embryo
  misc_feature: MA Experiment ID: 108530 Result: Up-regulated in Transcription
  misc_feature: MA Experiment 108530 PARAMETER Experiment Name: Zm_Imbibed_Seeds_P Parameter: Age (day) Value: 6 vs. 2
  misc_feature: MA Experiment 108530 PARAMETER Experiment Name: Zm_Imbibed_Seeds_P Parameter: Organism Value: Zea mays
  misc_feature: MA Experiment 108530 PARAMETER Experiment Name: Zm_Imbibed_Seeds_P Parameter: Plant Line Value: 35A19
  misc_feature: MA Experiment 108530 PARAMETER Experiment Name: Zm_Imbibed_Seeds_P Parameter: Tissue Value: Aerial vs. Embryo
  misc_feature: MA Experiment ID: 108535 Result: Down-regulated in Transcription
  misc_feature: MA Experiment 108535 PARAMETER Experiment Name: Zm_Meristem_P Parameter: Age (day) Value: 8
  misc_feature: MA Experiment 108535 PARAMETER Experiment Name: Zm_Meristem_P Parameter: Organism Value: Zea mays
  misc_feature: MA Experiment 108535 PARAMETER Experiment Name: Zm_Meristem_P Parameter: Plant Line Value: 35A19
  misc_feature: MA Experiment 108535 PARAMETER Experiment Name: Zm_Meristem_P Parameter: Tissue Value: Root Meristem vs. Above Root Meristem
  misc_feature: MA Experiment ID: 108547 Result: Up-regulated in Transcription
  misc_feature: MA Experiment 108547 PARAMETER Experiment Name: Zm_Imbibed_Seeds_P Parameter: Age (day) Value: 4 vs. 2
  misc_feature: MA Experiment 108547 PARAMETER Experiment Name: Zm_Imbibed_Seeds_P Parameter: Organism Value: Zea mays
  misc_feature: MA Experiment 108547 PARAMETER Experiment Name: Zm_Imbibed_Seeds_P Parameter: Plant Line Value: 35A19
  misc_feature: MA Experiment 108547 PARAMETER Experiment Name: Zm_Imbibed_Seeds_P Parameter: Tissue Value: Aerial vs. Embryo
  misc_feature: MA Experiment ID: 108556 Result: Down-regulated in Transcription
  misc_feature: MA Experiment 108556 PARAMETER Experiment Name: Zm_Drought_P Parameter: Age (day) Value: 9
  misc_feature: MA Experiment 108556 PARAMETER Experiment Name: Zm_Drought_P Parameter: Organism Value: Zea mays
  misc_feature: MA Experiment 108556 PARAMETER Experiment Name: Zm_Drought_P Parameter: Plant Line Value: 35A19
  misc_feature: MA Experiment 108556 PARAMETER Experiment Name: Zm_Drought_P Parameter: Timepoint (hr) Value: 24
  misc_feature: MA Experiment 108556 PARAMETER Experiment Name: Zm_Drought_P Parameter: Tissue Value: Aerial
  misc_feature: MA Experiment 108556 PARAMETER Experiment Name: Zm_Drought_P Parameter: Treatment Value: Drought vs. No Drought
  misc_feature: MA Experiment ID: 108689 Result: Up-regulated in Transcription
  misc_feature: MA Experiment 108689 PARAMETER Experiment Name: Zm_Drought_Roots_P Parameter: Age (day) Value: 9
  misc_feature: MA Experiment 108689 PARAMETER Experiment Name: Zm_Drought_Roots_P Parameter: Organism Value: Zea mays
  misc_feature: MA Experiment 108689 PARAMETER Experiment Name: Zm_Drought_Roots_P Parameter: Plant Line Value: 35A19
  misc_feature: MA Experiment 108689 PARAMETER Experiment Name: Zm_Drought_Roots_P Parameter: Timepoint (hr) Value: 24
  misc_feature: MA Experiment 108689 PARAMETER Experiment Name: Zm_Drought_Roots_P Parameter: Tissue Value: Roots
  misc_feature: MA Experiment 108689 PARAMETER Experiment Name: Zm_Drought_Roots_P Parameter: Treatment Value: Drought vs. No Drought
  misc_feature: MA Experiment ID: 20000477 Result: Down-regulated in Transcription
  misc_feature: MA Experiment 20000477 PARAMETER Experiment Name: Zm_5mM_SA_P Parameter: Age (day) Value: 10
  misc_feature: MA Experiment 20000477 PARAMETER Experiment Name: Zm_5mM_SA_P Parameter: Organism Value: Zea mays
  misc_feature: MA Experiment 20000477 PARAMETER Experiment Name: Zm_5mM_SA_P Parameter: Plant Line Value: 35A19
  misc_feature: MA Experiment 20000477 PARAMETER Experiment Name: Zm_5mM_SA_P Parameter: Timepoint (hr) Value: 48
  misc_feature: MA Experiment 20000477 PARAMETER Experiment Name: Zm_5mM_SA_P Parameter: Tissue Value: Aerial
  misc_feature: MA Experiment 20000477 PARAMETER Experiment Name: Zm_5mM_SA_P Parameter: Treatment Value: 5mM SA vs. No Treatment
  misc_feature: MA Experiment ID: 20000480 Result: Down-regulated in Transcription
  misc_feature: MA Experiment 20000480 PARAMETER Experiment Name: Zm_Drought_P Parameter: Age (day) Value: 11
  misc_feature: MA Experiment 20000480 PARAMETER Experiment Name: Zm_Drought_P Parameter: Organism Value: Zea mays
  misc_feature: MA Experiment 20000480 PARAMETER Experiment Name: Zm_Drought_P Parameter: Plant Line Value: 35A19
  misc_feature: MA Experiment 20000480 PARAMETER Experiment Name: Zm_Drought_P Parameter: Timepoint (hr) Value: 72
  misc_feature: MA Experiment 20000480 PARAMETER Experiment Name: Zm_Drought_P Parameter: Tissue Value: Aerial
  misc_feature: MA Experiment 20000480 PARAMETER Experiment Name: Zm_Drought_P Parameter: Treatment Value: Drought vs. No Drought
  misc_feature: MA Experiment ID: 20000535 Result: Down-regulated in Transcription
  misc_feature: MA Experiment 20000535 PARAMETER Experiment Name: Zm_Hybrid_Seed_Dev_P Parameter: DAP Value: 30 vs. 12
  misc_feature: MA Experiment 20000535 PARAMETER Experiment Name: Zm_Hybrid_Seed_Dev_P Parameter: Organism Value: Zea mays
  misc_feature: MA Experiment 20000535 PARAMETER Experiment Name: Zm_Hybrid_Seed_Dev_P Parameter: Plant Line Value: 35A19
  misc_feature: MA Experiment 20000535 PARAMETER Experiment Name: Zm_Hybrid_Seed_Dev_P Parameter: Tissue Value: Embryo vs. Unfert Floret
gcacgagaccattacctagaacatcctaatcgaaaagcactcgcttccttcgacggactcatcgccgatcacaccaggctagctagcccacccacagtcgtagggccaggaccgataggaggagctcggtttttccgaccaggaccgccgccgccacacccgaagaagccgacgatgcagacgacgacgacgacgtcctcggtggtggccgagctggagggcgcgctgctccggagcgcggacacgttcccgtacttcatgctcgtggcgttcgaggcgtccgggctgccgcgcttcgcgctgctgctggcgctgtggccgctgctgccggctgctggagctggcgggccggcgcggcctggcgctgcgcgccgccgcgttcgtggccaccgcgggcgtgccgcgcgccgaggtggaggcagtgtcgcgcgccgtgctgcccaagttcatggccgacgacgtcgaccccgccgcgtgggcggccttcgggagctgcgaggggacgcgcgtcgtcgtcacgcggatgccccgcgtcatggtcgaccgcttcgccagggagcacctaggcgcgcacgcggtcgtcggctgcgacctcgagtacagccggctcaggcggtccacgggtctgctaagaggcgcgagctatgaggacgtcgccacccgtgtgcgcgcgttgttcgccggcgacggctgccggccggcactcgggatcggcgggtcaaagatggcgcgctcattcttgacattctgcgaggagcagctcaggcagccattcccagcgcccaacgagacgaacgccccgccgttccggccggtcatcttccacgacgggcgcctcgtgtgccggcccacgccattcatgtccctcgtcatccttctctggctgccgctcggcgtgctggtcgccttcgtccggatcgccgtcgggctcatggtccccatctggaccgtcccctacatcgcgccggtcttcggcggcgccgtgatcacccacggccgcgcgcctccccccgccaagctcggcggcggctcgccctcgggggtcctcttcgtctgcacgcaccgcacgctcatggaccccgtggtgctggccgccgtgctcggccggcgcgtggcggccgtgacgtactccatctcccgcctctcggaggtcctctccccgatcccgacggtgcggctgacgcgcgaccgggacgcggacgcggcgcgcatgcgcgcggagctggcccgcggcggcgacgtggcggtgtgccccgagggcaccacgtgccgggagcccttcctgctccgcttctccaagctcttcgcggagctcagcgacagcatcgtgcccgtggcgatgaactaccgcgtggggctgttccacccgacgacggcgcgcgggtggaaggccatggaccccatcttcttcttcatgaacccgcggcccgtgtacgaggtgacgttcctgaaccagctccccgcggagtcgacgtgcgcggcggggaagagccccgtggacgtggccaactacgtgcagcggatactcgccgccacgctcgggttcgaatgcaccaccctcaccaggaaggacaagtacacggtgctcgcgggaaacgacggcgtcgtcaacgccaagccggcctggcagagccgcgtgaaggatgtcctcggcttcctgctccactaaccacattacttgcacggctctggactctgcgctcaaatacttcgctcaccgatttgattgagtttatactttacatttatttatacatgtaagtaagaataaccacacacaaaagcatgtagtagtaacatacagtagtgattattagcctttatttcttcacataataagtactgtatattgtattgttctttgttttacaagtgttttggtgaatttttactgggtgtaatcaaatatattttgtagtc

SEQ ID NO: 5939 - protein, 406 aa, Zea mays subsp. mays
  peptide (1)..(406): Ceres Seq. ID no. 12368598
  misc_feature (179)..(299): Pfam Name: Acyltransferase Pfam Description: Acyltransferase
  misc_feature (1)..(388): Homolog of NCBI NO: 15229747 NR Description: unknown protein; protein id: At3g11430.1
  misc_feature (1)..(401): Homolog of NCBI NO: 15239924 NR Description: putative protein; protein id: At5g06090.1 thaliana] >gi|8978345|dbj|BAA98198.1|
  misc_feature (1)..(388): Homolog of NCBI NO: 37534314 NR Description: hypothetical protein [Oryza sativa (japonica group)] >gi|31432061|gb|AAP53746.1| hypothetical protein [Oryza
  misc_feature (1)..(391): Homolog of NCBI NO: 38000002 NR Description: unknown protein [Oryza sativa (japonica
  misc_feature (1)..(390): Homolog of NCBI NO: 15224445 NR Description: unknown protein; protein id: At2g38110.1, by cDNA: gi_17065289 [Arabidopsis thaliana]
  misc_feature (1)..(391): Homolog of NCBI NO: 29788867 NR Description: hypothetical protein [Oryza sativa (japonica
  misc_feature (1)..(389): Homolog of NCBI NO: 15223437 NR Description: hypothetical protein; protein id: At1g01610.1, by cDNA: gi_17064779, supported by cDNA: gi_20259891 [Arabidopsis
  misc_feature (1)..(389): Homolog of NCBI NO: 17064780 NR Description: Unknown protein [Arabidopsis thaliana]
  misc_feature (1)..(386): Homolog of NCBI NO: 18481713 NR Description: hypothetical protein [Sorghum bicolor]
  misc_feature (238)..(401): Homolog of NCBI NO: 22330983 NR Description: hypothetical protein; protein id: At3g11325.1
MADDVDPAAWAAFGSCEGTRVVVTRMPRVMVDRFAREHLGAHAVVGCDLEYSRLRRSTGLLRGASYEDVATRVRALFAGDGCRPALGIGGSKMARSFLTFCEEQLRQPFPAPNETNAPPFRPVIFHDGRLVCRPTPFMSLVILLWLPLGVLVAFVRIAVGLMVPIWTVPYIAPVFGGAVITHGRAPPPAKLGGGSPSGVLFVCTHRTLMDPVVLAAVLGRRVAAVTYSISRLSEVLSPIPTVRLTRDRDADAARMRAELARGGDVAVCPEGTTCREPFLLRFSKLFAELSDSIVPVAMNYRVGLFHPTTARGWKAMDPIFFFMNPRPVYEVTFLNQLPAESTCAAGKSPVDVANYVQRILAATLGFECTTLTRKDKYTVLAGNDGVVNAKPAWQSRVKDVLGFLLH

SEQ ID NO: 5940 - protein, 381 aa, Zea mays subsp. mays
  peptide (1)..(381): Ceres Seq. ID no. 12368599
  misc_feature (154)..(274): Pfam Name: Acyltransferase Pfam Description: Acyltransferase
  misc_feature (1)..(364): Homolog of NCBI NO: 17064780 NR Description: Unknown protein [Arabidopsis thaliana]
  misc_feature (1)..(361): Homolog of NCBI NO: 18481713 NR Description: hypothetical protein [Sorghum bicolor]
  misc_feature (1)..(376): Homolog of NCBI NO: 15239924 NR Description: putative protein; protein id: At5g06090.1 thaliana] >gi|8978345|dbj|BAA98198.1|
  misc_feature (1)..(366): Homolog of NCBI NO: 38000002 NR Description: unknown protein [Oryza sativa (japonica
  misc_feature (1)..(366): Homolog of NCBI NO: 29788867 NR Description: hypothetical protein [Oryza sativa (japonica
  misc_feature (1)..(364): Homolog of NCBI NO: 15223437 NR Description: hypothetical protein; protein id: At1g01610.1, by cDNA: gi_17064779, supported by cDNA: gi_20259891 [Arabidopsis
  misc_feature (1)..(365): Homolog of NCBI NO: 15224445 NR Description: unknown protein; protein id: At2g38110.1, by cDNA: gi_17065289 [Arabidopsis thaliana]
  misc_feature (1)..(363): Homolog of NCBI NO: 37534314 NR Description: hypothetical protein [Oryza sativa (japonica group)] >gi|31432061|gb|AAP53746.1| hypothetical protein [Oryza
  misc_feature (1)..(363): Homolog of NCBI NO: 15229747 NR Description: unknown protein; protein id: At3g11430.1
  misc_feature (213)..(376): Homolog of NCBI NO: 22330983 NR Description: hypothetical protein; protein id: At3g11325.1
MPRVMVDRFAREHLGAHAVVGCDLEYSRLRRSTGLLRGASYEDVATRVRALFAGDGCRPALGIGGSKMARSFLTFCEEQLRQPFPAPNETNAPPFRPVIFHDGRLVCRPTPFMSLVILLWLPLGVLVAFVRIAVGLMVPIWTVPYIAPVFGGAVITHGRAPPPAKLGGGSPSGVLFVCTHRTLMDPVVLAAVLGRRVAAVTYSISRLSEVLSPIPTVRLTRDRDADAARMRAELARGGDVAVCPEGTTCREPFLLRFSKLFAELSDSIVPVAMNYRVGLFHPTTARGWKAMDPIFFFMNPRPVYEVTFLNQLPAESTCAAGKSPVDVANYVQRILAATLGFECTTLTRKDKYTVLAGNDGVVNAKPAWQSRVKDVLGFLLH

SEQ ID NO: 5941 - protein, 377 aa, Zea mays subsp. mays
  peptide (1)..(377): Ceres Seq. ID no. 12368600
  misc_feature (150)..(270): Pfam Name: Acyltransferase Pfam Description: Acyltransferase
  misc_feature (1)..(359): Homolog of NCBI NO: 15229747 NR Description: unknown protein; protein id: At3g11430.1
  misc_feature (1)..(372): Homolog of NCBI NO: 15239924 NR Description: putative protein; protein id: At5g06090.1 thaliana] >gi|8978345|dbj|BAA98198.1|
  misc_feature (1)..(359): Homolog of NCBI NO: 37534314 NR Description: hypothetical protein [Oryza sativa (japonica group)] >gi|31432061|gb|AAP53746.1| hypothetical protein [Oryza
  misc_feature (1)..(362): Homolog of NCBI NO: 38000002 NR Description: unknown protein [Oryza sativa (japonica
  misc_feature (1)..(361): Homolog of NCBI NO: 15224445 NR Description: unknown protein; protein id: At2g38110.1, by cDNA: gi_17065289 [Arabidopsis thaliana]
  misc_feature (1)..(362): Homolog of NCBI NO: 29788867 NR Description: hypothetical protein [Oryza sativa (japonica
  misc_feature (1)..(360): Homolog of NCBI NO: 15223437 NR Description: hypothetical protein; protein id: At1g01610.1, by cDNA: gi_17064779, supported by cDNA: gi_20259891 [Arabidopsis
  misc_feature (1)..(360): Homolog of NCBI NO: 17064780 NR Description: Unknown protein [Arabidopsis thaliana]
  misc_feature (1)..(357): Homolog of NCBI NO: 18481713 NR Description: hypothetical protein [Sorghum bicolor]
  misc_feature (209)..(372): Homolog of NCBI NO: 22330983 NR Description: hypothetical protein; protein id: At3g11325.1
MVDRFAREHLGAHAVVGCDLEYSRLRRSTGLLRGASYEDVATRVRALFAGDGCRPALGIGGSKMARSFLTFCEEQLRQPFPAPNETNAPPFRPVIFHDGRLVCRPTPFMSLVILLWLPLGVLVAFVRIAVGLMVPIWTVPYIAPVFGGAVITHGRAPPPAKLGGGSPSGVLFVCTHRTLMDPVVLAAVLGRRVAAVTYSISRLSEVLSPIPTVRLTRDRDADAARMRAELARGGDVAVCPEGTTCREPFLLRFSKLFAELSDSIVPVAMNYRVGLFHPTTARGWKAMDPIFFFMNPRPVYEVTFLNQLPAESTCAAGKSPVDVANYVQRILAATLGFECTTLTRKDKYTVLAGNDGVVNAKPAWQSRVKDVLGFLLH

SEQ ID NO: 5942 - DNA, 982 bp, Zea mays subsp. mays
  misc_feature (1)..(982): Ceres Seq. ID no. 12404445
  misc_feature: MA Experiment ID: 108523 Result: Down-regulated in Transcription
  misc_feature: MA Experiment 108523 PARAMETER Experiment Name: Zm_42deg_Heat_P Parameter: Age (day) Value: 8
  misc_feature: MA Experiment 108523 PARAMETER Experiment Name: Zm_42deg_Heat_P Parameter: Organism Value: Zea mays
  misc_feature: MA Experiment 108523 PARAMETER Experiment Name: Zm_42deg_Heat_P Parameter: Plant Line Value: 35A19
  misc_feature: MA Experiment 108523 PARAMETER Experiment Name: Zm_42deg_Heat_P Parameter: Temperature (deg C) Value: 42 vs. 22
  misc_feature: MA Experiment 108523 PARAMETER Experiment Name: Zm_42deg_Heat_P Parameter: Timepoint (hr) Value: 6
  misc_feature: MA Experiment 108523 PARAMETER Experiment Name: Zm_42deg_Heat_P Parameter: Tissue Value: Aerial
  misc_feature: MA Experiment ID: 108528 Result: Up-regulated in Transcription
  misc_feature: MA Experiment 108528 PARAMETER Experiment Name: Zm_Imbibed_Seeds_P Parameter: Age (day) Value: 5 vs. 2
  misc_feature: MA Experiment 108528 PARAMETER Experiment Name: Zm_Imbibed_Seeds_P Parameter: Organism Value: Zea mays
  misc_feature: MA Experiment 108528 PARAMETER Experiment Name: Zm_Imbibed_Seeds_P Parameter: Plant Line Value: 35A19
  misc_feature: MA Experiment 108528 PARAMETER Experiment Name: Zm_Imbibed_Seeds_P Parameter: Tissue Value: Aerial vs. Embryo
  misc_feature: MA Experiment ID: 108530 Result: Up-regulated in Transcription
  misc_feature: MA Experiment 108530 PARAMETER Experiment Name: Zm_Imbibed_Seeds_P Parameter: Age (day) Value: 6 vs. 2
  misc_feature: MA Experiment 108530 PARAMETER Experiment Name: Zm_Imbibed_Seeds_P Parameter: Organism Value: Zea mays
  misc_feature: MA Experiment 108530 PARAMETER Experiment Name: Zm_Imbibed_Seeds_P Parameter: Plant Line Value: 35A19
  misc_feature: MA Experiment 108530 PARAMETER Experiment Name: Zm_Imbibed_Seeds_P Parameter: Tissue Value: Aerial vs. Embryo
  misc_feature: MA Experiment ID: 108536 Result: Down-regulated in Transcription
  misc_feature: MA Experiment 108536 PARAMETER Experiment Name: Zm_Meristem_P Parameter: Age (day) Value: 8
  misc_feature: MA Experiment 108536 PARAMETER Experiment Name: Zm_Meristem_P Parameter: Organism Value: Zea mays
  misc_feature: MA Experiment 108536 PARAMETER Experiment Name: Zm_Meristem_P Parameter: Plant Line Value: 35A19
  misc_feature: MA Experiment 108536 PARAMETER Experiment Name: Zm_Meristem_P Parameter: Tissue Value: Shoot Meristem vs. Above Shoot Meristem
  misc_feature: MA Experiment ID: 108543 Result: Up-regulated in Transcription
  misc_feature: MA Experiment ID: 108545 Result: Up-regulated in Transcription
  misc_feature: MA Experiment 108545 PARAMETER Experiment Name: Zm_Imbibed_Seeds_P Parameter: Age (day) Value: 3 vs. 2
  misc_feature: MA Experiment 108545 PARAMETER Experiment Name: Zm_Imbibed_Seeds_P Parameter: Organism Value: Zea mays
  misc_feature: MA Experiment 108545 PARAMETER Experiment Name: Zm_Imbibed_Seeds_P Parameter: Plant Line Value: 35A19
  misc_feature: MA Experiment 108545 PARAMETER Experiment Name: Zm_Imbibed_Seeds_P Parameter: Tissue Value: Aerial vs. Embryo
  misc_feature: MA Experiment ID: 108546 Result: Down-regulated in Transcription
  misc_feature: MA Experiment 108546 PARAMETER Experiment Name: Zm_Imbibed_Seeds_P Parameter: Age (day) Value: 3 vs. 2
  misc_feature: MA Experiment 108546 PARAMETER Experiment Name: Zm_Imbibed_Seeds_P Parameter: Organism Value: Zea mays
  misc_feature: MA Experiment 108546 PARAMETER Experiment Name: Zm_Imbibed_Seeds_P Parameter: Plant Line Value: 35A19
  misc_feature: MA Experiment 108546 PARAMETER Experiment Name: Zm_Imbibed_Seeds_P Parameter: Tissue Value: Roots vs. Embryo
  misc_feature: MA Experiment ID: 108547 Result: Up-regulated in Transcription
  misc_feature: MA Experiment 108547 PARAMETER Experiment Name: Zm_Imbibed_Seeds_P Parameter: Age (day) Value: 4 vs. 2
  misc_feature: MA Experiment 108547 PARAMETER Experiment Name: Zm_Imbibed_Seeds_P Parameter: Organism Value: Zea mays
  misc_feature: MA Experiment 108547 PARAMETER Experiment Name: Zm_Imbibed_Seeds_P Parameter: Plant Line Value: 35A19
  misc_feature: MA Experiment 108547 PARAMETER Experiment Name: Zm_Imbibed_Seeds_P Parameter: Tissue Value: Aerial vs. Embryo
  misc_feature: MA Experiment ID: 20000492 Result: Down-regulated in Transcription
  misc_feature: MA Experiment 20000492 PARAMETER Experiment Name: Zm_Hybrid_Seed_Dev_P Parameter: DAP Value: 12
  misc_feature: MA Experiment 20000492 PARAMETER Experiment Name: Zm_Hybrid_Seed_Dev_P Parameter: Organism Value: Zea mays
  misc_feature: MA Experiment 20000492 PARAMETER Experiment Name: Zm_Hybrid_Seed_Dev_P Parameter: Plant Line Value: 35A19
  misc_feature: MA Experiment 20000492 PARAMETER Experiment Name: Zm_Hybrid_Seed_Dev_P Parameter: Tissue Value: Fert Kernel vs. Unfert Floret
gttttgtttccattccatcggtggcacgagacaggagacgccaaggccatagctagagcctagagcagcagcagaggcttgacctgaagctccacccgccatggcattcacgcccgctacggcctgctgcaaggcttccctggcgctggcaccgcgggcgtcgccccgcggcccggcggcctgcgcgcaggcggcgctcctctgcacgccctccacctccgtgttccgcggcctccgggcgcccgcatccgccgcgccggccccgcgccggcgccgctcggcggcgtccacgggcatagtctgcggcaaggtcgccaagggcagcgtgccgccgaacttcaccctcaaggaccagaacggcaagcccgtgtcgctgaacaagttcaagggcaagcccgtcgtggtttacttctaccccgccgacgagacgcccggatgcacaaagcaggcgtgcgcgttcagggactcgtacgagaagttcaagaaggccggggcggaggtgatcggcatcagcggcgacgacgcggcgtcgcacaaggcgttcgcgcagaagtaccggctgccgttcacgctgctgagcgacgaggggaaccgcgtgcgcaaggagtggggcgtcccctcggacctgttcgggacgctgccggggcgccagacgtacgtgctggacaagcagggcgtcgtgcagtacgtctacaacaaccagttccagcccgagaagcacatcggcgagacgctcaagatcctgcagaccctctgatccgatcaacctcctcactgttctgggccatgctctgcattcgtcgctgtaaaagtaccggactatgtagtagtgtagtgtatgtaaccaagagctgatgacctgatgttttgttccatccttcagtgagtctatctatcacacgattctggctcgtttgatcgaccagcatcttcctgtttgtcatggtcagtttcacttgtattacaactgtacttttggtcg

SEQ ID NO: 5943 - protein, 218 aa, Zea mays subsp. mays
  peptide (1)..(218): Ceres Seq. ID no. 12404446
  misc_feature (73)..(212): Pfam Name: AhpC/TSA family Pfam Description: AhpC/TSA family
  misc_feature (34)..(218): Homolog of NCBI NO: 6899842 NR Description: peroxiredoxin Q [Sedum lineare]
  misc_feature (45)..(217): Homolog of NCBI NO: 39748708 NR Description: peroxiredoxin Q [Gentiana triflora]
  misc_feature (60)..(216): Homolog of NCBI NO: 15230982 NR Description: putative peroxiredoxin; protein id: At3g26060.1, by cDNA: gi_15081742, supported by cDNA: gi_18252272 [Arabidopsis
  misc_feature (71)..(218): Homolog of NCBI NO: 17230675 NR Description: bacterioferritin comigratory protein [Nostoc sp.
  misc_feature (74)..(218): Homolog of NCBI NO: 23125049 NR Description: hypothetical protein [Nostoc punctiforme]
  misc_feature (70)..(218): Homolog of NCBI NO: 23041480 NR Description: hypothetical protein [Trichodesmium erythraeum
  misc_feature (70)..(218): Homolog of NCBI NO: 28850433 NR Description: similar to Anabaena sp. (strain PCC 7120).
  misc_feature (71)..(218): Homolog of NCBI NO: 15898858 NR Description: Peroxiredoxin, bacterioferritin comigratory
  misc_feature (74)..(216): Homolog of NCBI NO: 21673494 NR Description: bacterioferritin comigratory protein, thiol putative [Chlorobium tepidum TLS] >gi|21646601|gb|AAM71901.1| comigratory protein, thiol peroxidase, putative [Chlorobium
  misc_feature (74)..(218): Homolog of NCBI NO: 22405087 NR Description: hypothetical protein [Ferroplasma acidarmanus]
MAFTPATACCKASLALAPRASPRGPAACAQAALLCTPSTSVFRGLRAPASAAPAPRRRRSAASTGIVCGKVAKGSVPPNFTLKDQNGKPVSLNKFKGKPVVVYFYPADETPGCTKQACAFRDSYEKFKKAGAEVIGISGDDAASHKAFAQKYRLPFTLLSDEGNRVRKEWGVPSDLFGTLPGRQTYVLDKQGVVQYVYNNQFQPEKHIGETLKILQTL

SEQ ID NO: 5944 - protein, 139 aa, Zea mays subsp. mays
  peptide (1)..(139): Ceres Seq. ID no. 12404447
  misc_feature (1)..(113): Pfam Name: Protein of unknown function (DUF390) Pfam Description: Protein of unknown function (DUF390)
MHKAGVRVQGLVREVQEGRGGGDRHQRRRRGVAQGVRAEVPAAVHAAERRGEPRAQGVGRPLGPVRDAAGAPDVRAGQAGRRAVRLQQPVPAREAHRRDAQDPADPLIRSTSSLFWAMLCIRRCKSTGLCSSVVYVTKS

SEQ ID NO: 5945 - DNA, 1843 bp, Zea mays subsp. mays
  misc_feature (1)..(1843): Ceres Seq. ID no. 12406900
  misc_feature: MA Experiment ID: 108535 Result: Up-regulated in Transcription
  misc_feature: MA Experiment 108535 PARAMETER Experiment Name: Zm_Meristem_P Parameter: Age (day) Value: 8
  misc_feature: MA Experiment 108535 PARAMETER Experiment Name: Zm_Meristem_P Parameter: Organism Value: Zea mays
  misc_feature: MA Experiment 108535 PARAMETER Experiment Name: Zm_Meristem_P Parameter: Plant Line Value: 35A19
  misc_feature: MA Experiment 108535 PARAMETER Experiment Name: Zm_Meristem_P Parameter: Tissue Value: Root Meristem vs. Above Root Meristem
  misc_feature: MA Experiment ID: 108543 Result: Up-regulated in Transcription
  misc_feature: MA Experiment ID: 20000108 Result: Up-regulated in Transcription
  misc_feature: MA Experiment 20000108 PARAMETER Experiment Name: Zm_Root-Tips_P Parameter: Age (day) Value: 12
  misc_feature: MA Experiment 20000108 PARAMETER Experiment Name: Zm_Root-Tips_P Parameter: Organism Value: Zea mays
  misc_feature: MA Experiment 20000108 PARAMETER Experiment Name: Zm_Root-Tips_P Parameter: Tissue Value: Root tips vs. Root mid region    35
  misc_feature: MA Experiment 20000108 PARAMETER Experiment Name: Zm_Root-Tips_P Parameter: Tissue Value: Root tips vs. Root mid region   Sequence Listing-Misc Features (4)
  misc_feature: MA Experiment ID: 20000492 Result: Up-regulated in Transcription
  misc_feature: MA Experiment 20000492 PARAMETER Experiment Name: Zm_Hybrid_Seed_Dev_P Parameter: DAP Value: 12
  misc_feature: MA Experiment 20000492 PARAMETER Experiment Name: Zm_Hybrid_Seed_Dev_P Parameter: Organism Value: Zea mays
  misc_feature: MA Experiment 20000492 PARAMETER Experiment Name: Zm_Hybrid_Seed_Dev_P Parameter: Plant Line Value: 35A19
  misc_feature: MA Experiment 20000492 PARAMETER Experiment Name: Zm_Hybrid_Seed_Dev_P Parameter: Tissue Value: Fert Kernel vs. Unfert Floret
ggattcgggcgctcggcgtagccgcgcagtggtgtgtctgcctccctccttgtatcctcctcgaattcgagcggcggcgacggcgggaagggagatggaggcggttagaggcgatgggaggtggtgcgtggtgactggcggccgcgggttcgccgcgaggcatctggtgacgatgctgctccgctccggcgagtggcgggtgcgcgtggccgacctgggccctgccatcacgctcgaccgcgacgaagaagagggtttcctgggtgctgctctccgcgaaggccaggccgtctacgtgtccgccgacctccgtgacaaggcccaggtcgccagagcttttgaaggggcagaagtagttttccatatggctgctccagattcatccatcaacaacttccaccttcattatggagtcaatgtcgatggaacaaagaatgttattgacacttgtatccgttgcaaggtgaagagactcatctatactagttcacctagtgtcgtgtttgatggagttcatggaatttttaatgcagatgaatcaatgccttacccagataagtttaatgattcatattcagaaacgaaagcggatgcagaaaagcttgtgatgagagctaatggtagggaagggcttcttacatgctgtatacgcccaagtagcatttttggccctggtgataagctaatggttccatctttggttgctgctgcaagggcagggaagtccaaatacattattggtgatgggaacaactactatgatttcacctacgtggaaaatgtggcatatggccatgtttgtgcggagaaaactctatcatctgaagatggtgcaaagatagccgctggaaaaacctatttcataacaaatatggagcctataaaattctgggagttcatgtcattgattttagaaggtcttggatatgaaaggccttcagtaaaaataccagtctctgttatgatgccggtggctcatgttgtagaatggacttaccagaaatttgccaagtatggaatgaaagttcctcagctgaccccttcaaggatcaggctgctttcatgtaacaggacattcagttgctcaagagcaaaggagcagcttggttatgaacctctcgtgtcccttaaggatggagtgaagagaacagtagagtcgtactcccatctacaagctcagaatcataggagtatatcaaaggcttcaattttcctcgggaatggaaatcttgcaaaaacagtactttgggaagatgcgaagcaaactgtgacagtgcttctactgttggctgttatctactaccacttatttacatgtagttacaccttcatcacagcgatggcaaagcttttgtcactaactgctctgttcttattcattcatggcatgctgccatcaaatctgttcggtcacaaggttgagaaactcgaggcctctaattttcacatcacccaggcacaggctcatcatattgctaattccattagttcgaattggaactctttagtcagtgcgctaagatctctttgtagaggaaatgattggctattgtttctcaaggtttcactatctctgctggttgtcagcatccttagttccatgtcttctcaggctgcatttaaaataggtactgctctggttttcacaggcttcaaagcgtatgagaaatgggaggacagcattgatagtatggtgggcgacgcctgtaccattcttctgcactttggttctgccaaggaatcatctagctagaaacaaacgtaggtgtagcttgcagactgccagttactttgtttactgatattatcttcagctccagctgtttctgggtttcgttgacct

SEQ ID NO: 5946 - protein, 583 aa, Zea mays subsp. mays
  peptide (1)..(583): Ceres Seq. ID no. 12406901
  misc_feature (40)..(391): Pfam Name: 3-beta hydroxysteroid dehydrogenase/isomerase family Pfam Description: 3-beta hydroxysteroid dehydrogenase/isomerase
  misc_feature (32)..(472): Homolog of NCBI NO: 30694041 NR Description: 3-beta hydroxysteroid dehydrogenase/isomerase [Arabidopsis thaliana] >gi|25405196|pir||F96513 hypothetical
  misc_feature (32)..(404): Homolog of NCBI NO: 18401656 NR Description: 3-beta-hydroxysteroid dehydrogenase, putative; id: At1g47290.1, supported by cDNA: 142354. [Arabidopsis
  misc_feature (32)..(404): Homolog of NCBI NO: 21553411 NR Description: 3-beta-hydroxysteroid dehydrogenase, putative
  misc_feature (40)..(408): Homolog of NCBI NO: 15225272 NR Description: 3-beta-hydroxysteroid dehydrogenase; protein id:
  misc_feature (33)..(558): Homolog of NCBI NO: 18406234 NR Description: putative sterol dehydrogenase; protein id: supported by cDNA: gi_15027968 [Arabidopsis thaliana] putative sterol dehydrogenase [Arabidopsis thaliana]
  misc_feature (284)..(565): Homolog of NCBI NO: 21539467 NR Description: 3-beta-hydroxysteroid dehydrogenase [Arabidopsis
  misc_feature (40)..(243): Homolog of NCBI NO: 23198272 NR Description: 3-beta-hydroxysteroid dehydrogenase [Arabidopsis
  misc_feature (114)..(377): Homolog of NCBI NO: 25408868 NR Description: probable sterol dehydrogenase [imported] -
  misc_feature (33)..(113): Homolog of NCBI NO: 25408868 NR Description: probable sterol dehydrogenase [imported] -
  misc_feature (95)..(391): Homolog of NCBI NO: 8393516 NR Description: NAD(P) dependent steroid dehydrogenase-like;
DSGARRSRAVVCLPPSLYPPRIRAAATAGREMEAVRGDGRWCVVTGGRGFAARHLVTMLLRSGEWRVRVADLGPAITLDRDEEEGFLGAALREGQAVYVSADLRDKAQVARAFEGAEVVFHMAAPDSSINNFHLHYGVNVDGTKNVIDTCIRCKVKRLIYTSSPSVVFDGVHGIFNADESMPYPDKFNDSYSETKADAEKLVMRANGREGLLTCCIRPSSIFGPGDKLMVPSLVAAARAGKSKYIIGDGNNYYDFTYVENVAYGHVCAEKTLSSEDGAKIAAGKTYFITNMEPIKFWEFMSLILEGLGYERPSVKIPVSVMMPVAHVVEWTYQKFAKYGMKVPQLTPSRIRLLSCNRTFSCSRAKEQLGYEPLVSLKDGVKRTVESYSHLQAQNHRSISKASIFLGNGNLAKTVLWEDAKQTVTVLLLLAVIYYHLFTCSYTFITAMAKLLSLTALFLFIHGMLPSNLFGHKVEKLEASNFHITQAQAHHIANSISSNWNSLVSALRSLCRGNDWLLFLKVSLSLLVVSILSSMSSQAAFKIGTALVFTGFKAYEKWEDSIDSMVGDACTILLHFGSAKESSS

SEQ ID NO: 5947 - protein, 552 aa, Zea mays subsp. mays
  peptide (1)..(552): Ceres Seq. ID no. 12406902
  misc_feature (9)..(360): Pfam Name: 3-beta hydroxysteroid dehydrogenase/isomerase family Pfam Description: 3-beta hydroxysteroid dehydrogenase/isomerase
  misc_feature (1)..(441): Homolog of NCBI NO: 30694041 NR Description: 3-beta hydroxysteroid dehydrogenase/isomerase [Arabidopsis thaliana] >gi|25405196|pir||F96513 hypothetical
  misc_feature (1)..(373): Homolog of NCBI NO: 18401656 NR Description: 3-beta-hydroxysteroid dehydrogenase, putative; id: At1g47290.1, supported by cDNA: 142354. [Arabidopsis
  misc_feature (1)..(373): Homolog of NCBI NO: 21553411 NR Description: 3-beta-hydroxysteroid dehydrogenase, putative
  misc_feature (9)..(377): Homolog of NCBI NO: 15225272 NR Description: 3-beta-hydroxysteroid dehydrogenase; protein id:
  misc_feature (2)..(527): Homolog of NCBI NO: 18406234 NR Description: putative sterol dehydrogenase; protein id: supported by cDNA: gi_15027968 [Arabidopsis thaliana] putative sterol dehydrogenase [Arabidopsis thaliana]
  misc_feature (253)..(534): Homolog of NCBI NO: 21539467 NR Description: 3-beta-hydroxysteroid dehydrogenase [Arabidopsis
  misc_feature (9)..(212): Homolog of NCBI NO: 23198272 NR Description: 3-beta-hydroxysteroid dehydrogenase [Arabidopsis
  misc_feature (83)..(346): Homolog of NCBI NO: 25408868 NR Description: probable sterol dehydrogenase [imported] -
  misc_feature (2)..(82): Homolog of NCBI NO: 25408868 NR Description: probable sterol dehydrogenase [imported] -
  misc_feature (64)..(360): Homolog of NCBI NO: 8393516 NR Description: NAD(P) dependent steroid dehydrogenase-like;
MEAVRGDGRWCVVTGGRGFAARHLVTMLLRSGEWRVRVADLGPAITLDRDEEEGFLGAALREGQAVYVSADLRDKAQVARAFEGAEVVFHMAAPDSSINNFHLHYGVNVDGTKNVIDTCIRCKVKRLIYTSSPSVVFDGVHGIFNADESMPYPDKFNDSYSETKADAEKLVMRANGREGLLTCCIRPSSIFGPGDKLMVPSLVAAARAGKSKYIIGDGNNYYDFTYVENVAYGHVCAEKTLSSEDGAKIAAGKTYFITNMEPIKFWEFMSLILEGLGYERPSVKIPVSVMMPVAHVVEWTYQKFAKYGMKVPQLTPSRIRLLSCNRTFSCSRAKEQLGYEPLVSLKDGVKRTVESYSHLQAQNHRSISKASIFLGNGNLAKTVLWEDAKQTVTVLLLLAVIYYHLFTCSYTFITAMAKLLSLTALFLFIHGMLPSNLFGHKVEKLEASNFHITQAQAHHIANSISSNWNSLVSALRSLCRGNDWLLFLKVSLSLLVVSILSSMSSQAAFKIGTALVFTGFKAYEKWEDSIDSMVGDACTILLHFGSAKESSS

SEQ ID NO: 5948 - protein, 526 aa, Zea mays subsp. mays
  peptide (1)..(526): Ceres Seq. ID no. 12406903
  misc_feature (1)..(334): Pfam Name: 3-beta hydroxysteroid dehydrogenase/isomerase family Pfam Description: 3-beta hydroxysteroid dehydrogenase/isomerase
  misc_feature (1)..(415): Homolog of NCBI NO: 30694041 NR Description: 3-beta hydroxysteroid dehydrogenase/isomerase [Arabidopsis thaliana] >gi|25405196|pir||F96513 hypothetical
  misc_feature (1)..(347): Homolog of NCBI NO: 18401656 NR Description: 3-beta-hydroxysteroid dehydrogenase, putative; id: At1g47290.1, supported by cDNA: 142354. [Arabidopsis
  misc_feature (1)..(347): Homolog of NCBI NO: 21553411 NR Description: 3-beta-hydroxysteroid dehydrogenase, putative
  misc_feature (1)..(351): Homolog of NCBI NO: 15225272 NR Description: 3-beta-hydroxysteroid dehydrogenase; protein id:
  misc_feature (1)..(501): Homolog of NCBI NO: 18406234 NR Description: putative sterol dehydrogenase; protein id: supported by cDNA: gi_15027968 [Arabidopsis thaliana] putative sterol dehydrogenase [Arabidopsis thaliana]
  misc_feature (227)..(508): Homolog of NCBI NO: 21539467 NR Description: 3-beta-hydroxysteroid dehydrogenase [Arabidopsis
  misc_feature (1)..(186): Homolog of NCBI NO: 23198272 NR Description: 3-beta-hydroxysteroid dehydrogenase [Arabidopsis
  misc_feature (57)..(320): Homolog of NCBI NO: 25408868 NR Description: probable sterol dehydrogenase [imported] -
  misc_feature (1)..(56): Homolog of NCBI NO: 25408868 NR Description: probable sterol dehydrogenase [imported] -
  misc_feature (38)..(334): Homolog of NCBI NO: 8393516 NR Description: NAD(P) dependent steroid dehydrogenase-like;
MLLRSGEWRVRVADLGPAITLDRDEEEGFLGAALREGQAVYVSADLRDKAQVARAFEGAEVVFHMAAPDSSINNFHLHYGVNVDGTKNVIDTCIRCKVKRLIYTSSPSVVFDGVHGIFNADESMPYPDKFNDSYSETKADAEKLVMRANGREGLLTCCIRPSSIFGPGDKLMVPSLVAAARAGKSKYIIGDGNNYYDFTYVENVAYGHVCAEKTLSSEDGAKIAAGKTYFITNMEPIKFWEFMSLILEGLGYERPSVKIPVSVMMPVAHVVEWTYQKFAKYGMKVPQLTPSRIRLLSCNRTFSCSRAKEQLGYEPLVSLKDGVKRTVESYSHLQAQNHRSISKASIFLGNGNLAKTVLWEDAKQTVTVLLLLAVIYYHLFTCSYTFITAMAKLLSLTALFLFIHGMLPSNLFGHKVEKLEASNFHITQAQAHHIANSISSNWNSLVSALRSLCRGNDWLLFLKVSLSLLVVSILSSMSSQAAFKIGTALVFTGFKAYEKWEDSIDSMVGDACTILLHFGSAKESSS

SEQ ID NO: 5949 - DNA, 1490 bp, Zea mays subsp. mays
  misc_feature (1)..(1490): Ceres Seq. ID no. 12356378
  misc_feature: MA Experiment ID: 108529 Result: Down-regulated in Transcription
  misc_feature: MA Experiment 108529 PARAMETER Experiment Name: Zm_Imbibed_Seeds_P Parameter: Age (day) Value: 5 vs. 2
  misc_feature: MA Experiment 108529 PARAMETER Experiment Name: Zm_Imbibed_Seeds_P Parameter: Organism Value: Zea mays
  misc_feature: MA Experiment 108529 PARAMETER Experiment Name: Zm_Imbibed_Seeds_P Parameter: Plant Line Value: 35A19
  misc_feature: MA Experiment 108529 PARAMETER Experiment Name: Zm_Imbibed_Seeds_P Parameter: Tissue Value: Roots vs. Embryo
  misc_feature: MA Experiment ID: 108543 Result: Down-regulated in Transcription
  misc_feature: MA Experiment ID: 108544 Result: Down-regulated in Transcription
  misc_feature: MA Experiment ID: 108687 Result: Up-regulated in Transcription
  misc_feature: MA Experiment 108687 PARAMETER Experiment Name: Zm_Embryos-Flowers__P Parameter: Tissue Value: Embryo vs. Aerial+
atcacgaatcaccaacaccctctcctccaccttccatcccgatcaccgccgccaccgctttcgttccacgtcccgatggcaccggtagatctaacccccaggcagccccggaaggcgtatggcggcgacgccggcgcctactacgagtggagcccagccgacctgcccatgctcggcgtcgcctccatcggcgcaggccaagctctccctcgccgccggtgggctctcgctccccagctactccgactcttccaaggtcgcgtacgttcttgaaggcactggcacctgcggcatcgtcctgccggaggcgaccaaggagaaggtgctggccgtgaaggagggcgacgccctcgcgctccccttcggcgtggtcacgtggtggcacaacggccccgccgcgccgacccagctcacggtcctcttcctcggcgacacctccaagggccacaggccggggcagttcaccaacttccagctgacgggcgcgagcggcatcttcacgggcttctccaccgagttcgtgtcgcgcgcgtgggacctgccggaggcgaacgccgcggcgctggtgtcgagccagccggcgtcgggcatcgtcagggcctcgtccccgctgccggcgccctcggcgcaggaccgcgagggggtggcgctcaactgcctggaggcgccgctggacgtggacatcccgggcgggggccgcgtggtggtgctcaacacggcgaacctgcccctggtcagggaggtcgggctgggcgccgacctggtccgcatcgacgcgcactccatgtgctccccgggcttctcgtgcgactcggcgtaccaggtcacctacatcgtgcgcggcagcgggcgcgtgcaggtggtcgggcccgacggggtgcgcgtcctggagacgcgcgtcgagggcggcttcctcttcatcgtgccccgcttccacgtggtgtccaagatcgcggacgcgtcgggcatggaatggttctccatcatcaccacccccaacccgatcttcagccatctggccggaaagacgtcggtgtggaaagccatctcggcggaggtgctgcaggcntcgttcaacaccacgccggagatggagaagctgttccggtccaagaggcttgactcggagatcttcttcgcgcccccgtccaactgagcaaataggcggaagcccacggtggagtgctctcgtgaagtcgtcgtggttagattagcattagcttagctcgccttaataaagagagaatggtggtggtcctcggctcactgcttcttcagtagcttcagtcgttcagtggttcagtcgttgcgtcggtcggttgtcgtgtccgttcgtcgaactgccaagttttgttaattattattattgtcaccctctgttttgtctaggtctagggctggaaaaaaactttaagccgcggcttgttcaggctcgcgagctatattgttttaattaatctataaaataataataaatattataattctat

SEQ ID NO: 5950 - protein, 345 aa, Zea mays subsp. mays
  peptide (1)..(345): Ceres Seq. ID no. 12356379
  misc_feature (178)..(326): Pfam Name: Cupin Pfam Description: Cupin
  misc_feature (27)..(345): Homolog of NCBI NO: 28950668 NR Description: legumin-like protein [Zea mays]
  misc_feature (17)..(345): Homolog of NCBI NO: 28950670 NR Description: legumin-like protein [Zea mays]
  misc_feature (1)..(345): Homolog of NCBI NO: 37730876 NR Description: legumin-like protein [Zea mays]
  misc_feature (27)..(345): Homolog of NCBI NO: 34906084 NR Description: putative legumin-like protein [Oryza sativa
  misc_feature (27)..(345): Homolog of NCBI NO: 15226926 NR Description: legumin-like protein; protein id: At2g28680.1
  misc_feature (27)..(345): Homolog of NCBI NO: 21593610 NR Description: globulin-like protein [Arabidopsis thaliana]
  misc_feature (27)..(345): Homolog of NCBI NO: 15223000 NR Description: globulin-like protein; protein id: At1g07750.1, by cDNA: 40551., supported by cDNA: gi_12248028, supported by gi_15294233 [Arabidopsis thaliana] >gi|25407006|pir||A86213
  misc_feature (28)..(168): Homolog of NCBI NO: 7595348 NR Description: globulin-like protein [Cucumis melo]
  misc_feature (186)..(339): Homolog of NCBI NO: 29839254 NR Description: 13S globulin seed storage protein 1 precursor
  misc_feature (67)..(124): Homolog of NCBI NO: 29839254 NR Description: 13S globulin seed storage protein 1 precursor
  misc_feature (317)..(317): Xaa is any aa, unknown or other
MAATPAPTTSGAQPTCPCSASPPSAQAKLSLAAGGLSLPSYSDSSKVAYVLEGTGTCGIVLPEATKEKVLAVKEGDALALPFGVVTWWHNGPAAPTQLTVLFLGDTSKGHRPGQFTNFQLTGASGIFTGFSTEFVSRAWDLPEANAAALVSSQPASGIVRASSPLPAPSAQDREGVALNCLEAPLDVDIPGGGRVVVLNTANLPLVREVGLGADLVRIDAHSMCSPGFSCDSAYQVTYIVRGSGRVQVVGPDGVRVLETRVEGGFLFIVPRFHVVSKIADASGMEWFSIITTPNPIFSHLAGKTSVWKAISAEVLQXSFNTTPEMEKLFRSKRLDSEIFFAPPSN

SEQ ID NO: 5951 - DNA, 1071 bp, Zea mays subsp. mays
  misc_feature (1)..(1071): Ceres Seq. ID no. 12402571
  misc_feature: MA Experiment ID: 108527 Result: Up-regulated in Transcription
  misc_feature: MA Experiment 108527 PARAMETER Experiment Name: Zm_5mM_NO_P Parameter: Age (day) Value: 8
  misc_feature: MA Experiment 108527 PARAMETER Experiment Name: Zm_5mM_NO_P Parameter: Organism Value: Zea mays
  misc_feature: MA Experiment 108527 PARAMETER Experiment Name: Zm_5mM_NO_P Parameter: Plant Line Value: 35A19
  misc_feature: MA Experiment 108527 PARAMETER Experiment Name: Zm_5mM_NO_P Parameter: Timepoint (hr) Value: 6
  misc_feature: MA Experiment 108527 PARAMETER Experiment Name: Zm_5mM_NO_P Parameter: Tissue Value: Aerial
  misc_feature: MA Experiment 108527 PARAMETER Experiment Name: Zm_5mM_NO_P Parameter: Treatment Value: 5mM NO vs. No Treatment
  misc_feature: MA Experiment ID: 108529 Result: Up-regulated in Transcription
  misc_feature: MA Experiment 108529 PARAMETER Experiment Name: Zm_Imbibed_Seeds_P Parameter: Age (day) Value: 5 vs. 2
  misc_feature: MA Experiment 108529 PARAMETER Experiment Name: Zm_Imbibed_Seeds_P Parameter: Organism Value: Zea mays
  misc_feature: MA Experiment 108529 PARAMETER Experiment Name: Zm_Imbibed_Seeds_P Parameter: Plant Line Value: 35A19
  misc_feature: MA Experiment 108529 PARAMETER Experiment Name: Zm_Imbibed_Seeds_P Parameter: Tissue Value: Roots vs. Embryo
  misc_feature: MA Experiment ID: 108535 Result: Down-regulated in Transcription
  misc_feature: MA Experiment 108535 PARAMETER Experiment Name: Zm_Meristem_P Parameter: Age (day) Value: 8
  misc_feature: MA Experiment 108535 PARAMETER Experiment Name: Zm_Meristem_P Parameter: Organism Value: Zea mays
  misc_feature: MA Experiment 108535 PARAMETER Experiment Name: Zm_Meristem_P Parameter: Plant Line Value: 35A19
  misc_feature: MA Experiment 108535 PARAMETER Experiment Name: Zm_Meristem_P Parameter: Tissue Value: Root Meristem vs. Above Root Meristem
  misc_feature: MA Experiment ID: 108543 Result: Up-regulated in Transcription
  misc_feature: MA Experiment ID: 108545 Result: Down-regulated in Transcription
  misc_feature: MA Experiment 108545 PARAMETER Experiment Name: Zm_Imbibed_Seeds_P Parameter: Age (day) Value: 3 vs. 2
  misc_feature: MA Experiment 108545 PARAMETER Experiment Name: Zm_Imbibed_Seeds_P Parameter: Organism Value: Zea mays
  misc_feature: MA Experiment 108545 PARAMETER Experiment Name: Zm_Imbibed_Seeds_P Parameter: Plant Line Value: 35A19
  misc_feature: MA Experiment 108545 PARAMETER Experiment Name: Zm_Imbibed_Seeds_P Parameter: Tissue Value: Aerial vs. Embryo
  misc_feature: MA Experiment ID: 108546 Result: Up-regulated in Transcription
  misc_feature: MA Experiment 108546 PARAMETER Experiment Name: Zm_Imbibed_Seeds_P Parameter: Age (day) Value: 3 vs. 2
  misc_feature: MA Experiment 108546 PARAMETER Experiment Name: Zm_Imbibed_Seeds_P Parameter: Organism Value: Zea mays
  misc_feature: MA Experiment 108546 PARAMETER Experiment Name: Zm_Imbibed_Seeds_P Parameter: Plant Line Value: 35A19
  misc_feature: MA Experiment 108546 PARAMETER Experiment Name: Zm_Imbibed_Seeds_P Parameter: Tissue Value: Roots vs. Embryo
  misc_feature: MA Experiment ID: 108556 Result: Up-regulated in Transcription
  misc_feature: MA Experiment 108556 PARAMETER Experiment Name: Zm_Drought_P Parameter: Age (day) Value: 9
  misc_feature: MA Experiment 108556 PARAMETER Experiment Name: Zm_Drought_P Parameter: Organism Value: Zea mays
  misc_feature: MA Experiment 108556 PARAMETER Experiment Name: Zm_Drought_P Parameter: Plant Line Value: 35A19
  misc_feature: MA Experiment 108556 PARAMETER Experiment Name: Zm_Drought_P Parameter: Timepoint (hr) Value: 24
  misc_feature: MA Experiment 108556 PARAMETER Experiment Name: Zm_Drought_P Parameter: Tissue Value: Aerial
  misc_feature: MA Experiment 108556 PARAMETER Experiment Name: Zm_Drought_P Parameter: Treatment Value: Drought vs. No Drought
  misc_feature: MA Experiment ID: 108559 Result: Up-regulated in Transcription
  misc_feature: MA Experiment 108559 PARAMETER Experiment Name: Zm_5mM_NO_P Parameter: Age (day) Value: 8
  misc_feature: MA Experiment 108559 PARAMETER Experiment Name: Zm_5mM_NO_P Parameter: Organism Value: Zea mays
  misc_feature: MA Experiment 108559 PARAMETER Experiment Name: Zm_5mM_NO_P Parameter: Plant Line Value: 35A19
  misc_feature: MA Experiment 108559 PARAMETER Experiment Name: Zm_5mM_NO_P Parameter: Timepoint (hr) Value: 12
  misc_feature: MA Experiment 108559 PARAMETER Experiment Name: Zm_5mM_NO_P Parameter: Tissue Value: Aerial
  misc_feature: MA Experiment 108559 PARAMETER Experiment Name: Zm_5mM_NO_P Parameter: Treatment Value: 5mM NO vs. No Treatment
  misc_feature: MA Experiment ID: 20000477 Result: Up-regulated in Transcription
  misc_feature: MA Experiment 20000477 PARAMETER Experiment Name: Zm_5mM_SA_P Parameter: Age (day) Value: 10
  misc_feature: MA Experiment 20000477 PARAMETER Experiment Name: Zm_5mM_SA_P Parameter: Organism Value: Zea mays
  misc_feature: MA Experiment 20000477 PARAMETER Experiment Name: Zm_5mM_SA_P Parameter: Plant Line Value: 35A19
  misc_feature: MA Experiment 20000477 PARAMETER Experiment Name: Zm_5mM_SA_P Parameter: Timepoint (hr) Value: 48
  misc_feature: MA Experiment 20000477 PARAMETER Experiment Name: Zm_5mM_SA_P Parameter: Tissue Value: Aerial
  misc_feature: MA Experiment 20000477 PARAMETER Experiment Name: Zm_5mM_SA_P Parameter: Treatment Value: 5mM SA vs. No Treatment
  misc_feature: MA Experiment ID: 20000478 Result: Up-regulated in Transcription
  misc_feature: MA Experiment 20000478 PARAMETER Experiment Name: Zm_5mM_SA_P Parameter: Age (day) Value: 11
  misc_feature: MA Experiment 20000478 PARAMETER Experiment Name: Zm_5mM_SA_P Parameter: Organism Value: Zea mays
  misc_feature: MA Experiment 20000478 PARAMETER Experiment Name: Zm_5mM_SA_P Parameter: Plant Line Value: 35A19
  misc_feature: MA Experiment 20000478 PARAMETER Experiment Name: Zm_5mM_SA_P Parameter: Timepoint (hr) Value: 72
  misc_feature: MA Experiment 20000478 PARAMETER Experiment Name: Zm_5mM_SA_P Parameter: Tissue Value: Aerial
  misc_feature: MA Experiment 20000478 PARAMETER Experiment Name: Zm_5mM_SA_P Parameter: Treatment Value: 5mM SA vs. No Treatment
  misc_feature: MA Experiment ID: 20000480 Result: Up-regulated in Transcription
  misc_feature: MA Experiment 20000480 PARAMETER Experiment Name: Zm_Drought_P Parameter: Age (day) Value: 11
  misc_feature: MA Experiment 20000480 PARAMETER Experiment Name: Zm_Drought_P Parameter: Organism Value: Zea mays
  misc_feature: MA Experiment 20000480 PARAMETER Experiment Name: Zm_Drought_P Parameter: Plant Line Value: 35A19
  misc_feature: MA Experiment 20000480 PARAMETER Experiment Name: Zm_Drought_P Parameter: Timepoint (hr) Value: 72
  misc_feature: MA Experiment 20000480 PARAMETER Experiment Name: Zm_Drought_P Parameter: Tissue Value: Aerial
  misc_feature: MA Experiment 20000480 PARAMETER Experiment Name: Zm_Drought_P Parameter: Treatment Value: Drought vs. No Drought
  misc_feature: MA Experiment ID: 20000492 Result: Up-regulated in Transcription
  misc_feature: MA Experiment 20000492 PARAMETER Experiment Name: Zm_Hybrid_Seed_Dev_P Parameter: DAP Value: 12
  misc_feature: MA Experiment 20000492 PARAMETER Experiment Name: Zm_Hybrid_Seed_Dev_P Parameter: Organism Value: Zea mays
  misc_feature: MA Experiment 20000492 PARAMETER Experiment Name: Zm_Hybrid_Seed_Dev_P Parameter: Plant Line Value: 35A19
  misc_feature: MA Experiment 20000492 PARAMETER Experiment Name: Zm_Hybrid_Seed_Dev_P Parameter: Tissue Value: Fert Kernel vs. Unfert Floret
  misc_feature: MA Experiment ID: 20000532 Result: Up-regulated in Transcription
  misc_feature: MA Experiment 20000532 PARAMETER Experiment Name: Zm_0.001percent_MeJA_P Parameter: Age (day) Value: 10
  misc_feature: MA Experiment 20000532 PARAMETER Experiment Name: Zm_0.001percent_MeJA_P Parameter: Organism Value: Zea mays
  misc_feature: MA Experiment 20000532 PARAMETER Experiment Name: Zm_0.001percent_MeJA_P Parameter: Plant Line Value: 35A19
  misc_feature: MA Experiment 20000532 PARAMETER Experiment Name: Zm_0.001percent_MeJA_P Parameter: Timepoint (hr) Value: 48
  misc_feature: MA Experiment 20000532 PARAMETER Experiment Name: Zm_0.001percent_MeJA_P Parameter: Tissue Value: Aerial
  misc_feature: MA Experiment 20000532 PARAMETER Experiment Name: Zm_0.001percent_MeJA_P Parameter: Treatment Value: 0.001percent MeJA vs. No Treatment
  misc_feature: MA Experiment ID: 20000535 Result: Up-regulated in Transcription
  misc_feature: MA Experiment 20000535 PARAMETER Experiment Name: Zm_Hybrid_Seed_Dev_P Parameter: DAP Value: 30 vs. 12
  misc_feature: MA Experiment 20000535 PARAMETER Experiment Name: Zm_Hybrid_Seed_Dev_P Parameter: Organism Value: Zea mays
  misc_feature: MA Experiment 20000535 PARAMETER Experiment Name: Zm_Hybrid_Seed_Dev_P Parameter: Plant Line Value: 35A19
  misc_feature: MA Experiment 20000535 PARAMETER Experiment Name: Zm_Hybrid_Seed_Dev_P Parameter: Tissue Value: Embryo vs. Unfert Floret
  misc_feature: MA Experiment ID: 20000626 Result: Up-regulated in Transcription
  misc_feature: MA Experiment 20000626 PARAMETER Experiment Name: Zm_Herbicide-Treatments_P Parameter: Timepoint (hr) Value: 12
  misc_feature: MA Experiment 20000626 PARAMETER Experiment Name: Zm_Herbicide-Treatments_P Parameter: Tissue Value: Aerial
  misc_feature: MA Experiment 20000626 PARAMETER Experiment Name: Zm_Herbicide-Treatments_P Parameter: Treatment Value: Roundup vs. No Treatment
aactgcccaacaaacgatggccggcgtgtcagcaagcatcccgtgcgtggtgctcaacacgggccacgcgatgcccgtgctgggcttcgggaccggctcctccagcacgccggaggatctgccggcgaccatcctccacgccgtccgccttggctaccgccacatcgacacggcctccatgtacggcacggagggggcggtcggagccgccgtctccgacgccgtcgctgcgggggccgtcacctcccgcgctgacctcttcatcacctccaagctcgtgatgaaggacgcgcatccggaccgcgtgctccccgcgatccgggagtcgctggcccgcctaggcctggactacctcgacctcttcctcgtccactggcccgtcgccgccgacgagaacaacaagcccgtgccgttcgacatggaaggcgtctggcacgccatggaggagtgccaccgcatcggccttgctaggtccgtcggcgtcagcaacttctctgcggccaagatgtcccggctgctcgccttcgccgccgtaccgccggctgtgaaccaggtggaggtgaacgtcggctggcgtcaagagaaggtcagggaggcctgcgccaagaacggcgtcgtcgtcaccgccttctcgccgctgggcgcgatcggcacggcgtggggatccaacgccgtcatggaaagcggcgcgctggaggacatcgccgccaggagaggcaagaccattgctcaggtagcgttgaggtggcttcacgagcaaggggtgtgctttgtggcgaggagctttaacaaggagaggttgaagcaaaacatggagcttttcgattgggagttgagcgtcgatgacaaggagaagatcatggggattccacagaggagagcatgccgtgcagagttctttttgtcaccagacgggccgtacaagaccttggaggagctatgggacggggagatatgagataccatgtagctgttgtatctattgtttgtcgacatcgttgttgcttgctgctgtggggaaatatcttcggaatactctctgaatgaatgtggactaacagttggtcctgg

SEQ ID NO: 5952 - protein, 318 aa, Zea mays subsp. mays
  peptide (1)..(318): Ceres Seq. ID no. 12402572
  misc_feature (5)..(318): Homolog of NCBI NO: 21742554 NR Description: OSJNBb0089K06.1 [Oryza sativa (japonica
  misc_feature (13)..(318): Homolog of NCBI NO: 2792155 NR Description: chalcone reductase [Sesbania rostrata]
  misc_feature (21)..(318): Homolog of NCBI NO: 27357979 NR Description: Putative NADPH-dependent oxidoreductase [Oryza
  misc_feature (24)..(318): Homolog of NCBI NO: 37530522 NR Description: putative NADPH-dependent oxidoreductase [Oryza
  misc_feature (6)..(318): Homolog of NCBI NO: 40781599 NR Description: reductase 1 [Hydrangea macrophylla]
  misc_feature (7)..(318): Homolog of NCBI NO: 37530540 NR Description: putative NADPH-dependent oxidoreductase [Oryza
  misc_feature (24)..(316): Homolog of NCBI NO: 37530524 NR Description: putative NADPH-dependent oxidoreductase [Oryza
  misc_feature (13)..(318): Homolog of NCBI NO: 6478216 NR Description: putative NADPH-dependent oxidoreductase [Papaver
  misc_feature (12)..(317): Homolog of NCBI NO: 40781598 NR Description: reductase 2 [Hydrangea macrophylla]
  misc_feature (12)..(318): Homolog of NCBI NO: 15218960 NR Description: aldo/keto reductase, putative; protein id: supported by cDNA: gi_15451097, supported by cDNA: gi_18377507 thaliana] >gi|25283478|pir||H96623 probable Aldo/keto reductase
TAQQTMAGVSASIPCVVLNTGHAMPVLGFGTGSSSTPEDLPATILHAVRLGYRHIDTASMYGTEGAVGAAVSDAVAAGAVTSRADLFITSKLVMKDAHPDRVLPAIRESLARLGLDYLDLFLVHWPVAADENNKPVPFDMEGVWHAMEECHRIGLARSVGVSNFSAAKMSRLLAFAAVPPAVNQVEVNVGWRQEKVREACAKNGVVVTAFSPLGAIGTAWGSNAVMESGALEDIAARRGKTIAQVALRWLHEQGVCFVARSFNKERLKQNMELFDWELSVDDKEKIMGIPQRRACRAEFFLSPDGPYKTLEELWDGEI

SEQ ID NO: 5953 - protein, 313 aa, Zea mays subsp. mays
  peptide (1)..(313): Ceres Seq. ID no. 12402573
  misc_feature (1)..(313): Homolog of NCBI NO: 21742554 NR Description: OSJNBb0089K06.1 [Oryza sativa (japonica
  misc_feature (8)..(313): Homolog of NCBI NO: 2792155 NR Description: chalcone reductase [Sesbania rostrata]
  misc_feature (16)..(313): Homolog of NCBI NO: 27357979 NR Description: Putative NADPH-dependent oxidoreductase [Oryza
  misc_feature (19)..(313): Homolog of NCBI NO: 37530522 NR Description: putative NADPH-dependent oxidoreductase [Oryza
  misc_feature (1)..(313): Homolog of NCBI NO: 40781599 NR Description: reductase 1 [Hydrangea macrophylla]
  misc_feature (2)..(313): Homolog of NCBI NO: 37530540 NR Description: putative NADPH-dependent oxidoreductase [Oryza
  misc_feature (19)..(311): Homolog of NCBI NO: 37530524 NR Description: putative NADPH-dependent oxidoreductase [Oryza
  misc_feature (8)..(313): Homolog of NCBI NO: 6478216 NR Description: putative NADPH-dependent oxidoreductase [Papaver
  misc_feature (7)..(312): Homolog of NCBI NO: 40781598 NR Description: reductase 2 [Hydrangea macrophylla]
  misc_feature (7)..(313): Homolog of NCBI NO: 15218960 NR Description: aldo/keto reductase, putative; protein id: supported by cDNA: gi_15451097, supported by cDNA: gi_18377507 thaliana] >gi|25283478|pir||H96623 probable Aldo/keto reductase
MAGVSASIPCVVLNTGHAMPVLGFGTGSSSTPEDLPATILHAVRLGYRHIDTASMYGTEGAVGAAVSDAVAAGAVTSRADLFITSKLVMKDAHPDRVLPAIRESLARLGLDYLDLFLVHWPVAADENNKPVPFDMEGVWHAMEECHRIGLARSVGVSNFSAAKMSRLLAFAAVPPAVNQVEVNVGWRQEKVREACAKNGVVVTAFSPLGAIGTAWGSNAVMESGALEDIAARRGKTIAQVALRWLHEQGVCFVARSFNKERLKQNMELFDWELSVDDKEKIMGIPQRRACRAEFFLSPDGPYKTLEELWDGEI

SEQ ID NO: 5954 - protein, 295 aa, Zea mays subsp. mays
  peptide (1)..(295): Ceres Seq. ID no. 12402574
  misc_feature (1)..(295): Homolog of NCBI NO: 21742554 NR Description: OSJNBb0089K06.1 [Oryza sativa (japonica
  misc_feature (1)..(295): Homolog of NCBI NO: 2792155 NR Description: chalcone reductase [Sesbania rostrata]
  misc_feature (1)..(295): Homolog of NCBI NO: 27357979 NR Description: Putative NADPH-dependent oxidoreductase [Oryza
  misc_feature (1)..(295): Homolog of NCBI NO: 37530522 NR Description: putative NADPH-dependent oxidoreductase [Oryza
  misc_feature (1)..(295): Homolog of NCBI NO: 40781599 NR Description: reductase 1 [Hydrangea macrophylla]
  misc_feature (1)..(295): Homolog of NCBI NO: 37530540 NR Description: putative NADPH-dependent oxidoreductase [Oryza
  misc_feature (1)..(293): Homolog of NCBI NO: 37530524 NR Description: putative NADPH-dependent oxidoreductase [Oryza
  misc_feature (1)..(295): Homolog of NCBI NO: 6478216 NR Description: putative NADPH-dependent oxidoreductase [Papaver
  misc_feature (1)..(294): Homolog of NCBI NO: 40781598 NR Description: reductase 2 [Hydrangea macrophylla]
  misc_feature (1)..(295): Homolog of NCBI NO: 15218960 NR Description: aldo/keto reductase, putative; protein id: supported by cDNA: gi_15451097, supported by cDNA: gi_18377507 thaliana] >gi|25283478|pir||H96623 probable Aldo/keto reductase
MPVLGFGTGSSSTPEDLPATILHAVRLGYRHIDTASMYGTEGAVGAAVSDAVAAGAVTSRADLFITSKLVMKDAHPDRVLPAIRESLARLGLDYLDLFLVHWPVAADENNKPVPFDMEGVWHAMEECHRIGLARSVGVSNFSAAKMSRLLAFAAVPPAVNQVEVNVGWRQEKVREACAKNGVVVTAFSPLGAIGTAWGSNAVMESGALEDIAARRGKTIAQVALRWLHEQGVCFVARSFNKERLKQNMELFDWELSVDDKEKIMGIPQRRACRAEFFLSPDGPYKTLEELWDGEI

SEQ ID NO: 5955 - DNA, 481 bp, Zea mays subsp. mays
  misc_feature (1)..(481): Ceres Seq. ID no. 1404853
  misc_feature: MA Experiment ID: 108556 Result: Up-regulated in Transcription
  misc_feature: MA Experiment 108556 PARAMETER Experiment Name: Zm_Drought_P Parameter: Age (day) Value: 9
  misc_feature: MA Experiment 108556 PARAMETER Experiment Name: Zm_Drought_P Parameter: Organism Value: Zea mays
  misc_feature: MA Experiment 108556 PARAMETER Experiment Name: Zm_Drought_P Parameter: Plant Line Value: 35A19
  misc_feature: MA Experiment 108556 PARAMETER Experiment Name: Zm_Drought_P Parameter: Timepoint (hr) Value: 24
  misc_feature: MA Experiment 108556 PARAMETER Experiment Name: Zm_Drought_P Parameter: Tissue Value: Aerial
  misc_feature: MA Experiment 108556 PARAMETER Experiment Name: Zm_Drought_P Parameter: Treatment Value: Drought vs. No Drought
  misc_feature: MA Experiment ID: 108689 Result: Up-regulated in Transcription
  misc_feature: MA Experiment 108689 PARAMETER Experiment Name: Zm_Drought_Roots_P Parameter: Age (day) Value: 9
  misc_feature: MA Experiment 108689 PARAMETER Experiment Name: Zm_Drought_Roots_P Parameter: Organism Value: Zea mays
  misc_feature: MA Experiment 108689 PARAMETER Experiment Name: Zm_Drought_Roots_P Parameter: Plant Line Value: 35A19
  misc_feature: MA Experiment 108689 PARAMETER Experiment Name: Zm_Drought_Roots_P Parameter: Timepoint (hr) Value: 24
  misc_feature: MA Experiment 108689 PARAMETER Experiment Name: Zm_Drought_Roots_P Parameter: Tissue Value: Roots
  misc_feature: MA Experiment 108689 PARAMETER Experiment Name: Zm_Drought_Roots_P Parameter: Treatment Value: Drought vs. No Drought
  misc_feature: MA Experiment ID: 20000477 Result: Up-regulated in Transcription
  misc_feature: MA Experiment 20000477 PARAMETER Experiment Name: Zm_5mM_SA_P Parameter: Age (day) Value: 10
  misc_feature: MA Experiment 20000477 PARAMETER Experiment Name: Zm_5mM_SA_P Parameter: Organism Value: Zea mays
  misc_feature: MA Experiment 20000477 PARAMETER Experiment Name: Zm_5mM_SA_P Parameter: Plant Line Value: 35A19
  misc_feature: MA Experiment 20000477 PARAMETER Experiment Name: Zm_5mM_SA_P Parameter: Timepoint (hr) Value: 48
  misc_feature: MA Experiment 20000477 PARAMETER Experiment Name: Zm_5mM_SA_P Parameter: Tissue Value: Aerial
  misc_feature: MA Experiment 20000477 PARAMETER Experiment Name: Zm_5mM_SA_P Parameter: Treatment Value: 5mM SA vs. No Treatment
  misc_feature: MA Experiment ID: 20000478 Result: Up-regulated in Transcription
  misc_feature: MA Experiment 20000478 PARAMETER Experiment Name: Zm_5mM_SA_P Parameter: Age (day) Value: 11
  misc_feature: MA Experiment 20000478 PARAMETER Experiment Name: Zm_5mM_SA_P Parameter: Organism Value: Zea mays
  misc_feature: MA Experiment 20000478 PARAMETER Experiment Name: Zm_5mM_SA_P Parameter: Plant Line Value: 35A19
  misc_feature: MA Experiment 20000478 PARAMETER Experiment Name: Zm_5mM_SA_P Parameter: Timepoint (hr) Value: 72
  misc_feature: MA Experiment 20000478 PARAMETER Experiment Name: Zm_5mM_SA_P Parameter: Tissue Value: Aerial
  misc_feature: MA Experiment 20000478 PARAMETER Experiment Name: Zm_5mM_SA_P Parameter: Treatment Value: 5mM SA vs. No Treatment
  misc_feature: MA Experiment ID: 20000480 Result: Up-regulated in Transcription
  misc_feature: MA Experiment 20000480 PARAMETER Experiment Name: Zm_Drought_P Parameter: Age (day) Value: 11
  misc_feature: MA Experiment 20000480 PARAMETER Experiment Name: Zm_Drought_P Parameter: Organism Value: Zea mays
  misc_feature: MA Experiment 20000480 PARAMETER Experiment Name: Zm_Drought_P Parameter: Plant Line Value: 35A19
  misc_feature: MA Experiment 20000480 PARAMETER Experiment Name: Zm_Drought_P Parameter: Timepoint (hr) Value: 72
  misc_feature: MA Experiment 20000480 PARAMETER Experiment Name: Zm_Drought_P Parameter: Tissue Value: Aerial
  misc_feature: MA Experiment 20000480 PARAMETER Experiment Name: Zm_Drought_P Parameter: Treatment Value: Drought vs. No Drought
gccaattggacctttccaattacaagatgtgtctggatatggagtgggcttgacagtaaaggacatctacgcagctgcctttggagaacgaaatttcagctctgagttgatggatttgatggtacagaatgggcggcatggaaagagtaatggcaaaggctattacatttatatgaagggtgagaagccaaagcctgaccctagtgttcagcatgtgattgaggagtaccgaaaacgtgtgaagataatgcctggtggaaagcctgtgacattaacagatcaagacatattggagatgattttbttcccagttgtgaatgaggcatgtagggttatggatgaaaatgttgtgattcgggcttctgatcttgatattgcatctgtccttggaatgggttttcccaagtacaggggtggcctcgttttctgggctgacactgttggggcacttatatacattcaaagctaagcaagtgggctg

SEQ ID NO: 5956 - protein, 155 aa, Zea mays subsp. mays
  peptide (1)..(155): Ceres Seq. ID no. 1404854
  misc_feature (1)..(57): Pfam Name: 3-hydroxyacyl-CoA dehydrogenase, C-terminal domain Pfam Description: 3-hydroxyacyl-CoA dehydrogenase, C-terminal
  misc_feature (1)..(155): Homolog of NCBI NO: 39931684 NR Description: Peroxisomal fatty acid beta-oxidation
  misc_feature (1)..(148): Homolog of NCBI NO: 15235527 NR Description: AIM1 protein; protein id: At4g29010.1, supported cDNA: gi_16648890, supported by cDNA: gi_18175605, supported by gi_20465648 [Arabidopsis thaliana] >gi|7436974|pir||T08956 AIM1
  misc_feature (1)..(149): Homolog of NCBI NO: 34895142 NR Description: putative tetrafunctional protein of glyoxysomal
  misc_feature (1)..(155): Homolog of NCBI NO: 551444 NR Description: protein MFP-b [Cucumis sativus]
  misc_feature (1)..(155): Homolog of NCBI NO: 34922495 NR Description: Glyoxysomal fatty acid beta-oxidation
  misc_feature (1)..(155): Homolog of NCBI NO: 15231317 NR Description: fatty acid multifunctional protein (AtMFP2); id: At3g06860.1, supported by cDNA: gi_17065089, supported by gi_4337026 [Arabidopsis thaliana] >gi|4337027|gb|AAD18042.1| MFP2
  misc_feature (1)..(155): Homolog of NCBI NO: 34922417 NR Description: Glyoxysomal fatty acid beta-oxidation
  misc_feature (1)..(149): Homolog of NCBI NO: 34897626 NR Description: putative tetrafunctional protein for glyoxysomal
  misc_feature (1)..(148): Homolog of NCBI NO: 27382932 NR Description: bll7821 [Bradyrhizobium japonicum]
  misc_feature (1)..(148): Homolog of NCBI NO: 22960932 NR Description: hypothetical protein [Rhodopseudomonas palustris]
  misc_feature (101)..(101): Xaa is any aa, unknown or other
PIGPFQLQDVSGYGVGLTVKDIYAAAFGERNFSSELMDLMVQNGRHGKSNGKGYYIYMKGEKPKPDPSVQHVIEEYRKRVKIMPGGKPVTLTDQDILEMIXFPVVNEACRVMDENVVIRASDLDIASVLGMGFPKYRGGLVFWADTVGALIYIQS

SEQ ID NO: 5957 - protein, 119 aa, Zea mays subsp. mays
  peptide (1)..(119): Ceres Seq. ID no. 1404855
  misc_feature (1)..(119): Homolog of NCBI NO: 39931684 NR Description: Peroxisomal fatty acid beta-oxidation
  misc_feature (1)..(112): Homolog of NCBI NO: 15235527 NR Description: AIM1 protein; protein id: At4g29010.1, supported cDNA: gi_16648890, supported by cDNA: gi_18175605, supported by gi_20465648 [Arabidopsis thaliana] >gi|7436974|pir||T08956 AIM1
  misc_feature (1)..(113): Homolog of NCBI NO: 34895142 NR Description: putative tetrafunctional protein of glyoxysomal
  misc_feature (1)..(119): Homolog of NCBI NO: 551444 NR Description: protein MFP-b [Cucumis sativus]
  misc_feature (1)..(119): Homolog of NCBI NO: 34922495 NR Description: Glyoxysomal fatty acid beta-oxidation
  misc_feature (1)..(119): Homolog of NCBI NO: 15231317 NR Description: fatty acid multifunctional protein (AtMFP2); id: At3g06860.1, supported by cDNA: gi_17065089, supported by gi_4337026 [Arabidopsis thaliana] >gi|4337027|gb|AAD18042.1| MFP2
  misc_feature (1)..(119): Homolog of NCBI NO: 34922417 NR Description: Glyoxysomal fatty acid beta-oxidation
  misc_feature (1)..(113): Homolog of NCBI NO: 34897626 NR Description: putative tetrafunctional protein for glyoxysomal
  misc_feature (1)..(112): Homolog of NCBI NO: 27382932 NR Description: bll7821 [Bradyrhizobium japonicum]
  misc_feature (1)..(112): Homolog of NCBI NO: 22960932 NR Description: hypothetical protein [Rhodopseudomonas palustris]
  misc_feature (65)..(65): Xaa is any aa, unknown or other
MDLMVQNGRHGKSNGKGYYIYMKGEKPKPDPSVQHVIEEYRKRVKIMPGGKPVTLTDQDILEMIXFPVVNEACRVMDENVVIRASDLDIASVLGMGFPKYRGGLVFWADTVGALIYIQS

SEQ ID NO: 5958 - protein, 116 aa, Zea mays subsp. mays
  peptide (1)..(116): Ceres Seq. ID no. 1404856
  misc_feature (1)..(116): Homolog of NCBI NO: 39931684 NR Description: Peroxisomal fatty acid beta-oxidation
  misc_feature (1)..(109): Homolog of NCBI NO: 15235527 NR Description: AIM1 protein; protein id: At4g29010.1, supported cDNA: gi_16648890, supported by cDNA: gi_18175605, supported by gi_20465648 [Arabidopsis thaliana] >gi|7436974|pir||T08956 AIM1
  misc_feature (1)..(110): Homolog of NCBI NO: 34895142 NR Description: putative tetrafunctional protein of glyoxysomal
  misc_feature (1)..(116): Homolog of NCBI NO: 551444 NR Description: protein MFP-b [Cucumis sativus]
  misc_feature (1)..(116): Homolog of NCBI NO: 34922495 NR Description: Glyoxysomal fatty acid beta-oxidation
  misc_feature (1)..(116): Homolog of NCBI NO: 15231317 NR Description: fatty acid multifunctional protein (AtMFP2); id: At3g06860.1, supported by cDNA: gi_17065089, supported by gi_4337026 [Arabidopsis thaliana] >gi|4337027|gb|AAD18042.1| MFP2
  misc_feature (1)..(116): Homolog of NCBI NO: 34922417 NR Description: Glyoxysomal fatty acid beta-oxidation
  misc_feature (1)..(110): Homolog of NCBI NO: 34897626 NR Description: putative tetrafunctional protein for glyoxysomal
  misc_feature (1)..(109): Homolog of NCBI NO: 27382932 NR Description: bll7821 [Bradyrhizobium japonicum]
  misc_feature (1)..(109): Homolog of NCBI NO: 22960932 NR Description: hypothetical protein [Rhodopseudomonas palustris]
  misc_feature (62)..(62): Xaa is any aa, unknown or other
MVQNGRHGKSNGKGYYIYMKGEKPKPDPSVQHVIEEYRKRVKIMPGGKPVTLTDQDILEMIXFPVVNEACRVMDENVVIRASDLDIASVLGMGFPKYRGGLVFWADTVGALIYIQS

SEQ ID NO: 5959 - DNA, 1198 bp, Zea mays subsp. mays
  misc_feature (1)..(1198): Ceres Seq. ID no. 12373616
  misc_feature: MA Experiment ID: 108523 Result: Down-regulated in Transcription
  misc_feature: MA Experiment 108523 PARAMETER Experiment Name: Zm_42deg_Heat_P Parameter: Age (day) Value: 8
  misc_feature: MA Experiment 108523 PARAMETER Experiment Name: Zm_42deg_Heat_P Parameter: Organism Value: Zea mays
  misc_feature: MA Experiment 108523 PARAMETER Experiment Name: Zm_42deg_Heat_P Parameter: Plant Line Value: 35A19
  misc_feature: MA Experiment 108523 PARAMETER Experiment Name: Zm_42deg_Heat_P Parameter: Temperature (deg C) Value: 42 vs. 22
  misc_feature: MA Experiment 108523 PARAMETER Experiment Name: Zm_42deg_Heat_P Parameter: Timepoint (hr) Value: 6
  misc_feature: MA Experiment 108523 PARAMETER Experiment Name: Zm_42deg_Heat_P Parameter: Tissue Value: Aerial
  misc_feature: MA Experiment ID: 108528 Result: Up-regulated in Transcription
  misc_feature: MA Experiment 108528 PARAMETER Experiment Name: Zm_Imbibed_Seeds_P Parameter: Age (day) Value: 5 vs. 2
  misc_feature: MA Experiment 108528 PARAMETER Experiment Name: Zm_Imbibed_Seeds_P Parameter: Organism Value: Zea mays
  misc_feature: MA Experiment 108528 PARAMETER Experiment Name: Zm_Imbibed_Seeds_P Parameter: Plant Line Value: 35A19
  misc_feature: MA Experiment 108528 PARAMETER Experiment Name: Zm_Imbibed_Seeds_P Parameter: Tissue Value: Aerial vs. Embryo
  misc_feature: MA Experiment ID: 108530 Result: Up-regulated in Transcription
  misc_feature: MA Experiment 108530 PARAMETER Experiment Name: Zm_Imbibed_Seeds_P Parameter: Age (day) Value: 6 vs. 2
  misc_feature: MA Experiment 108530 PARAMETER Experiment Name: Zm_Imbibed_Seeds_P Parameter: Organism Value: Zea mays
  misc_feature: MA Experiment 108530 PARAMETER Experiment Name: Zm_Imbibed_Seeds_P Parameter: Plant Line Value: 35A19
  misc_feature: MA Experiment 108530 PARAMETER Experiment Name: Zm_Imbibed_Seeds_P Parameter: Tissue Value: Aerial vs. Embryo
  misc_feature: MA Experiment ID: 108534 Result: Down-regulated in Transcription
  misc_feature: MA Experiment 108534 PARAMETER Experiment Name: Zm_4deg_Cold_P Parameter: Age (hr) Value: 8
  misc_feature: MA Experiment 108534 PARAMETER Experiment Name: Zm_4deg_Cold_P Parameter: Organism Value: Zea mays
  misc_feature: MA Experiment 108534 PARAMETER Experiment Name: Zm_4deg_Cold_P Parameter: Plant Line Value: 35A19
  misc_feature: MA Experiment 108534 PARAMETER Experiment Name: Zm_4deg_Cold_P Parameter: Temperature (deg C) Value: 4 vs. 22
  misc_feature: MA Experiment 108534 PARAMETER Experiment Name: Zm_4deg_Cold_P Parameter: Timepoint (hr) Value: 6
  misc_feature: MA Experiment 108534 PARAMETER Experiment Name: Zm_4deg_Cold_P Parameter: Tissue Value: Aerial
  misc_feature: MA Experiment ID: 108547 Result: Up-regulated in Transcription
  misc_feature: MA Experiment 108547 PARAMETER Experiment Name: Zm_Imbibed_Seeds_P Parameter: Age (day) Value: 4 vs. 2
  misc_feature: MA Experiment 108547 PARAMETER Experiment Name: Zm_Imbibed_Seeds_P Parameter: Organism Value: Zea mays
  misc_feature: MA Experiment 108547 PARAMETER Experiment Name: Zm_Imbibed_Seeds_P Parameter: Plant Line Value: 35A19
  misc_feature: MA Experiment 108547 PARAMETER Experiment Name: Zm_Imbibed_Seeds_P Parameter: Tissue Value: Aerial vs. Embryo
  misc_feature: MA Experiment ID: 20000626 Result: Up-regulated in Transcription
  misc_feature: MA Experiment 20000626 PARAMETER Experiment Name: Zm_Herbicide-Treatments_P Parameter: Timepoint (hr) Value: 12
  misc_feature: MA Experiment 20000626 PARAMETER Experiment Name: Zm_Herbicide-Treatments_P Parameter: Tissue Value: Aerial
  misc_feature: MA Experiment 20000626 PARAMETER Experiment Name: Zm_Herbicide-Treatments_P Parameter: Treatment Value: Roundup vs. No Treatment
gaagcagtcgtacttgtacactccttgtctccttcgctttggcacactggacacgtccaccacgtgaacacgtcaacagaagtgacccatcaaggggcccacaggtccacgagcccgagtgacgactgacgacagatcgcttgtgcgtcgctaacccgccgctagtcggctagtgggtgggaaatccgcagattcccgtcgctacttcggccacatggctgcagcggcggcgtggaccggcgccgcatcccccaactcgctgctgctctcgcgctcgcctccccacgccgccgcgctcgcgccttcgccgggaagctccatgcggaggcggctcctcctcggcgtcggcaccccggccgtggcggcgctggcggccgcggcgccgccagcggtgctgcaggacggagcggtcactgtgctcatcaccgccggcgcctactctcttgtgcgcgtcttcgacgagctcaccgagcggcggctcatcgaaaagagcttgagcaggaaggttgtgcacgtgctatccggcgtcctgttcatgtcatcttggcccctgttcagcaattcgacagaagcacggtatttcgccgcggttgtcccgttcctgaactccatgaggcttctgatatatggactccgtctctacactgatgaagctctggtaaaatcagtgacacgtgaaggaaaaccagaggaattgctgagaggtccactctattatgtcctggtgctgctgttcagcgttttagtcttctggcgtgagtcccccatcgggatcgtctccttgtcgatgatgagcggtggcgatggttttgctgacattgttgggaggaggtatggctcagcgaagctgccattcaatcggaagaagagctgggccgggagcatctcgatgttcatttctggtttcctgctgtccgcgatgatgatgctctacttctcaagcctgggttacattgatgttatctgggaagaggcacttggtaagctggcgcttgttgcactagcagcgacagtagtggagtgcgttcctgtgactgaagttgtagatgacaacatatctgttcctttggccaccatgctggtagcttttctcttgtttagctccaaccgcacaatagttaattaaaatactactagtgcattatttaagacatgtgatgagttcttcagtgatgagttgtgcttacttttgcttcct

SEQ ID NO: 5960 - protein, 303 aa, Zea mays subsp. mays
  peptide (1)..(303): Ceres Seq. ID no. 12373617
  misc_feature (53)..(295): Homolog of NCBI NO: 21537252 NR Description: unknown [Arabidopsis thaliana]
  misc_feature (53)..(295): Homolog of NCBI NO: 15238184 NR Description: putative protein; protein id: At5g04490.1, by cDNA: 125255. [Arabidopsis thaliana] >gi|11290068|pir||T48445
  misc_feature (53)..(295): Homolog of NCBI NO: 28393229 NR Description: unknown protein [Arabidopsis thaliana]
  misc_feature (10)..(295): Homolog of NCBI NO: 34907982 NR Description: P0446G04.23 [Oryza sativa (japonica
  misc_feature (21)..(295): Homolog of NCBI NO: 15237702 NR Description: putative protein; protein id: At5g58560.1,
  misc_feature (21)..(295): Homolog of NCBI NO: 21593148 NR Description: unknown [Arabidopsis thaliana]
  misc_feature (21)..(248): Homolog of NCBI NO: 8843778 NR Description: emb|CAB85555.1~gene_id:MZN1.2~similar to unknown
  misc_feature (58)..(294): Homolog of NCBI NO: 21674801 NR Description: conserved hypothetical protein [Chlorobium TLS] >gi|21648018|gb|AAM73208.1| conserved hypothetical protein
  misc_feature (98)..(294): Homolog of NCBI NO: 28850457 NR Description: similar to Oryza sativa (japonica
  misc_feature (75)..(292): Homolog of NCBI NO: 11498907 NR Description: conserved hypothetical protein [Archaeoglobus
MAAAAAWTGAASPNSLLLSRSPPHAAALAPSPGSSMRRRLLLGVGTPAVAALAAAAPPAVLQDGAVTVLITAGAYSLVRVFDELTERRLIEKSLSRKVVHVLSGVLFMSSWPLFSNSTEARYFAAVVPFLNSMRLLIYGLRLYTDEALVKSVTREGKPEELLRGPLYYVLVLLFSVLVFWRESPIGIVSLSMMSGGDGFADIVGRRYGSAKLPFNRKKSWAGSISMFISGFLLSAMMMLYFSSLGYIDVIWEEALGKLALVALAATVVECVPVTEVVDDNISVPLATMLVAFLLFSSNRTIVN

SEQ ID NO: 5961 - protein, 268 aa, Zea mays subsp. mays
  peptide (1)..(268): Ceres Seq. ID no. 12373618
  misc_feature (18)..(260): Homolog of NCBI NO: 21537252 NR Description: unknown [Arabidopsis thaliana]
  misc_feature (18)..(260): Homolog of NCBI NO: 15238184 NR Description: putative protein; protein id: At5g04490.1, by cDNA: 125255. [Arabidopsis thaliana] >gi|11290068|pir||T48445
  misc_feature (18)..(260): Homolog of NCBI NO: 28393229 NR Description: unknown protein [Arabidopsis thaliana]
  misc_feature (1)..(260): Homolog of NCBI NO: 34907982 NR Description: P0446G04.23 [Oryza sativa (japonica
  misc_feature (1)..(260): Homolog of NCBI NO: 15237702 NR Description: putative protein; protein id: At5g58560.1,
  misc_feature (1)..(260): Homolog of NCBI NO: 21593148 NR Description: unknown [Arabidopsis thaliana]
  misc_feature (1)..(213): Homolog of NCBI NO: 8843778 NR Description: emb|CAB85555.1~gene_id:MZN1.2~similar to unknown
  misc_feature (23)..(259): Homolog of NCBI NO: 21674801 NR Description: conserved hypothetical protein [Chlorobium TLS] >gi|21648018|gb|AAM73208.1| conserved hypothetical protein
  misc_feature (63)..(259): Homolog of NCBI NO: 28850457 NR Description: similar to Oryza sativa (japonica
  misc_feature (40)..(257): Homolog of NCBI NO: 11498907 NR Description: conserved hypothetical protein [Archaeoglobus
MRRRLLLGVGTPAVAALAAAAPPAVLQDGAVTVLITAGAYSLVRVFDELTERRLIEKSLSRKVVHVLSGVLFMSSWPLFSNSTEARYFAAVVPFLNSMRLLIYGLRLYTDEALVKSVTREGKPEELLRGPLYYVLVLLFSVLVFWRESPIGIVSLSMMSGGDGFADIVGRRYGSAKLPFNRKKSWAGSISMFISGFLLSAMMMLYFSSLGYIDVIWEEALGKLALVALAATVVECVPVTEVVDDNISVPLATMLVAFLLFSSNRTIVN

SEQ ID NO: 5962 - protein, 196 aa, Zea mays subsp. mays
  peptide (1)..(196): Ceres Seq. ID no. 12373619
  misc_feature (1)..(188): Homolog of NCBI NO: 21537252 NR Description: unknown [Arabidopsis thaliana]
  misc_feature (1)..(188): Homolog of NCBI NO: 15238184 NR Description: putative protein; protein id: At5g04490.1, by cDNA: 125255. [Arabidopsis thaliana] >gi|11290068|pir||T48445
  misc_feature (1)..(188): Homolog of NCBI NO: 28393229 NR Description: unknown protein [Arabidopsis thaliana]
  misc_feature (1)..(188): Homolog of NCBI NO: 34907982 NR Description: P0446G04.23 [Oryza sativa (japonica
  misc_feature (1)..(188): Homolog of NCBI NO: 15237702 NR Description: putative protein; protein id: At5g58560.1,
  misc_feature (1)..(188): Homolog of NCBI NO: 21593148 NR Description: unknown [Arabidopsis thaliana]
  misc_feature (1)..(141): Homolog of NCBI NO: 8843778 NR Description: emb|CAB85555.1~gene_id:MZN1.2~similar to unknown
  misc_feature (1)..(187): Homolog of NCBI NO: 21674801 NR Description: conserved hypothetical protein [Chlorobium TLS] >gi|21648018|gb|AAM73208.1| conserved hypothetical protein
  misc_feature (1)..(187): Homolog of NCBI NO: 28850457 NR Description: similar to Oryza sativa (japonica
  misc_feature (1)..(185): Homolog of NCBI NO: 11498907 NR Description: conserved hypothetical protein [Archaeoglobus
MSSWPLFSNSTEARYFAAVVPFLNSMRLLIYGLRLYTDEALVKSVTREGKPEELLRGPLYYVLVLLFSVLVFWRESPIGIVSLSMMSGGDGFADIVGRRYGSAKLPFNRKKSWAGSISMFISGFLLSAMMMLYFSSLGYIDVIWEEALGKLALVALAATVVECVPVTEVVDDNISVPLATMLVAFLLFSSNRTIVN

SEQ ID NO: 5963 - DNA, 1315 bp, Zea mays subsp. mays
  misc_feature (1)..(1315): Ceres Seq. ID no. 12344153
  misc_feature: MA Experiment ID: 108535 Result: Down-regulated in Transcription
  misc_feature: MA Experiment 108535 PARAMETER Experiment Name: Zm_Meristem_P Parameter: Age (day) Value: 8
  misc_feature: MA Experiment 108535 PARAMETER Experiment Name: Zm_Meristem_P Parameter: Organism Value: Zea mays
  misc_feature: MA Experiment 108535 PARAMETER Experiment Name: Zm_Meristem_P Parameter: Plant Line Value: 35A19
  misc_feature: MA Experiment 108535 PARAMETER Experiment Name: Zm_Meristem_P Parameter: Tissue Value: Root Meristem vs. Above Root Meristem
accgaaaaaaaaattccccatgtgggaacgtggtggttgttcgcggggacggcgactggtacttttttgtcgctgcggagacggggagtcttccgactcttccccaacgggaattcctcactcacatccctacgcacgaacggaaacgccccgtgctgcgctcgcagtctcgcatggagtccaccactgctgctgctaccgcggcggcggcgccggcaccggtgctgctggtgacgaacgacgacggaatcgacgcgccggggctccgcttccttgtcgaccgtctcgtcgccgcagggcgataccgcgtactcgtctgcgcgcccgacacagacaaatcgggtgtgagccactgcatcacatggcgccctgcactccgctgtaaacgtgttgatataataggtgctacagcatttggagtttcaggaactcctgctgactgtgcttctttaggcatctctggaaaactatttgatggtttggttcctgatctggtacttagtggaatcaacattggaaataattgtgggtaccatgtcatttattctggaacagttgctggtgctagggaggcattcttatacgggattcctgcaatagctatgtcatatgattgggttgcgggtcggagcagtgttaatgacctcaaggtgtctgcagaggtctgcatgcctctgataaatgctatcgtgactgagatcaagaatgggacttaccctcaaggatcattcttgaatgtagatgtacctacagatgctgcgcaccacaagggctacaaaattacaaaacaaggaacatatatggcagaattagttgggagcagacggtttacaagaagcctgcagtagaaagttaccagacagcaaacatggatgttgatggtgaaaaggatagcgaactagttacttcagaaaatgacctactgtttaagagagtgattgtagggagaagttccaatggagtggaaggagaggaaacggaccataattccctagttgatggatatatcactgttactcctttgggtgctctttcccgcacagaaccagacgccataccctatttcaaagcttgtgtctcacgtctggttgataatttctcttctcctggctcttctttttctagaagcagaggatgagccatgaaatttctaaagctgtttatttatcgcaatgatcaagttccacactgctttttcctaccccataacattgttaccatacatgggcaatattgccattcttgctacctgaatgttattactgcaatcagcatgtgtattctgcttcatagcctatgtcagaattatgcattc

SEQ ID NO: 5964 - protein, 281 aa, Zea mays subsp. mays
  peptide (1)..(281): Ceres Seq. ID no. 12344154
  misc_feature (73)..(270): Pfam Name: Survival protein SurE Pfam Description: Survival protein SurE
  misc_feature (58)..(270): Homolog of NCBI NO: 33146601 NR Description: putative stationary phase survival protein SurE
  misc_feature (73)..(281): Homolog of NCBI NO: 18414342 NR Description: expressed protein; protein id: At4g14930.1, by cDNA: 38042. [Arabidopsis thaliana] unknown [Arabidopsis thaliana] >gi|27311791|gb|AAO00861.1|
  misc_feature (73)..(179): Homolog of NCBI NO: 7485145 NR Description: hypothetical protein - Arabidopsis thaliana hypothetical protein [Arabidopsis thaliana]
  misc_feature (180)..(256): Homolog of NCBI NO: 7485145 NR Description: hypothetical protein - Arabidopsis thaliana hypothetical protein [Arabidopsis thaliana]
  misc_feature (73)..(266): Homolog of NCBI NO: 15218620 NR Description: unknown protein; protein id: At1g72880.1
  misc_feature (73)..(179): Homolog of NCBI NO: 25406225 NR Description: hypothetical protein F3N23.8 [imported] - thaliana >gi|5903077|gb|AAD55635.1|AC008017_8 Unknown protein
  misc_feature (210)..(266): Homolog of NCBI NO: 25406225 NR Description: hypothetical protein F3N23.8 [imported] - thaliana >gi|5903077|gb|AAD55635.1|AC008017_8 Unknown protein
  misc_feature (75)..(264): Homolog of NCBI NO: 22996110 NR Description: hypothetical protein [Xylella fastidiosa Ann-1]
  misc_feature (75)..(264): Homolog of NCBI NO: 22995265 NR Description: hypothetical protein [Xylella fastidiosa Dixon] survival protein [Xylella fastidiosa Temecula1]
  misc_feature (73)..(264): Homolog of NCBI NO: 15606188 NR Description: stationary phase survival protein SurE [Aquifex >gi|7388270|sp|O67004|SURE_AQUAE Acid phosphatase surE
RKKNSPCGNVVVVRGDGDWYFFVAAETGSLPTLPQREFLTHIPTHERKRPVLRSQSRMESTTAAATAAAAPAPVLLVTNDDGIDAPGLRFLVDRLVAAGRYRVLVCAPDTDKSGVSHCITWRPALRCKRVDIIGATAFGVSGTPADCASLGISGKLFDGLVPDLVLSGINIGNNCGYHVIYSGTVAGAREAFLYGIPAIAMSYDWVAGRSSVNDLKVSAEVCMPLINAIVTEIKNGTYPQGSFLNVDVPTDAAHHKGYKITKQGTYMAELVGSRRFTRSLQ

SEQ ID NO: 5965 - protein, 224 aa, Zea mays subsp. mays
  peptide (1)..(224): Ceres Seq. ID no. 12344155
  misc_feature (16)..(213): Pfam Name: Survival protein SurE Pfam Description: Survival protein SurE
  misc_feature (1)..(213): Homolog of NCBI NO: 33146601 NR Description: putative stationary phase survival protein SurE
  misc_feature (16)..(224): Homolog of NCBI NO: 18414342 NR Description: expressed protein; protein id: At4g14930.1, by cDNA: 38042. [Arabidopsis thaliana] unknown [Arabidopsis thaliana] >gi|27311791|gb|AAO00861.1|
  misc_feature (16)..(122): Homolog of NCBI NO: 7485145 NR Description: hypothetical protein - Arabidopsis thaliana hypothetical protein [Arabidopsis thaliana]
  misc_feature (123)..(199): Homolog of NCBI NO: 7485145 NR Description: hypothetical protein - Arabidopsis thaliana hypothetical protein [Arabidopsis thaliana]
  misc_feature (16)..(209): Homolog of NCBI NO: 15218620 NR Description: unknown protein; protein id: At1g72880.1
  misc_feature (16)..(122): Homolog of NCBI NO: 25406225 NR Description: hypothetical protein F3N23.8 [imported] - thaliana >gi|5903077|gb|AAD55635.1|AC008017_8 Unknown protein
  misc_feature (153)..(209): Homolog of NCBI NO: 25406225 NR Description: hypothetical protein F3N23.8 [imported] - thaliana >gi|5903077|gb|AAD55635.1|AC008017_8 Unknown protein
  misc_feature (18)..(207): Homolog of NCBI NO: 22996110 NR Description: hypothetical protein [Xylella fastidiosa Ann-1]
  misc_feature (18)..(207): Homolog of NCBI NO: 22995265 NR Description: hypothetical protein [Xylella fastidiosa Dixon] survival protein [Xylella fastidiosa Temecula1]
  misc_feature (16)..(207): Homolog of NCBI NO: 15606188 NR Description: stationary phase survival protein SurE [Aquifex >gi|7388270|sp|O67004|SURE_AQUAE Acid phosphatase surE
MESTTAAATAAAAPAPVLLVTNDDGIDAPGLRFLVDRLVAAGRYRVLVCAPDTDKSGVSHCITWRPALRCKRVDIIGATAFGVSGTPADCASLGISGKLFDGLVPDLVLSGINIGNNCGYHVIYSGTVAGAREAFLYGIPAIAMSYDWVAGRSSVNDLKVSAEVCMPLINAIVTEIKNGTYPQGSFLNVDVPTDAAHHKGYKITKQGTYMAELVGSRRFTRSLQ

SEQ ID NO: 5966 - DNA, 1371 bp, Zea mays subsp. mays
  misc_feature (1)..(1371): Ceres Seq. ID no. 12373612
  misc_feature: MA Experiment ID: 108526 Result: Down-regulated in Transcription
  misc_feature: MA Experiment 108526 PARAMETER Experiment Name: Zm_5mM_NO_P Parameter: Age (day) Value: 8
  misc_feature: MA Experiment 108526 PARAMETER Experiment Name: Zm_5mM_NO_P Parameter: Organism Value: Zea mays
  misc_feature: MA Experiment 108526 PARAMETER Experiment Name: Zm_5mM_NO_P Parameter: Plant Line Value: 35A19
  misc_feature: MA Experiment 108526 PARAMETER Experiment Name: Zm_5mM_NO_P Parameter: Timepoint (hr) Value: 1
  misc_feature: MA Experiment 108526 PARAMETER Experiment Name: Zm_5mM_NO_P Parameter: Tissue Value: Aerial
  misc_feature: MA Experiment 108526 PARAMETER Experiment Name: Zm_5mM_NO_P Parameter: Treatment Value: 5mM NO vs. No Treatment
  misc_feature: MA Experiment ID: 108527 Result: Down-regulated in Transcription
  misc_feature: MA Experiment 108527 PARAMETER Experiment Name: Zm_5mM_NO_P Parameter: Age (day) Value: 8
  misc_feature: MA Experiment 108527 PARAMETER Experiment Name: Zm_5mM_NO_P Parameter: Organism Value: Zea mays
  misc_feature: MA Experiment 108527 PARAMETER Experiment Name: Zm_5mM_NO_P Parameter: Plant Line Value: 35A19
  misc_feature: MA Experiment 108527 PARAMETER Experiment Name: Zm_5mM_NO_P Parameter: Timepoint (hr) Value: 6
  misc_feature: MA Experiment 108527 PARAMETER Experiment Name: Zm_5mM_NO_P Parameter: Tissue Value: Aerial
  misc_feature: MA Experiment 108527 PARAMETER Experiment Name: Zm_5mM_NO_P Parameter: Treatment Value: 5mM NO vs. No Treatment
  misc_feature: MA Experiment ID: 108534 Result: Up-regulated in Transcription
  misc_feature: MA Experiment 108534 PARAMETER Experiment Name: Zm_4deg_Cold_P Parameter: Age (hr) Value: 8
  misc_feature: MA Experiment 108534 PARAMETER Experiment Name: Zm_4deg_Cold_P Parameter: Organism Value: Zea mays
  misc_feature: MA Experiment 108534 PARAMETER Experiment Name: Zm_4deg_Cold_P Parameter: Plant Line Value: 35A19
  misc_feature: MA Experiment 108534 PARAMETER Experiment Name: Zm_4deg_Cold_P Parameter: Temperature (deg C) Value: 4 vs. 22
  misc_feature: MA Experiment 108534 PARAMETER Experiment Name: Zm_4deg_Cold_P Parameter: Timepoint (hr) Value: 6
  misc_feature: MA Experiment 108534 PARAMETER Experiment Name: Zm_4deg_Cold_P Parameter: Tissue Value: Aerial
  misc_feature: MA Experiment ID: 108543 Result: Up-regulated in Transcription
  misc_feature: MA Experiment ID: 108687 Result: Down-regulated in Transcription
  misc_feature: MA Experiment 108687 PARAMETER Experiment Name: Zm_Embryos-Flowers__P Parameter: Tissue Value: Embryo vs. Aerial+
  misc_feature: MA Experiment ID: 108689 Result: Up-regulated in Transcription
  misc_feature: MA Experiment 108689 PARAMETER Experiment Name: Zm_Drought_Roots_P Parameter: Age (day) Value: 9
  misc_feature: MA Experiment 108689 PARAMETER Experiment Name: Zm_Drought_Roots_P Parameter: Organism Value: Zea mays
  misc_feature: MA Experiment 108689 PARAMETER Experiment Name: Zm_Drought_Roots_P Parameter: Plant Line Value: 35A19
  misc_feature: MA Experiment 108689 PARAMETER Experiment Name: Zm_Drought_Roots_P Parameter: Timepoint (hr) Value: 24
  misc_feature: MA Experiment 108689 PARAMETER Experiment Name: Zm_Drought_Roots_P Parameter: Tissue Value: Roots
  misc_feature: MA Experiment 108689 PARAMETER Experiment Name: Zm_Drought_Roots_P Parameter: Treatment Value: Drought vs. No Drought
  misc_feature: MA Experiment ID: 20000535 Result: Down-regulated in Transcription
  misc_feature: MA Experiment 20000535 PARAMETER Experiment Name: Zm_Hybrid_Seed_Dev_P Parameter: DAP Value: 30 vs. 12
  misc_feature: MA Experiment 20000535 PARAMETER Experiment Name: Zm_Hybrid_Seed_Dev_P Parameter: Organism Value: Zea mays
  misc_feature: MA Experiment 20000535 PARAMETER Experiment Name: Zm_Hybrid_Seed_Dev_P Parameter: Plant Line Value: 35A19
  misc_feature: MA Experiment 20000535 PARAMETER Experiment Name: Zm_Hybrid_Seed_Dev_P Parameter: Tissue Value: Embryo vs. Unfert Floret
tccgccttctgctctctctcgcctctggtgcgcagagctagctctcttgaagcctcgagactcgtctcgccgctgctctgctctgctccccagctctgccgctgcgtgcctgcgtcagttgttgcattgcagccagcgagccttgagctgctagctctctcttcaccacagttcacaggcatggagttcgaggatcgctgccacaaggtccaggagcccaagttcgactgcctgctcttcgacctcgacgacaccctgtatccgctgagctccgggatcgcgggccatgtcaagaagaacattgaagattacatggtcgagaagctgggtattgacgagagcaagatcgagaacctgggaaatctgctgtacaagaactacggcaccacgatggctggcctcagggcgatcggctacagcttcgattacgatgagtaccacgccttcgtccatggaaggctgccgtacgacaacatcaagcccgaccctgttctcaagcacattctcaagaacctgcccatccgcaaactcatattcaccaacggcgacaaggtccacgccgtgagagccctggagaggctgggcctggaggactgcttcgaggggatcatctgcttcgagaccctgaacccgccgtgcccgcctcagggagaccgggaggccgagatcttcgacatcgccggccacttcgcccgctccggcgccgccgccgagctgcccaagacccccgtcctgtgcaagcccaacgtcgacgccatggaggaggcgctcaggatcgccaacgtcaacccgcacaaggcgattttcttcgacgacagcgtacgcaacatccaggccgggaagcagatcggccttcacacagtgctggtgggcaagtcgcagcgggtgaaaggcgcggaccacgcgctggagagcatccacaacgtcagggaggcgctgccggggctgtgggaggaggccgagaaggcggaggacgtgctctacgccgagcgcgtcgccatggagacctcggtcaccgcgtaaacccctctctcgaatcctccggtgcaccgtcagcccaaccttctcgacatccaggaccgggacgatcgcataccactctctccccgagccagggctggtggtttcacgctggaactgaatccagccatggccgggccgagaatttccgacagcaagaaggggtgcagcatgtaaaggggggagcagatgatatcatgtttgggatgctcccagatatgtatagttatgtatcagccagttgtttgtaaattaccaataaatattagaagtaataagaaaaaatggagtttacttgtacgtttcttgtgctctgtcatctgaagtaataaaagcggttagcaagaatgg

SEQ ID NO: 5967 - protein, 340 aa, Zea mays subsp. mays
  peptide (1)..(340): Ceres Seq. ID no. 12373613
  misc_feature (75)..(293): Pfam Name: haloacid dehalogenase-like hydrolase Pfam Description: haloacid dehalogenase-like hydrolase
  misc_feature (61)..(211): Homolog of NCBI NO: 7406669 NR Description: putative ripening-related protein [Vitis vinifera]
  misc_feature (222)..(340): Homolog of NCBI NO: 7406669 NR Description: putative ripening-related protein [Vitis vinifera]
  misc_feature (61)..(340): Homolog of NCBI NO: 15241720 NR Description: putative protein; protein id: At5g02230.1, by cDNA: 36724. [Arabidopsis thaliana] >gi|11358409|pir||T48244
  misc_feature (61)..(340): Homolog of NCBI NO: 21593165 NR Description: unknown [Arabidopsis thaliana]
  misc_feature (61)..(336): Homolog of NCBI NO: 30697234 NR Description: haloacid dehalogenase-like hydrolase family
  misc_feature (61)..(336): Homolog of NCBI NO: 30697236 NR Description: haloacid dehalogenase-like hydrolase family
  misc_feature (61)..(336): Homolog of NCBI NO: 21618155 NR Description: putative ripening-related protein-like
  misc_feature (73)..(340): Homolog of NCBI NO: 8885554 NR Description: ripening-related protein-like; hydrolase-like
  misc_feature (73)..(340): Homolog of NCBI NO: 15238429 NR Description: putative ripening-related protein - like; protein
  misc_feature (70)..(340): Homolog of NCBI NO: 40714684 NR Description: expressed protein [Oryza sativa (japonica
SAFCSLSPLVRRASSLEASRLVSPLLCSAPQLCRCVPASVVALQPASLELLALSSPQFTGMEFEDRCHKVQEPKFDCLLFDLDDTLYPLSSGIAGHVKKNIEDYMVEKLGIDESKIENLGNLLYKNYGTTMAGLRAIGYSFDYDEYHAFVHGRLPYDNIKPDPVLKHILKNLPIRKLIFTNGDKVHAVRALERLGLEDCFEGIICFETLNPPCPPQGDREAEIFDIAGHFARSGAAAELPKTPVLCKPNVDAMEEALRIANVNPHKAIFFDDSVRNIQAGKQIGLHTVLVGKSQRVKGADHALESIHNVREALPGLWEEAEKAEDVLYAERVAMETSVTA

SEQ ID NO: 5968 - protein, 280 aa, Zea mays subsp. mays
  peptide (1)..(280): Ceres Seq. ID no. 12373614
  misc_feature (15)..(233): Pfam Name: haloacid dehalogenase-like hydrolase Pfam Description: haloacid dehalogenase-like hydrolase
  misc_feature (1)..(151): Homolog of NCBI NO: 7406669 NR Description: putative ripening-related protein [Vitis vinifera]
  misc_feature (162)..(280): Homolog of NCBI NO: 7406669 NR Description: putative ripening-related protein [Vitis vinifera]
  misc_feature (1)..(280): Homolog of NCBI NO: 15241720 NR Description: putative protein; protein id: At5g02230.1, by cDNA: 36724. [Arabidopsis thaliana] >gi|11358409|pir||T48244
  misc_feature (1)..(280): Homolog of NCBI NO: 21593165 NR Description: unknown [Arabidopsis thaliana]
  misc_feature (1)..(276): Homolog of NCBI NO: 30697234 NR Description: haloacid dehalogenase-like hydrolase family
  misc_feature (1)..(276): Homolog of NCBI NO: 30697236 NR Description: haloacid dehalogenase-like hydrolase family
  misc_feature (1)..(276): Homolog of NCBI NO: 21618155 NR Description: putative ripening-related protein-like
  misc_feature (13)..(280): Homolog of NCBI NO: 8885554 NR Description: ripening-related protein-like; hydrolase-like
  misc_feature (13)..(280): Homolog of NCBI NO: 15238429 NR Description: putative ripening-related protein - like; protein
  misc_feature (10)..(280): Homolog of NCBI NO: 40714684 NR Description: expressed protein [Oryza sativa (japonica
MEFEDRCHKVQEPKFDCLLFDLDDTLYPLSSGIAGHVKKNIEDYMVEKLGIDESKIENLGNLLYKNYGTTMAGLRAIGYSFDYDEYHAFVHGRLPYDNIKPDPVLKHILKNLPIRKLIFTNGDKVHAVRALERLGLEDCFEGIICFETLNPPCPPQGDREAEIFDIAGHFARSGAAAELPKTPVLCKPNVDAMEEALRIANVNPHKAIFFDDSVRNIQAGKQIGLHTVLVGKSQRVKGADHALESIHNVREALPGLWEEAEKAEDVLYAERVAMETSVTA

SEQ ID NO: 5969 - protein, 236 aa, Zea mays subsp. mays
  peptide (1)..(236): Ceres Seq. ID no. 12373615
  misc_feature (1)..(189): Pfam Name: haloacid dehalogenase-like hydrolase Pfam Description: haloacid dehalogenase-like hydrolase
  misc_feature (1)..(107): Homolog of NCBI NO: 7406669 NR Description: putative ripening-related protein [Vitis vinifera]
  misc_feature (118)..(236): Homolog of NCBI NO: 7406669 NR Description: putative ripening-related protein [Vitis vinifera]
  misc_feature (1)..(236): Homolog of NCBI NO: 15241720 NR Description: putative protein; protein id: At5g02230.1, by cDNA: 36724. [Arabidopsis thaliana] >gi|11358409|pir||T48244
  misc_feature (1)..(236): Homolog of NCBI NO: 21593165 NR Description: unknown [Arabidopsis thaliana]
  misc_feature (1)..(232): Homolog of NCBI NO: 30697234 NR Description: haloacid dehalogenase-like hydrolase family
  misc_feature (1)..(232): Homolog of NCBI NO: 30697236 NR Description: haloacid dehalogenase-like hydrolase family
  misc_feature (1)..(232): Homolog of NCBI NO: 21618155 NR Description: putative ripening-related protein-like
  misc_feature (1)..(236): Homolog of NCBI NO: 8885554 NR Description: ripening-related protein-like; hydrolase-like
  misc_feature (1)..(236): Homolog of NCBI NO: 15238429 NR Description: putative ripening-related protein - like; protein
  misc_feature (1)..(236): Homolog of NCBI NO: 40714684 NR Description: expressed protein [Oryza sativa (japonica
MVEKLGIDESKIENLGNLLYKNYGTTMAGLRAIGYSFDYDEYHAFVHGRLPYDNIKPDPVLKHILKNLPIRKLIFTNGDKVHAVRALERLGLEDCFEGIICFETLNPPCPPQGDREAEIFDIAGHFARSGAAAELPKTPVLCKPNVDAMEEALRIANVNPHKAIFFDDSVRNIQAGKQIGLHTVLVGKSQRVKGADHALESIHNVREALPGLWEEAEKAEDVLYAERVAMETSVTA

SEQ ID NO: 5970 - DNA, 1648 bp, Zea mays subsp. mays
  misc_feature (1)..(1648): Ceres Seq. ID no. 13496119
  misc_feature: MA Experiment ID: 20000492 Result: Up-regulated in Transcription
  misc_feature: MA Experiment 20000492 PARAMETER Experiment Name: Zm_Hybrid_Seed_Dev_P Parameter: DAP Value: 12
  misc_feature: MA Experiment 20000492 PARAMETER Experiment Name: Zm_Hybrid_Seed_Dev_P Parameter: Organism Value: Zea mays
  misc_feature: MA Experiment 20000492 PARAMETER Experiment Name: Zm_Hybrid_Seed_Dev_P Parameter: Plant Line Value: 35A19
  misc_feature: MA Experiment 20000492 PARAMETER Experiment Name: Zm_Hybrid_Seed_Dev_P Parameter: Tissue Value: Fert Kernel vs. Unfert Floret
ccgacctcccccttcctctccccctgccgctccccgcgccgagaaggagaaccccagccgccgcgcagcgcgccgcccatggcctcctcgtcggagaacgcggctgtgccgccggaggaggagccccaggccccgccgccgccggacacagagcctaccgaggcggcgcccggcgaggcggaggatgagccgcaaaccctagagcgggcgcaggagctcttcgacaggggttccaaggccatcgaggatgaggacttcgtcgacgccgtagactgtctcagccgagcgctcgagatcagggcttcacattatggagagctcgcaccggagtgtgccagcacatacttcaaatatggatgtgccctgctatacaaagctcaggaggagagtgatgttttgggaaatgttcccaagagcttgccaaatgaagactcagtgaagagtacagctactaaagatgacagtggaacctcaaaggtctctggtaccgatgcggaggatgctgcgtcatcagaaaaagttgatgctgaagaaggtcacaactcaaatggcaaaaatcaggagaatgggaatggtgaagttgagaaagatgatgacgacgtcgacgatgatgagaagatgggagatgaagaggataatgatttggatctttcttggaaaatgttggacattgctagggcaatagttgagaagagccaagataacactatggagaaagtaaaaatatattctgctcttgctgaagtggcaacggaaagagaggacatggacaactcactcagtgactatatgaaagctttatccatgttggagcatttggttgagcctgaccatcgtcgagttgtggaattaaacttccgcatttgtttggtttatgaactagtttccaagatcggagaagcaatttcatactgtgcaaaagcaatttcgctatgcaagtcacgcatacagagcctgaaaagttccaaggatgctttgttggctggtatagatggtgatgcatctgctgctgaagctgaaggaggctcagaaaaatctgccattgaaaaagagctagagcagcttactagcatattgcctgatcttgagaagaagcttgaggacctgtctgaagcaaacccaagcgctgacatggatgagatggtgaaggcaatcgtgtccagggtaactgatgtgatgccaaaagctgcatcttttacttcttcccagatggcaacctcaagcaatggattcgactcctcggttatgtctacggcagcgacaaccggaagctctggaagcaccgtgactgaccttggggttgtaggcagaggcgtcaaacgagctagcatcaagccgatctctgctgaacctgctgctaagaaacctgcacttgattcaccatctcaacaaggtgacagcagcatcaactctgaggttgttcctgcaacgcagactggagacgagtcagtatctaagtaaattacaatttcattagccctactgtaatgttaacttgctggaacatattagctgctatgtaaacgcttaagaagggactgctggggccatagactcatcgtgagctgaccattgaaatgttaaattgctgagatcatcatggcggtaaatcatgtctgctatatcaaatatgcttggtgagatgtgc

SEQ ID NO: 5971 - protein, 486 aa, Zea mays subsp. mays
  peptide (1)..(486): Ceres Seq. ID no. 13496120
  misc_feature (70)..(103): Pfam Name: TPR Domain Pfam Description: TPR Domain
  misc_feature (27)..(486): Homolog of NCBI NO: 38175649 NR Description: tetratricopeptide repeat-containing protein-like
  misc_feature (49)..(427): Homolog of NCBI NO: 18419996 NR Description: tetratricopeptide repeat (TPR)-containing protein thaliana] >gi|13877853|gb|AAK44004.1|AF370189_1 unknown protein thaliana] >gi|17065596|gb|AAL33778.1| unknown protein
  misc_feature (49)..(370): Homolog of NCBI NO: 25407799 NR Description: hypothetical protein AT4g37210 [imported] - thaliana >gi|4006859|emb|CAB16777.1| putative protein thaliana] >gi|7270704|emb|CAB80387.1| putative protein
  misc_feature (56)..(325): Homolog of NCBI NO: 4104353 NR Description: nuclear autoantigenic sperm protein autosomal
  misc_feature (54)..(131): Homolog of NCBI NO: 18129310 NR Description: hypothetical protein [Pinus pinaster]
  misc_feature (47)..(477): Homolog of NCBI NO: 123127 NR Description: HISTONE-BINDING PROTEIN N1/N2
  misc_feature (27)..(325): Homolog of NCBI NO: 13435642 NR Description: Nasp protein [Mus musculus]
  misc_feature (56)..(325): Homolog of NCBI NO: 27262630 NR Description: nuclear autoantigenic sperm protein isoform 3;
  misc_feature (56)..(325): Homolog of NCBI NO: 30584691 NR Description: Homo sapiens nuclear autoantigenic sperm protein
  misc_feature (10)..(474): Homolog of NCBI NO: 28277791 NR Description: Unknown (protein for MGC:56007) [Danio rerio]
PTSPFLSPCRSPRREGEPQPPRSAPPMASSSENAAVPPEEEPQAPPPPDTEPTEAAPGEAEDEPQTLERAQELFDRGSKAIEDEDFVDAVDCLSRALEIRASHYGELAPECASTYFKYGCALLYKAQEESDVLGNVPKSLPNEDSVKSTATKDDSGTSKVSGTDAEDAASSEKVDAEEGHNSNGKNQENGNGEVEKDDDDVDDDEKMGDEEDNDLDLSWKMLDIARAIVEKSQDNTMEKVKIYSALAEVATEREDMDNSLSDYMKALSMLEHLVEPDHRRVVELNFRICLVYELVSKIGEAISYCAKAISLCKSRIQSLKSSKDALLAGIDGDASAAEAEGGSEKSAIEKELEQLTSILPDLEKKLEDLSEANPSADMDEMVKAIVSRVTDVMPKAASFTSSQMATSSNGFDSSVMSTAATTGSSGSTVTDLGVVGRGVKRASIKPISAEPAAKKPALDSPSQQGDSSINSEVVPATQTGDESVSK

SEQ ID NO: 5972 - protein, 460 aa, Zea mays subsp. mays; identical to SEQ ID NO: 3042
  peptide (1)..(460): Ceres Seq. ID no. 13496121
  misc_feature (44)..(77): Pfam Name: TPR Domain Pfam Description: TPR Domain
  misc_feature (1)..(460): Homolog of NCBI NO: 38175649 NR Description: tetratricopeptide repeat-containing protein-like
  misc_feature (23)..(401): Homolog of NCBI NO: 18419996 NR Description: tetratricopeptide repeat (TPR)-containing protein thaliana] >gi|13877853|gb|AAK44004.1|AF370189_1 unknown protein thaliana] >gi|17065596|gb|AAL33778.1| unknown protein
  misc_feature (23)..(344): Homolog of NCBI NO: 25407799 NR Description: hypothetical protein AT4g37210 [imported] - thaliana >gi|4006859|emb|CAB16777.1| putative protein thaliana] >gi|7270704|emb|CAB80387.1| putative protein
  misc_feature (30)..(299): Homolog of NCBI NO: 4104353 NR Description: nuclear autoantigenic sperm protein autosomal
  misc_feature (28)..(105): Homolog of NCBI NO: 18129310 NR Description: hypothetical protein [Pinus pinaster]
  misc_feature (21)..(451): Homolog of NCBI NO: 123127 NR Description: HISTONE-BINDING PROTEIN N1/N2
  misc_feature (1)..(299): Homolog of NCBI NO: 13435642 NR Description: Nasp protein [Mus musculus]
  misc_feature (30)..(299): Homolog of NCBI NO: 27262630 NR Description: nuclear autoantigenic sperm protein isoform 3;
  misc_feature (30)..(299): Homolog of NCBI NO: 30584691 NR Description: Homo sapiens nuclear autoantigenic sperm protein
  misc_feature (1)..(448): Homolog of NCBI NO: 28277791 NR Description: Unknown (protein for MGC:56007) [Danio rerio]

SEQ ID NO: 5973 - protein, 280 aa, Zea mays subsp. mays; identical to SEQ ID NO: 2639
  peptide (1)..(280): Ceres Seq. ID no. 13496122
  misc_feature (1)..(221): Homolog of NCBI NO: 18419996 NR Description: tetratricopeptide repeat (TPR)-containing protein thaliana] >gi|13877853|gb|AAK44004.1|AF370189_1 unknown protein thaliana] >gi|17065596|gb|AAL33778.1| unknown protein
  misc_feature (1)..(164): Homolog of NCBI NO: 25407799 NR Description: hypothetical protein AT4g37210 [imported] - thaliana >gi|4006859|emb|CAB16777.1| putative protein thaliana] >gi|7270704|emb|CAB80387.1| putative protein
  misc_feature (1)..(119): Homolog of NCBI NO: 4104353 NR Description: nuclear autoantigenic sperm protein autosomal
  misc_feature (1)..(271): Homolog of NCBI NO: 123127 NR Description: HISTONE-BINDING PROTEIN N1/N2
  misc_feature (1)..(119): Homolog of NCBI NO: 13435642 NR Description: Nasp protein [Mus musculus]
  misc_feature (1)..(119): Homolog of NCBI NO: 27262630 NR Description: nuclear autoantigenic sperm protein isoform 3;
  misc_feature (1)..(119): Homolog of NCBI NO: 30584691 NR Description: Homo sapiens nuclear autoantigenic sperm protein
  misc_feature (1)..(268): Homolog of NCBI NO: 28277791 NR Description: Unknown (protein for MGC:56007) [Danio rerio]
  misc_feature (1)..(280): Homolog of NCBI NO: 27262630 NR Description: nuclear autoantigenic sperm protein isoform 3;
  misc_feature (1)..(280): Homolog of NCBI NO: 38175649 NR Description: tetratricopeptide repeat-containing protein-like

SEQ ID NO: 5974 - DNA, 851 bp, Zea mays subsp. mays
  misc_feature (1)..(851): Ceres Seq. ID no. 12412763
  misc_feature: MA Experiment ID: 108527 Result: Up-regulated in Transcription
  misc_feature: MA Experiment 108527 PARAMETER Experiment Name: Zm_5mM_NO_P Parameter: Age (day) Value: 8
  misc_feature: MA Experiment 108527 PARAMETER Experiment Name: Zm_5mM_NO_P Parameter: Organism Value: Zea mays
  misc_feature: MA Experiment 108527 PARAMETER Experiment Name: Zm_5mM_NO_P Parameter: Plant Line Value: 35A19
  misc_feature: MA Experiment 108527 PARAMETER Experiment Name: Zm_5mM_NO_P Parameter: Timepoint (hr) Value: 6
  misc_feature: MA Experiment 108527 PARAMETER Experiment Name: Zm_5mM_NO_P Parameter: Tissue Value: Aerial
  misc_feature: MA Experiment 108527 PARAMETER Experiment Name: Zm_5mM_NO_P Parameter: Treatment Value: 5mM NO vs. No Treatment
  misc_feature: MA Experiment ID: 108534 Result: Up-regulated in Transcription
  misc_feature: MA Experiment 108534 PARAMETER Experiment Name: Zm_4deg_Cold_P Parameter: Age (hr) Value: 8
  misc_feature: MA Experiment 108534 PARAMETER Experiment Name: Zm_4deg_Cold_P Parameter: Organism Value: Zea mays
  misc_feature: MA Experiment 108534 PARAMETER Experiment Name: Zm_4deg_Cold_P Parameter: Plant Line Value: 35A19
  misc_feature: MA Experiment 108534 PARAMETER Experiment Name: Zm_4deg_Cold_P Parameter: Temperature (deg C) Value: 4 vs. 22
  misc_feature: MA Experiment 108534 PARAMETER Experiment Name: Zm_4deg_Cold_P Parameter: Timepoint (hr) Value: 6
  misc_feature: MA Experiment 108534 PARAMETER Experiment Name: Zm_4deg_Cold_P Parameter: Tissue Value: Aerial
  misc_feature: MA Experiment ID: 108688 Result: Down-regulated in Transcription
  misc_feature: MA Experiment 108688 PARAMETER Experiment Name: Zm_Embryos-Flowers__P Parameter: Tissue Value: Immature Flowers vs. Aerial+
  misc_feature: MA Experiment ID: 20000535 Result: Up-regulated in Transcription
  misc_feature: MA Experiment 20000535 PARAMETER Experiment Name: Zm_Hybrid_Seed_Dev_P Parameter: DAP Value: 30 vs. 12
  misc_feature: MA Experiment 20000535 PARAMETER Experiment Name: Zm_Hybrid_Seed_Dev_P Parameter: Organism Value: Zea mays
  misc_feature: MA Experiment 20000535 PARAMETER Experiment Name: Zm_Hybrid_Seed_Dev_P Parameter: Plant Line Value: 35A19
  misc_feature: MA Experiment 20000535 PARAMETER Experiment Name: Zm_Hybrid_Seed_Dev_P Parameter: Tissue Value: Embryo vs. Unfert Floret
atcatccctgcagttgtggatcagttcgtcctccgtctctctccacaagtctcctctaggcgccaagcaatgacaaggtcagcaccgccggcctctcctccggcgccgaagcccgtgctgcgcgggagccagctggagcagctccgcgagatcttccggcgcttcgacatggacggcgacggcagcctgacgcagctggagctgggggcgctgctgcggtcgctgggcctgcgccccacgggggaggaggcccgcgcgctgctggcggccatggactccaacggcaacggcgcggtggagttcggcgagctggcggccgccatcgcgccgctgctcaccacgcagacgcacctcgtcgaccaggcccagctcctggaggtgttccgcgccttcgaccgcgacggcaacggctacatctccgccgccgagctggcgcgatccatggcgcgcatcggccagccgctcaccttcgaggagctcacgcgcatgatgcgcgacgccgacgccgacggcgacggcgtcatcagcttcaacgagttcgccgccgtcatggccaagtccgcgctcgacttcctcggcgtcgcctgatgccctctgatggaccgatcgatcgatcggtctcgctcaccgcccgccgccgtaaccccgtgtccctgtgaccctgtccctcgcccgccattgattacctgttctctctctctctctctctctcttttgttaggaagatgctcatccggttaatgtaggataactgacacaagataatgtaactcaaaaactcatcgctggtttgtaacatggatgaactcggaaaatgtgtacatattttggatggatttgttcaatcttcc

SEQ ID NO: 5975 - protein, 195 aa, Zea mays subsp. mays
  peptide (1)..(195): Ceres Seq. ID no. 12412764
  misc_feature (47)..(75): Pfam Name: EF hand Pfam Description: EF hand
  misc_feature (40)..(195): Homolog of NCBI NO: 34912426 NR Description: P0681B11.17 [Oryza sativa (japonica
  misc_feature (44)..(194): Homolog of NCBI NO: 15221797 NR Description: calmodulin, putative; protein id: At1g18530.1
  misc_feature (44)..(194): Homolog of NCBI NO: 28393082 NR Description: putative calmodulin [Arabidopsis thaliana]
  misc_feature (44)..(194): Homolog of NCBI NO: 15230858 NR Description: calmodulin, putative; protein id: At3g25600.1
  misc_feature (40)..(190): Homolog of NCBI NO: 13359053 NR Description: P0436D06.14 [Oryza sativa (japonica
  misc_feature (34)..(190): Homolog of NCBI NO: 15228441 NR Description: putative calmodulin; protein id: At3g03000.1, by cDNA: gi_15010601, supported by cDNA: gi_19699245 [Arabidopsis >gi|6728961|gb|AAF26959.1|AC018363_4 putative calmodulin
  misc_feature (44)..(190): Homolog of NCBI NO: 15222618 NR Description: calmodulin, putative; protein id: At1g32250.1
  misc_feature (40)..(190): Homolog of NCBI NO: 115506 NR Description: Calmodulin >gi|71688|pir||MCKM calmodulin -
  misc_feature (40)..(190): Homolog of NCBI NO: 225024 NR Description: calmodulin
  misc_feature (40)..(184): Homolog of NCBI NO: 4959144 NR Description: calmodulin mutant SYNCAM6 [synthetic construct]
IIPAVVDQFVLRLSPQVSSRRQAMTRSAPPASPPAPKPVLRGSQLEQLREIFRRFDMDGDGSLTQLELGALLRSLGLRPTGEEARALLAAMDSNGNGAVEFGELAAAIAPLLTTQTHLVDQAQLLEVFRAFDRDGNGYISAAELARSMARIGQPLTFEELTRMMRDADADGDGVISFNEFAAVMAKSALDFLGVA

SEQ ID NO: 5976 - protein, 172 aa, Zea mays subsp. mays
  peptide (1)..(172): Ceres Seq. ID no. 12412765
  misc_feature (24)..(52): Pfam Name: EF hand Pfam Description: EF hand
  misc_feature (17)..(172): Homolog of NCBI NO: 34912426 NR Description: P0681B11.17 [Oryza sativa (japonica
  misc_feature (21)..(171): Homolog of NCBI NO: 15221797 NR Description: calmodulin, putative; protein id: At1g18530.1
  misc_feature (21)..(171): Homolog of NCBI NO: 28393082 NR Description: putative calmodulin [Arabidopsis thaliana]
  misc_feature (21)..(171): Homolog of NCBI NO: 15230858 NR Description: calmodulin, putative; protein id: At3g25600.1
  misc_feature (17)..(167): Homolog of NCBI NO: 13359053 NR Description: P0436D06.14 [Oryza sativa (japonica
  misc_feature (11)..(167): Homolog of NCBI NO: 15228441 NR Description: putative calmodulin; protein id: At3g03000.1, by cDNA: gi_15010601, supported by cDNA: gi_19699245 [Arabidopsis >gi|6728961|gb|AAF26959.1|AC018363_4 putative calmodulin
  misc_feature (21)..(167): Homolog of NCBI NO: 15222618 NR Description: calmodulin, putative; protein id: At1g32250.1
  misc_feature (17)..(167): Homolog of NCBI NO: 115506 NR Description: Calmodulin >gi|71688|pir||MCKM calmodulin -
  misc_feature (17)..(167): Homolog of NCBI NO: 225024 NR Description: calmodulin
  misc_feature (17)..(161): Homolog of NCBI NO: 4959144 NR Description: calmodulin mutant SYNCAM6 [synthetic construct]
MTRSAPPASPPAPKPVLRGSQLEQLREIFRRFDMDGDGSLTQLELGALLRSLGLRPTGEEARALLAAMDSNGNGAVEFGELAAAIAPLLTTQTHLVDQAQLLEVFRAFDRDGNGYISAAELARSMARIGQPLTFEELTRMMRDADADGDGVISFNEFAAVMAKSALDFLGVA

SEQ ID NO: 5977 - protein, 139 aa, Zea mays subsp. mays
  peptide (1)..(139): Ceres Seq. ID no. 12412766
  misc_feature (1)..(139): Homolog of NCBI NO: 34912426 NR Description: P0681B11.17 [Oryza sativa (japonica
  misc_feature (1)..(138): Homolog of NCBI NO: 15221797 NR Description: calmodulin, putative; protein id: At1g18530.1
  misc_feature (1)..(138): Homolog of NCBI NO: 28393082 NR Description: putative calmodulin [Arabidopsis thaliana]
  misc_feature (1)..(138): Homolog of NCBI NO: 15230858 NR Description: calmodulin, putative; protein id: At3g25600.1
  misc_feature (1)..(134): Homolog of NCBI NO: 13359053 NR Description: P0436D06.14 [Oryza sativa (japonica
  misc_feature (1)..(134): Homolog of NCBI NO: 15228441 NR Description: putative calmodulin; protein id: At3g03000.1, by cDNA: gi_15010601, supported by cDNA: gi_19699245 [Arabidopsis >gi|6728961|gb|AAF26959.1|AC018363_4 putative calmodulin
  misc_feature (1)..(134): Homolog of NCBI NO: 15222618 NR Description: calmodulin, putative; protein id: At1g32250.1
  misc_feature (1)..(134): Homolog of NCBI NO: 115506 NR Description: Calmodulin >gi|71688|pir||MCKM calmodulin -
  misc_feature (1)..(134): Homolog of NCBI NO: 225024 NR Description: calmodulin
  misc_feature (1)..(128): Homolog of NCBI NO: 4959144 NR Description: calmodulin mutant SYNCAM6 [synthetic construct]
MDGDGSLTQLELGALLRSLGLRPTGEEARALLAAMDSNGNGAVEFGELAAAIAPLLTTQTHLVDQAQLLEVFRAFDRDGNGYISAAELARSMARIGQPLTFEELTRMMRDADADGDGVISFNEFAAVMAKSALDFLGVA

SEQ ID NO: 5978 - DNA, 1347 bp, Zea mays subsp. mays
  misc_feature (1)..(1347): Ceres Seq. ID no. 12401406
  misc_feature: MA Experiment ID: 108529 Result: Down-regulated in Transcription
  misc_feature: MA Experiment 108529 PARAMETER Experiment Name: Zm_Imbibed_Seeds_P Parameter: Age (day) Value: 5 vs. 2
  misc_feature: MA Experiment 108529 PARAMETER Experiment Name: Zm_Imbibed_Seeds_P Parameter: Organism Value: Zea mays
  misc_feature: MA Experiment 108529 PARAMETER Experiment Name: Zm_Imbibed_Seeds_P Parameter: Plant Line Value: 35A19
  misc_feature: MA Experiment 108529 PARAMETER Experiment Name: Zm_Imbibed_Seeds_P Parameter: Tissue Value: Roots vs. Embryo
  misc_feature: MA Experiment ID: 108543 Result: Up-regulated in Transcription
  misc_feature: MA Experiment ID: 108544 Result: Down-regulated in Transcription
  misc_feature: MA Experiment ID: 108546 Result: Down-regulated in Transcription
  misc_feature: MA Experiment 108546 PARAMETER Experiment Name: Zm_Imbibed_Seeds_P Parameter: Age (day) Value: 3 vs. 2
  misc_feature: MA Experiment 108546 PARAMETER Experiment Name: Zm_Imbibed_Seeds_P Parameter: Organism Value: Zea mays
  misc_feature: MA Experiment 108546 PARAMETER Experiment Name: Zm_Imbibed_Seeds_P Parameter: Plant Line Value: 35A19
  misc_feature: MA Experiment 108546 PARAMETER Experiment Name: Zm_Imbibed_Seeds_P Parameter: Tissue Value: Roots vs. Embryo
  misc_feature: MA Experiment ID: 108556 Result: Down-regulated in Transcription
  misc_feature: MA Experiment 108556 PARAMETER Experiment Name: Zm_Drought_P Parameter: Age (day) Value: 9
  misc_feature: MA Experiment 108556 PARAMETER Experiment Name: Zm_Drought_P Parameter: Organism Value: Zea mays
  misc_feature: MA Experiment 108556 PARAMETER Experiment Name: Zm_Drought_P Parameter: Plant Line Value: 35A19
  misc_feature: MA Experiment 108556 PARAMETER Experiment Name: Zm_Drought_P Parameter: Timepoint (hr) Value: 24
  misc_feature: MA Experiment 108556 PARAMETER Experiment Name: Zm_Drought_P Parameter: Tissue Value: Aerial
  misc_feature: MA Experiment 108556 PARAMETER Experiment Name: Zm_Drought_P Parameter: Treatment Value: Drought vs. No Drought
  misc_feature: MA Experiment ID: 20000477 Result: Down-regulated in Transcription
  misc_feature: MA Experiment 20000477 PARAMETER Experiment Name: Zm_5mM_SA_P Parameter: Age (day) Value: 10
  misc_feature: MA Experiment 20000477 PARAMETER Experiment Name: Zm_5mM_SA_P Parameter: Organism Value: Zea mays
  misc_feature: MA Experiment 20000477 PARAMETER Experiment Name: Zm_5mM_SA_P Parameter: Plant Line Value: 35A19
  misc_feature: MA Experiment 20000477 PARAMETER Experiment Name: Zm_5mM_SA_P Parameter: Timepoint (hr) Value: 48
  misc_feature: MA Experiment 20000477 PARAMETER Experiment Name: Zm_5mM_SA_P Parameter: Tissue Value: Aerial
  misc_feature: MA Experiment 20000477 PARAMETER Experiment Name: Zm_5mM_SA_P Parameter: Treatment Value: 5mM SA vs. No Treatment
  misc_feature: MA Experiment ID: 20000479 Result: Down-regulated in Transcription
  misc_feature: MA Experiment 20000479 PARAMETER Experiment Name: Zm_Drought_P Parameter: Age (day) Value: 10
  misc_feature: MA Experiment 20000479 PARAMETER Experiment Name: Zm_Drought_P Parameter: Organism Value: Zea mays
  misc_feature: MA Experiment 20000479 PARAMETER Experiment Name: Zm_Drought_P Parameter: Plant Line Value: 35A19
  misc_feature: MA Experiment 20000479 PARAMETER Experiment Name: Zm_Drought_P Parameter: Timepoint (hr) Value: 48
  misc_feature: MA Experiment 20000479 PARAMETER Experiment Name: Zm_Drought_P Parameter: Tissue Value: Aerial
  misc_feature: MA Experiment 20000479 PARAMETER Experiment Name: Zm_Drought_P Parameter: Treatment Value: Drought vs. No Drought
  misc_feature: MA Experiment ID: 20000480 Result: Down-regulated in Transcription
  misc_feature: MA Experiment 20000480 PARAMETER Experiment Name: Zm_Drought_P Parameter: Age (day) Value: 11
  misc_feature: MA Experiment 20000480 PARAMETER Experiment Name: Zm_Drought_P Parameter: Organism Value: Zea mays
  misc_feature: MA Experiment 20000480 PARAMETER Experiment Name: Zm_Drought_P Parameter: Plant Line Value: 35A19
  misc_feature: MA Experiment 20000480 PARAMETER Experiment Name: Zm_Drought_P Parameter: Timepoint (hr) Value: 72
  misc_feature: MA Experiment 20000480 PARAMETER Experiment Name: Zm_Drought_P Parameter: Tissue Value: Aerial
  misc_feature: MA Experiment 20000480 PARAMETER Experiment Name: Zm_Drought_P Parameter: Treatment Value: Drought vs. No Drought
  misc_feature: MA Experiment ID: 20000488 Result: Down-regulated in Transcription
  misc_feature: MA Experiment 20000488 PARAMETER Experiment Name: Zm_50mM_NH4NO3_L_to_H_P Parameter: Organism Value: Zea mays
  misc_feature: MA Experiment 20000488 PARAMETER Experiment Name: Zm_50mM_NH4NO3_L_to_H_P Parameter: Timepoint (hr) Value: 8
  misc_feature: MA Experiment 20000488 PARAMETER Experiment Name: Zm_50mM_NH4NO3_L_to_H_P Parameter: Tissue Value: Leaves
  misc_feature: MA Experiment 20000488 PARAMETER Experiment Name: Zm_50mM_NH4NO3_L_to_H_P Parameter: Treatment Value: 50mM NH4NO3 vs. 100mM Mannitol
  misc_feature: MA Experiment ID: 20000535 Result: Up-regulated in Transcription
  misc_feature: MA Experiment 20000535 PARAMETER Experiment Name: Zm_Hybrid_Seed_Dev_P Parameter: DAP Value: 30 vs. 12
  misc_feature: MA Experiment 20000535 PARAMETER Experiment Name: Zm_Hybrid_Seed_Dev_P Parameter: Organism Value: Zea mays
  misc_feature: MA Experiment 20000535 PARAMETER Experiment Name: Zm_Hybrid_Seed_Dev_P Parameter: Plant Line Value: 35A19
  misc_feature: MA Experiment 20000535 PARAMETER Experiment Name: Zm_Hybrid_Seed_Dev_P Parameter: Tissue Value: Embryo vs. Unfert Floret
  misc_feature: MA Experiment ID: 20000626 Result: Down-regulated in Transcription
  misc_feature: MA Experiment 20000626 PARAMETER Experiment Name: Zm_Herbicide-Treatments_P Parameter: Timepoint (hr) Value: 12
  misc_feature: MA Experiment 20000626 PARAMETER Experiment Name: Zm_Herbicide-Treatments_P Parameter: Tissue Value: Aerial
  misc_feature: MA Experiment 20000626 PARAMETER Experiment Name: Zm_Herbicide-Treatments_P Parameter: Treatment Value: Roundup vs. No Treatment
  misc_feature: MA Experiment ID: 20000632 Result: Down-regulated in Transcription
  misc_feature: MA Experiment 20000632 PARAMETER Experiment Name: Zm_Herbicide-Treatments_P Parameter: Timepoint (hr) Value: 4
  misc_feature: MA Experiment 20000632 PARAMETER Experiment Name: Zm_Herbicide-Treatments_P Parameter: Tissue Value: Aerial
  misc_feature: MA Experiment 20000632 PARAMETER Experiment Name: Zm_Herbicide-Treatments_P Parameter: Treatment Value: Glean vs. No Treatment
gggacacagcacaagaacactcctagctgaagatctcgagtgcaacgcaacgttggcgcttggcggccagtagtagcagctaatttagcgtcgctccttcctactagacgagagatcgagaaaccatggccaagctccaagtcactcctggcgccgcgttcaccgagtgcaatgaactcaacttccagggcctgtacatgtaccacacgcccctgggtcccaaggccaaccaagctgcgatcctagagagcaaggccaagatcggcatcggtgccaccgtggttaacaactgggcagtgtatgacgggccagggccaggcgctaagctggtcggccgtgcgcagggcttgcacatcctagccggaaactgggtcaactcattcaccctggtgttcgaggatgaaaggttcagtgggtccacgcttgaagtgaggggcataacggtcgaaactggcgagtgggctgttgttgggggcaccggccagtttgctatggcgaacggcatcatctccaagaagttccacgagcagagaagcgacgggaacgtcatagagcttagtgtccatgctttctgcccactgctcaaagggaaaaggggcggtgctgtgacaaaggttgggccatggggcggaagcggagggtctccaatggagctgacagagacggagacgcccatgcgtctggagagcatcaccgtccgcagcggcgtggccgtcaactccatctcattctcctacgtcgactctgccggccacaagcgctctgctggtccctggggtggttccggtggacagcctgatcaggtccagctcgccgagtctgaggtggtcacacaagtgtccggaacatacggcaccatcgacgacgacgaccgcaccgtgataacctccattaagttcgtcacgaaccttgacaagacctacgggcctttcggagcgtacggggacggcgacgacacctcctttaccgtccccgtgcagccggggagtggcgccatcgtgggcttcttcgcgcgcgttggcggggccggggactacctggacgccattggcgtctacgtgcgccccctctaaaaagctttgttttgtgatgtgaatgaagcagctgcatgcatgctgctctactccacacagagtcgagtccatcaccaccagctgcttgaatgcgtgcgtgcggccggcttccagttgctttatttcgtacctgagtgttgtgttgtggtgtgtttgctcatgtacttcggtacgttgcttggtaaactctggtcagtgttgtgtgtgtttgcctttgtcatgaatttcgacggaataataaagacctcgtgtagaagaggtcagggttttatcg

SEQ ID NO: 5979 - protein, 315 aa, Zea mays subsp. mays
  peptide (1)..(315): Ceres Seq. ID no. 12401407
  misc_feature (2)..(152): Pfam Name: Dirigent-like protein Pfam Description: Dirigent-like protein
  misc_feature (1)..(315): Homolog of NCBI NO: 9313027 NR Description: beta-glucosidase aggregating factor precursor
  misc_feature (1)..(315): Homolog of NCBI NO: 7489385 NR Description: jakalin homolog - barley
  misc_feature (1)..(315): Homolog of NCBI NO: 7489383 NR Description: jacalin homolog - barley
  misc_feature (1)..(299): Homolog of NCBI NO: 7489384 NR Description: jacalin homolog - barley
  misc_feature (1)..(311): Homolog of NCBI NO: 16151819 NR Description: VER2 [Triticum aestivum]
  misc_feature (23)..(313): Homolog of NCBI NO: 21311647 NR Description: hessian fly response gene 1 protein [Triticum
  misc_feature (23)..(314): Homolog of NCBI NO: 7489661 NR Description: benzothiadiazole-induced protein (clone WCI-1) -
  misc_feature (1)..(217): Homolog of NCBI NO: 7489672 NR Description: jasmonate-induced protein homolog - wheat
  misc_feature (161)..(313): Homolog of NCBI NO: 38344523 NR Description: OSJNBa0016N04.16 [Oryza sativa (japonica
  misc_feature (161)..(314): Homolog of NCBI NO: 4584685 NR Description: putative lectin [Hordeum vulgare subsp. vulgare]
MAKLQVTPGAAFTECNELNFQGLYMYHTPLGPKANQAAILESKAKIGIGATVVNNWAVYDGPGPGAKLVGRAQGLHILAGNWVNSFTLVFEDERFSGSTLEVRGITVETGEWAVVGGTGQFAMANGIISKKFHEQRSDGNVIELSVHAFCPLLKGKRGGAVTKVGPWGGSGGSPMELTETETPMRLESITVRSGVAVNSISFSYVDSAGHKRSAGPWGGSGGQPDQVQLAESEVVTQVSGTYGTIDDDDRTVITSIKFVTNLDKTYGPFGAYGDGDDTSFTVPVQPGSGAIVGFFARVGGAGDYLDAIGVYVRPL

SEQ ID NO: 5980 - protein, 291 aa, Zea mays subsp. mays
  peptide (1)..(291): Ceres Seq. ID no. 12401408
  misc_feature (1)..(128): Pfam Name: Dirigent-like protein Pfam Description: Dirigent-like protein
  misc_feature (1)..(291): Homolog of NCBI NO: 9313027 NR Description: beta-glucosidase aggregating factor precursor
  misc_feature (1)..(291): Homolog of NCBI NO: 7489385 NR Description: jakalin homolog - barley
  misc_feature (1)..(291): Homolog of NCBI NO: 7489383 NR Description: jacalin homolog - barley
  misc_feature (1)..(275): Homolog of NCBI NO: 7489384 NR Description: jacalin homolog - barley
  misc_feature (1)..(287): Homolog of NCBI NO: 16151819 NR Description: VER2 [Triticum aestivum]
  misc_feature (1)..(289): Homolog of NCBI NO: 21311647 NR Description: hessian fly response gene 1 protein [Triticum
  misc_feature (1)..(290): Homolog of NCBI NO: 7489661 NR Description: benzothiadiazole-induced protein (clone WCI-1) -
  misc_feature (1)..(193): Homolog of NCBI NO: 7489672 NR Description: jasmonate-induced protein homolog - wheat
  misc_feature (137)..(289): Homolog of NCBI NO: 38344523 NR Description: OSJNBa0016N04.16 [Oryza sativa (japonica
  misc_feature (137)..(290): Homolog of NCBI NO: 4584685 NR Description: putative lectin [Hordeum vulgare subsp. vulgare]
MYHTPLGPKANQAAILESKAKIGIGATVVNNWAVYDGPGPGAKLVGRAQGLHILAGNWVNSFTLVFEDERFSGSTLEVRGITVETGEWAVVGGTGQFAMANGIISKKFHEQRSDGNVIELSVHAFCPLLKGKRGGAVTKVGPWGGSGGSPMELTETETPMRLESITVRSGVAVNSISFSYVDSAGHKRSAGPWGGSGGQPDQVQLAESEVVTQVSGTYGTIDDDDRTVITSIKFVTNLDKTYGPFGAYGDGDDTSFTVPVQPGSGAIVGFFARVGGAGDYLDAIGVYVRPL

SEQ ID NO: 5981 - protein, 193 aa, Zea mays subsp. mays
  peptide (1)..(193): Ceres Seq. ID no. 12401409
  misc_feature (50)..(191): Pfam Name: Jacalin-like lectin domain Pfam Description: Jacalin-like lectin domain
  misc_feature (1)..(193): Homolog of NCBI NO: 9313027 NR Description: beta-glucosidase aggregating factor precursor
  misc_feature (1)..(193): Homolog of NCBI NO: 7489385 NR Description: jakalin homolog - barley
  misc_feature (1)..(193): Homolog of NCBI NO: 7489383 NR Description: jacalin homolog - barley
  misc_feature (1)..(177): Homolog of NCBI NO: 7489384 NR Description: jacalin homolog - barley
  misc_feature (1)..(189): Homolog of NCBI NO: 16151819 NR Description: VER2 [Triticum aestivum]
  misc_feature (1)..(191): Homolog of NCBI NO: 21311647 NR Description: hessian fly response gene 1 protein [Triticum
  misc_feature (1)..(192): Homolog of NCBI NO: 7489661 NR Description: benzothiadiazole-induced protein (clone WCI-1) -
  misc_feature (1)..(95): Homolog of NCBI NO: 7489672 NR Description: jasmonate-induced protein homolog - wheat
  misc_feature (39)..(191): Homolog of NCBI NO: 38344523 NR Description: OSJNBa0016N04.16 [Oryza sativa (japonica
  misc_feature (39)..(192): Homolog of NCBI NO: 4584685 NR Description: putative lectin [Hordeum vulgare subsp. vulgare]
MANGIISKKFHEQRSDGNVIELSVHAFCPLLKGKRGGAVTKVGPWGGSGGSPMELTETETPMRLESITVRSGVAVNSISFSYVDSAGHKRSAGPWGGSGGQPDQVQLAESEVVTQVSGTYGTIDDDDRTVITSIKFVTNLDKTYGPFGAYGDGDDTSFTVPVQPGSGAIVGFFARVGGAGDYLDAIGVYVRPL

SEQ ID NO: 5982 - DNA, 1628 bp, Zea mays subsp. mays
  misc_feature (1)..(1628): Ceres Seq. ID no. 12409250
  misc_feature: MA Experiment ID: 108522 Result: Down-regulated in Transcription
  misc_feature: MA Experiment 108522 PARAMETER Experiment Name: Zm_42deg_Heat_P Parameter: Age (day) Value: 8
  misc_feature: MA Experiment 108522 PARAMETER Experiment Name: Zm_42deg_Heat_P Parameter: Organism Value: Zea mays
  misc_feature: MA Experiment 108522 PARAMETER Experiment Name: Zm_42deg_Heat_P Parameter: Plant Line Value: 35A19
  misc_feature: MA Experiment 108522 PARAMETER Experiment Name: Zm_42deg_Heat_P Parameter: Temperature (deg C) Value: 42 vs. 22
  misc_feature: MA Experiment 108522 PARAMETER Experiment Name: Zm_42deg_Heat_P Parameter: Timepoint (hr) Value: 1
  misc_feature: MA Experiment 108522 PARAMETER Experiment Name: Zm_42deg_Heat_P Parameter: Tissue Value: Aerial
  misc_feature: MA Experiment ID: 108523 Result: Down-regulated in Transcription
  misc_feature: MA Experiment 108523 PARAMETER Experiment Name: Zm_42deg_Heat_P Parameter: Age (day) Value: 8
  misc_feature: MA Experiment 108523 PARAMETER Experiment Name: Zm_42deg_Heat_P Parameter: Organism Value: Zea mays
  misc_feature: MA Experiment 108523 PARAMETER Experiment Name: Zm_42deg_Heat_P Parameter: Plant Line Value: 35A19
  misc_feature: MA Experiment 108523 PARAMETER Experiment Name: Zm_42deg_Heat_P Parameter: Temperature (deg C) Value: 42 vs. 22
  misc_feature: MA Experiment 108523 PARAMETER Experiment Name: Zm_42deg_Heat_P Parameter: Timepoint (hr) Value: 6
  misc_feature: MA Experiment 108523 PARAMETER Experiment Name: Zm_42deg_Heat_P Parameter: Tissue Value: Aerial
  misc_feature: MA Experiment ID: 108689 Result: Up-regulated in Transcription
  misc_feature: MA Experiment 108689 PARAMETER Experiment Name: Zm_Drought_Roots_P Parameter: Age (day) Value: 9
  misc_feature: MA Experiment 108689 PARAMETER Experiment Name: Zm_Drought_Roots_P Parameter: Organism Value: Zea mays
  misc_feature: MA Experiment 108689 PARAMETER Experiment Name: Zm_Drought_Roots_P Parameter: Plant Line Value: 35A19
  misc_feature: MA Experiment 108689 PARAMETER Experiment Name: Zm_Drought_Roots_P Parameter: Timepoint (hr) Value: 24
  misc_feature: MA Experiment 108689 PARAMETER Experiment Name: Zm_Drought_Roots_P Parameter: Tissue Value: Roots
  misc_feature: MA Experiment 108689 PARAMETER Experiment Name: Zm_Drought_Roots_P Parameter: Treatment Value: Drought vs. No Drought
  misc_feature: MA Experiment ID: 20000488 Result: Down-regulated in Transcription
  misc_feature: MA Experiment 20000488 PARAMETER Experiment Name: Zm_50mM_NH4NO3_L_to_H_P Parameter: Organism Value: Zea mays
  misc_feature: MA Experiment 20000488 PARAMETER Experiment Name: Zm_50mM_NH4NO3_L_to_H_P Parameter: Timepoint (hr) Value: 8
  misc_feature: MA Experiment 20000488 PARAMETER Experiment Name: Zm_50mM_NH4NO3_L_to_H_P Parameter: Tissue Value: Leaves
  misc_feature: MA Experiment 20000488 PARAMETER Experiment Name: Zm_50mM_NH4NO3_L_to_H_P Parameter: Treatment Value: 50mM NH4NO3 vs. 100mM Mannitol
  misc_feature: MA Experiment ID: 20000534 Result: Down-regulated in Transcription
  misc_feature: MA Experiment 20000534 PARAMETER Experiment Name: Zm_Hybrid_Pollen_P Parameter: Age (day) Value: 8
  misc_feature: MA Experiment 20000534 PARAMETER Experiment Name: Zm_Hybrid_Pollen_P Parameter: Organism Value: Zea mays
  misc_feature: MA Experiment 20000534 PARAMETER Experiment Name: Zm_Hybrid_Pollen_P Parameter: Plant Line Value: 35A19
  misc_feature: MA Experiment 20000534 PARAMETER Experiment Name: Zm_Hybrid_Pollen_P Parameter: Tissue Value: Pollen vs. Aerial
aaccccaccccaccgcccgcaaccgcaagctcagattccctccccaccccaccccaccccaccgtcccgctcactccagcccagcccgcgtccccacagcccagcgacagcgggcaccggcggcatccagccatgtgcggcggcgccatcctgtcggacatcatcccgccgccgccaccgcggcgggtcacggctggccacctctggcccgagagcaagaagccgaggagggctgcatccggcaggaggggagcccccgtggagcagcatgagcaggaggaggatttcgaggccgacttcgaggagttcgaggtggagtccggcgagtcggagctcgagtccgaggacgagcccaagcccttcgccgcccccaggagcgcgctcgccagaggtggactaaacactggtgcagctggtgtcgatggccctgctgcaaattcagttaaaaggaagaggaagaaccagttcaggggtatccgccggcgcccgtggggcaaatgggctgctgagatcagagatcctcgcaagggcgtgcgcgtctggctcggtactttcaactcccccgaagaagctgccagagcttacgacgccgaggcacgcaggatccgcggcaagaaggctaaagtcaacttcccggatgaggttcctacggcggtttctcagaagcgccgtgctgctgggcctgcctctctgaaagcgcctaagatggacgttgaggaggagaagccgatcatcaagctcgcagtgaacaatatgaccaactcaaacgcatatcactaccctgccgtcgtcggccacaacatcatacccgagccattcatgcagactcagaacatgccattcgctcctctggtgaattatgctgccctagtgaacctgtcttcagaccaaggcagcaactcgttcggttgctcggacttcagcctcgagaacgactccaggacccctgacataacttcggtgcctgcgcccgttgccaccttggccgccgttggcgagtctgtgttcgtccagaacaccgccggccatgctgtggcgtctcctgcgacggggaacactggtgttgatctcgccgagttggagccgtatatgaatttcctgatggacggtggttcagacgactcgatcagcactctcttgagctgtgatggatcccaggacgtggtcagcaacatggacctttggagcttcgaggacatgcccatgtctgctggtttctactgaggcctgaggcccagcgactggtgcttgtgtacatagggggggacaaagggtaagagcctgcagtaacagagattggctctttctggtacttgcaatttctatcccttcaactctttcttccgcccccgtgtttcaggaataatgttctggagatgaagaaacgcttgcgtgggcgtgcctgcaggcacgcgtgtagtagctgcggtattagtatatatgcttagatgttcagtcacttcctttaagtacaatttggcgctggacatgtaccttattttactatgtatccgtgacaacagctatgtgtctgctccttttattttcttgtctttgcttcaaaaaaatggctctgaacattgcgagtttgtactttgtagacaatatatatatatatatatgtgtgg

SEQ ID NO: 5983 - protein, 407 aa, Zea mays subsp. mays
  peptide (1)..(407): Ceres Seq. ID no. 12409251
  misc_feature (153)..(216): Pfam Name: AP2 domain Pfam Description: AP2 domain
  misc_feature (45)..(407): Homolog of NCBI NO: 6176534 NR Description: EREBP-like protein [Oryza sativa]
  misc_feature (45)..(407): Homolog of NCBI NO: 6689918 NR Description: transcription factor EREBP1 [Oryza sativa]
  misc_feature (45)..(407): Homolog of NCBI NO: 24940524 NR Description: ethylene response element binding protein
  misc_feature (45)..(407): Homolog of NCBI NO: 30525872 NR Description: ethylene-responsive element binding protein
  misc_feature (79)..(407): Homolog of NCBI NO: 30525870 NR Description: ethylene-responsive element binding protein
  misc_feature (45)..(405): Homolog of NCBI NO: 38343926 NR Description: ethylene transcription factor [Fagus sylvatica]
  misc_feature (45)..(325): Homolog of NCBI NO: 22074046 NR Description: transcription factor JERF1 [Lycopersicon
  misc_feature (291)..(407): Homolog of NCBI NO: 22074046 NR Description: transcription factor JERF1 [Lycopersicon
  misc_feature (45)..(405): Homolog of NCBI NO: 18496063 NR Description: ethylene responsive element binding protein
NPTPPPATASSDSLPTPPHPTVPLTPAQPASPQPSDSGHRRHPAMCGGAILSDIIPPPPPRRVTAGHLWPESKKPRRAASGRRGAPVEQHEQEEDFEADFEEFEVESGESELESEDEPKPFAAPRSALARGGLNTGAAGVDGPAANSVKRKRKNQFRGIRRRPWGKWAAEIRDPRKGVRVWLGTFNSPEEAARAYDAEARRIRGKKAKVNFPDEVPTAVSQKRRAAGPASLKAPKMDVEEEKPIIKLAVNNMTNSNAYHYPAVVGHNIIPEPFMQTQNMPFAPLVNYAALVNLSSDQGSNSFGCSDFSLENDSRTPDITSVPAPVATLAAVGESVFVQNTAGHAVASPATGNTGVDLAELEPYMNFLMDGGSDDSISTLLSCDGSQDVVSNMDLWSFEDMPMSAGFY

SEQ ID NO: 5984 - protein, 363 aa, Zea mays subsp. mays
  peptide (1)..(363): Ceres Seq. ID no. 12409252
  misc_feature (109)..(172): Pfam Name: AP2 domain Pfam Description: AP2 domain
  misc_feature (1)..(363): Homolog of NCBI NO: 6176534 NR Description: EREBP-like protein [Oryza sativa]
  misc_feature (1)..(363): Homolog of NCBI NO: 6689918 NR Description: transcription factor EREBP1 [Oryza sativa]
  misc_feature (1)..(363): Homolog of NCBI NO: 24940524 NR Description: ethylene response element binding protein
  misc_feature (1)..(363): Homolog of NCBI NO: 30525872 NR Description: ethylene-responsive element binding protein
  misc_feature (35)..(363): Homolog of NCBI NO: 30525870 NR Description: ethylene-responsive element binding protein
  misc_feature (1)..(361): Homolog of NCBI NO: 38343926 NR Description: ethylene transcription factor [Fagus sylvatica]
  misc_feature (1)..(281): Homolog of NCBI NO: 22074046 NR Description: transcription factor JERF1 [Lycopersicon
  misc_feature (247)..(363): Homolog of NCBI NO: 22074046 NR Description: transcription factor JERF1 [Lycopersicon
  misc_feature (1)..(361): Homolog of NCBI NO: 18496063 NR Description: ethylene responsive element binding protein
MCGGAILSDIIPPPPPRRVTAGHLWPESKKPRRAASGRRGAPVEQHEQEEDFEADFEEFEVESGESELESEDEPKPFAAPRSALARGGLNTGAAGVDGPAANSVKRKRKNQFRGIRRRPWGKWAAEIRDPRKGVRVWLGTFNSPEEAARAYDAEARRIRGKKAKVNFPDEVPTAVSQKRRAAGPASLKAPKMDVEEEKPIIKLAVNNMTNSNAYHYPAVVGHNIIPEPFMQTQNMPFAPLVNYAALVNLSSDQGSNSFGCSDFSLENDSRTPDITSVPAPVATLAAVGESVFVQNTAGHAVASPATGNTGVDLAELEPYMNFLMDGGSDDSISTLLSCDGSQDVVSNMDLWSFEDMPMSAGFY

SEQ ID NO: 5985 - DNA, 1324 bp, Zea mays subsp. mays
  misc_feature (1)..(1324): Ceres Seq. ID no. 12343225
  misc_feature: MA Experiment ID: 108535 Result: Up-regulated in Transcription
  misc_feature: MA Experiment 108535 PARAMETER Experiment Name: Zm_Meristem_P Parameter: Age (day) Value: 8
  misc_feature: MA Experiment 108535 PARAMETER Experiment Name: Zm_Meristem_P Parameter: Organism Value: Zea mays
  misc_feature: MA Experiment 108535 PARAMETER Experiment Name: Zm_Meristem_P Parameter: Plant Line Value: 35A19
  misc_feature: MA Experiment 108535 PARAMETER Experiment Name: Zm_Meristem_P Parameter: Tissue Value: Root Meristem vs. Above Root Meristem
  misc_feature: MA Experiment ID: 108543 Result: Up-regulated in Transcription
  misc_feature: MA Experiment ID: 108556 Result: Down-regulated in Transcription
  misc_feature: MA Experiment 108556 PARAMETER Experiment Name: Zm_Drought_P Parameter: Age (day) Value: 9
  misc_feature: MA Experiment 108556 PARAMETER Experiment Name: Zm_Drought_P Parameter: Organism Value: Zea mays
  misc_feature: MA Experiment 108556 PARAMETER Experiment Name: Zm_Drought_P Parameter: Plant Line Value: 35A19
  misc_feature: MA Experiment 108556 PARAMETER Experiment Name: Zm_Drought_P Parameter: Timepoint (hr) Value: 24
  misc_feature: MA Experiment 108556 PARAMETER Experiment Name: Zm_Drought_P Parameter: Tissue Value: Aerial
  misc_feature: MA Experiment 108556 PARAMETER Experiment Name: Zm_Drought_P Parameter: Treatment Value: Drought vs. No Drought
  misc_feature: MA Experiment ID: 20000477 Result: Down-regulated in Transcription
  misc_feature: MA Experiment 20000477 PARAMETER Experiment Name: Zm_5mM_SA_P Parameter: Age (day) Value: 10
  misc_feature: MA Experiment 20000477 PARAMETER Experiment Name: Zm_5mM_SA_P Parameter: Organism Value: Zea mays
  misc_feature: MA Experiment 20000477 PARAMETER Experiment Name: Zm_5mM_SA_P Parameter: Plant Line Value: 35A19
  misc_feature: MA Experiment 20000477 PARAMETER Experiment Name: Zm_5mM_SA_P Parameter: Timepoint (hr) Value: 48
  misc_feature: MA Experiment 20000477 PARAMETER Experiment Name: Zm_5mM_SA_P Parameter: Tissue Value: Aerial
  misc_feature: MA Experiment 20000477 PARAMETER Experiment Name: Zm_5mM_SA_P Parameter: Treatment Value: 5mM SA vs. No Treatment
  misc_feature: MA Experiment ID: 20000478 Result: Down-regulated in Transcription
  misc_feature: MA Experiment 20000478 PARAMETER Experiment Name: Zm_5mM_SA_P Parameter: Age (day) Value: 11
  misc_feature: MA Experiment 20000478 PARAMETER Experiment Name: Zm_5mM_SA_P Parameter: Organism Value: Zea mays
  misc_feature: MA Experiment 20000478 PARAMETER Experiment Name: Zm_5mM_SA_P Parameter: Plant Line Value: 35A19
  misc_feature: MA Experiment 20000478 PARAMETER Experiment Name: Zm_5mM_SA_P Parameter: Timepoint (hr) Value: 72
  misc_feature: MA Experiment 20000478 PARAMETER Experiment Name: Zm_5mM_SA_P Parameter: Tissue Value: Aerial
  misc_feature: MA Experiment 20000478 PARAMETER Experiment Name: Zm_5mM_SA_P Parameter: Treatment Value: 5mM SA vs. No Treatment
  misc_feature: MA Experiment ID: 20000479 Result: Down-regulated in Transcription
  misc_feature: MA Experiment 20000479 PARAMETER Experiment Name: Zm_Drought_P Parameter: Age (day) Value: 10
  misc_feature: MA Experiment 20000479 PARAMETER Experiment Name: Zm_Drought_P Parameter: Organism Value: Zea mays
  misc_feature: MA Experiment 20000479 PARAMETER Experiment Name: Zm_Drought_P Parameter: Plant Line Value: 35A19
  misc_feature: MA Experiment 20000479 PARAMETER Experiment Name: Zm_Drought_P Parameter: Timepoint (hr) Value: 48
  misc_feature: MA Experiment 20000479 PARAMETER Experiment Name: Zm_Drought_P Parameter: Tissue Value: Aerial
  misc_feature: MA Experiment 20000479 PARAMETER Experiment Name: Zm_Drought_P Parameter: Treatment Value: Drought vs. No Drought
  misc_feature: MA Experiment ID: 20000480 Result: Down-regulated in Transcription
  misc_feature: MA Experiment 20000480 PARAMETER Experiment Name: Zm_Drought_P Parameter: Age (day) Value: 11
  misc_feature: MA Experiment 20000480 PARAMETER Experiment Name: Zm_Drought_P Parameter: Organism Value: Zea mays
  misc_feature: MA Experiment 20000480 PARAMETER Experiment Name: Zm_Drought_P Parameter: Plant Line Value: 35A19
  misc_feature: MA Experiment 20000480 PARAMETER Experiment Name: Zm_Drought_P Parameter: Timepoint (hr) Value: 72
  misc_feature: MA Experiment 20000480 PARAMETER Experiment Name: Zm_Drought_P Parameter: Tissue Value: Aerial
  misc_feature: MA Experiment 20000480 PARAMETER Experiment Name: Zm_Drought_P Parameter: Treatment Value: Drought vs. No Drought
  misc_feature: MA Experiment ID: 20000626 Result: Down-regulated in Transcription
  misc_feature: MA Experiment 20000626 PARAMETER Experiment Name: Zm_Herbicide-Treatments_P Parameter: Timepoint (hr) Value: 12
  misc_feature: MA Experiment 20000626 PARAMETER Experiment Name: Zm_Herbicide-Treatments_P Parameter: Tissue Value: Aerial
  misc_feature: MA Experiment 20000626 PARAMETER Experiment Name: Zm_Herbicide-Treatments_P Parameter: Treatment Value: Roundup vs. No Treatment
atcctcagctcagtctcttccactctcccttgacctgtctcctctcacctgctgactgctgtgccgctccgctccggtggcatctgcatctgcatctccatccctcgatctgtcttctctcagggtggaagaagcgtgacaatggaggctccacccgtggcgctgttcgacaccctcaaggcagccaaaccgttcttcttgttggctggtcccaacgtgattgaatcggaggagcacgtcctgaagatggccaaacacatcaaagcaattacgaccaagcttggaattccactcgtgttcaagtccagctttgataaagcaaaccgtacatcatcaaaatcgttccgtggtcctggtcttgaagaaggtctaaagatccttcaaaaggtgaaagcaacatatgaccttccgatagtcactgatgtgcacgaaagccaccagtgtgaagctgttggaagagttgctgacatcatacagattccagccttcctctgtcgccagactgatcttctagtggctgctgctaagactggaaaaattatcaatatcaagaaaggacaattctgtgcgccttctgttatggtgaactctacagagaaagtaaggcttgctgggaatccaaatgtgatggtctgtgagcgtggtaccatgtttggctacaatgatctatttgttgacccaaggaaccttgagtggctgagggaaagcaactgcccagttgtagctgatgtaacacatgctctacagcaaccagctggaagaaagcttgatggtggaggtgttgcaagcggtgggctacgagaactaataccgtgcattgcaaggacttcggttgctgttggtgttgatggtattttcatggaggtacatgatgaccccttgaatgcaccatgcgatggcccaactcaatggccattgcgcaatctggaagagctgttggaggaattaattgcaattgctcgagttaccaagggaaagaagccattcaagatcgacctcactccgttccaggagtgatctgctttggttgatagaaagcacaatgccaccatccatggaattccacagggtggatttcaatatgaattgagtacttgctattgttgggagcatacctgcagtggatgacttaggctatctctagcagatttttttatctcattccgtattttatttcctttttcaaactccactctgcaaacagtgtcaaacagtgttgtcatctacagtttcgcattccctgttttaccctatctactcgagacagtcttatcaccgaacaaactattgtgttgaaacctgccggattggtttgtgttatttc

SEQ ID NO: 5986 - protein, 291 aa, Zea mays subsp. mays
  peptide (1)..(291): Ceres Seq. ID no. 12343226
  misc_feature (1)..(291): Homolog of NCBI NO: 29367487 NR Description: putative 2-dehydro-3-deoxyphosphooctonate
  misc_feature (4)..(291): Homolog of NCBI NO: 6647535 NR Description: 2-dehydro-3-deoxyphosphooctonate aldolase
  misc_feature (8)..(291): Homolog of NCBI NO: 15219400 NR Description: 2-dehydro-3-deoxyphosphooctonate aldolase, protein id: At1g79500.1, supported by cDNA: gi_13620975,
  misc_feature (8)..(291): Homolog of NCBI NO: 21360537 NR Description: AT5g09730/F17I14_80 [Arabidopsis thaliana]
  misc_feature (8)..(291): Homolog of NCBI NO: 13620976 NR Description: 2-dehydro-3-deoxyphosphooctonate aldolase
  misc_feature (8)..(291): Homolog of NCBI NO: 15219214 NR Description: putative
  misc_feature (1)..(289): Homolog of NCBI NO: 13509333 NR Description: 3-desoxy-D-manno octulosonic acid-8-phosphate
  misc_feature (15)..(291): Homolog of NCBI NO: 25291179 NR Description: hypothetical protein F3O9.14 [imported] -
  misc_feature (55)..(237): Homolog of NCBI NO: 32169731 NR Description: 3-deoxy-D-manno-2-octulosonic acid-8-phosphate
  misc_feature (16)..(278): Homolog of NCBI NO: 34762974 NR Description: 2-dehydro-3-deoxyphosphooctonate aldolase
MEAPPVALFDTLKAAKPFFLLAGPNVIESEEHVLKMAKHIKAITTKLGIPLVFKSSFDKANRTSSKSFRGPGLEEGLKILQKVKATYDLPIVTDVHESHQCEAVGRVADIIQIPAFLCRQTDLLVAAAKTGKIINIKKGQFCAPSVMVNSTEKVRLAGNPNVMVCERGTMFGYNDLFVDPRNLEWLRESNCPVVADVTHALQQPAGRKLDGGGVASGGLRELIPCIARTSVAVGVDGIFMEVHDDPLNAPCDGPTQWPLRNLEELLEELIAIARVTKGKKPFKIDLTPFQE

SEQ ID NO: 5987 - protein, 256 aa, Zea mays subsp. mays
  peptide (1)..(256): Ceres Seq. ID no. 12343227
  misc_feature (1)..(256): Homolog of NCBI NO: 29367487 NR Description: putative 2-dehydro-3-deoxyphosphooctonate
  misc_feature (1)..(256): Homolog of NCBI NO: 6647535 NR Description: 2-dehydro-3-deoxyphosphooctonate aldolase
  misc_feature (1)..(256): Homolog of NCBI NO: 15219400 NR Description: 2-dehydro-3-deoxyphosphooctonate aldolase, protein id: At1g79500.1, supported by cDNA: gi_13620975,
  misc_feature (1)..(256): Homolog of NCBI NO: 21360537 NR Description: AT5g09730/F17I14_80 [Arabidopsis thaliana]
  misc_feature (1)..(256): Homolog of NCBI NO: 13620976 NR Description: 2-dehydro-3-deoxyphosphooctonate aldolase
  misc_feature (1)..(256): Homolog of NCBI NO: 15219214 NR Description: putative
  misc_feature (1)..(254): Homolog of NCBI NO: 13509333 NR Description: 3-desoxy-D-manno octulosonic acid-8-phosphate
  misc_feature (1)..(256): Homolog of NCBI NO: 25291179 NR Description: hypothetical protein F3O9.14 [imported] -
  misc_feature (20)..(202): Homolog of NCBI NO: 32169731 NR Description: 3-deoxy-D-manno-2-octulosonic acid-8-phosphate
  misc_feature (1)..(243): Homolog of NCBI NO: 34762974 NR Description: 2-dehydro-3-deoxyphosphooctonate aldolase
MAKHIKAITTKLGIPLVFKSSFDKANRTSSKSFRGPGLEEGLKILQKVKATYDLPIVTDVHESHQCEAVGRVADIIQIPAFLCRQTDLLVAAAKTGKIINIKKGQFCAPSVMVNSTEKVRLAGNPNVMVCERGTMFGYNDLFVDPRNLEWLRESNCPVVADVTHALQQPAGRKLDGGGVASGGLRELIPCIARTSVAVGVDGIFMEVHDDPLNAPCDGPTQWPLRNLEELLEELIAIARVTKGKKPFKIDLTPFQE

SEQ ID NO: 5988 - protein, 145 aa, Zea mays subsp. mays
  peptide (1)..(145): Ceres Seq. ID no. 12343228
  misc_feature (1)..(145): Homolog of NCBI NO: 29367487 NR Description: putative 2-dehydro-3-deoxyphosphooctonate
  misc_feature (1)..(145): Homolog of NCBI NO: 6647535 NR Description: 2-dehydro-3-deoxyphosphooctonate aldolase
  misc_feature (1)..(145): Homolog of NCBI NO: 15219400 NR Description: 2-dehydro-3-deoxyphosphooctonate aldolase, protein id: At1g79500.1, supported by cDNA: gi_13620975,
  misc_feature (1)..(145): Homolog of NCBI NO: 21360537 NR Description: AT5g09730/F17I14_80 [Arabidopsis thaliana]
  misc_feature (1)..(145): Homolog of NCBI NO: 13620976 NR Description: 2-dehydro-3-deoxyphosphooctonate aldolase
  misc_feature (1)..(145): Homolog of NCBI NO: 15219214 NR Description: putative
  misc_feature (1)..(143): Homolog of NCBI NO: 13509333 NR Description: 3-desoxy-D-manno octulosonic acid-8-phosphate
  misc_feature (1)..(145): Homolog of NCBI NO: 25291179 NR Description: hypothetical protein F3O9.14 [imported] -
  misc_feature (1)..(91): Homolog of NCBI NO: 32169731 NR Description: 3-deoxy-D-manno-2-octulosonic acid-8-phosphate
  misc_feature (1)..(132): Homolog of NCBI NO: 34762974 NR Description: 2-dehydro-3-deoxyphosphooctonate aldolase
MVNSTEKVRLAGNPNVMVCERGTMFGYNDLFVDPRNLEWLRESNCPVVADVTHALQQPAGRKLDGGGVASGGLRELIPCIARTSVAVGVDGIFMEVHDDPLNAPCDGPTQWPLRNLEELLEELIAIARVTKGKKPFKIDLTPFQE

SEQ ID NO: 5989 - DNA, 1450 bp, Zea mays subsp. mays
  misc_feature (1)..(1450): Ceres Seq. ID no. 12409243
  misc_feature: MA Experiment ID: 108523 Result: Down-regulated in Transcription
  misc_feature: MA Experiment 108523 PARAMETER Experiment Name: Zm_42deg_Heat_P Parameter: Age (day) Value: 8
  misc_feature: MA Experiment 108523 PARAMETER Experiment Name: Zm_42deg_Heat_P Parameter: Organism Value: Zea mays
  misc_feature: MA Experiment 108523 PARAMETER Experiment Name: Zm_42deg_Heat_P Parameter: Plant Line Value: 35A19
  misc_feature: MA Experiment 108523 PARAMETER Experiment Name: Zm_42deg_Heat_P Parameter: Temperature (deg C) Value: 42 vs. 22
  misc_feature: MA Experiment 108523 PARAMETER Experiment Name: Zm_42deg_Heat_P Parameter: Timepoint (hr) Value: 6
  misc_feature: MA Experiment 108523 PARAMETER Experiment Name: Zm_42deg_Heat_P Parameter: Tissue Value: Aerial
  misc_feature: MA Experiment ID: 108543 Result: Up-regulated in Transcription
  misc_feature: MA Experiment ID: 20000488 Result: Down-regulated in Transcription
  misc_feature: MA Experiment 20000488 PARAMETER Experiment Name: Zm_50mM_NH4NO3_L_to_H_P Parameter: Organism Value: Zea mays
  misc_feature: MA Experiment 20000488 PARAMETER Experiment Name: Zm_50mM_NH4NO3_L_to_H_P Parameter: Timepoint (hr) Value: 8
  misc_feature: MA Experiment 20000488 PARAMETER Experiment Name: Zm_50mM_NH4NO3_L_to_H_P Parameter: Tissue Value: Leaves
  misc_feature: MA Experiment 20000488 PARAMETER Experiment Name: Zm_50mM_NH4NO3_L_to_H_P Parameter: Treatment Value: 50mM NH4NO3 vs. 100mM Mannitol
  misc_feature: MA Experiment ID: 20000626 Result: Up-regulated in Transcription
  misc_feature: MA Experiment 20000626 PARAMETER Experiment Name: Zm_Herbicide-Treatments_P Parameter: Timepoint (hr) Value: 12
  misc_feature: MA Experiment 20000626 PARAMETER Experiment Name: Zm_Herbicide-Treatments_P Parameter: Tissue Value: Aerial
  misc_feature: MA Experiment 20000626 PARAMETER Experiment Name: Zm_Herbicide-Treatments_P Parameter: Treatment Value: Roundup vs. No Treatment
agggagacggacaaaaggagaggcgtggacacgggacgcgaggtagacagcgcccggcgtgacgtggcgcgagatggagagcggagaggggggctcaccaaactgcaagtctgtctcctgactcctcgccggcgtgccggatctcctgtctctctcgcggtcggcggccgcatagcctcgttcactcgcacgacacagggcaggggggcgatgggctgcgcgacgtccaagcagttcagcaggagcgcgccggcgcacgcggatccggccgtgctggcgacccagacctcattcacggtgaacgaggtggaggcgctgtacgagctgtacaagaagctgagctgctccatcgtcaaagacgggctcatccacaaggaggagttccagctcgccttgttcaggaacagcaggagagcgaacctctttgcagacagggtcttcgatctgttcgatctcaagcggaacggagtcatcgatttcgaggagttcgtgcggtcgctcagtgtgttccaccctaaagcagatacgtcggagaagacggcgttcgctttcaagctgtatgatctgaggggaacaggctacatcgagaaagaagagctcagagagatggtcttggcgctgcttgatgagtccgacctctgcctttcagacagcaccgtcgagacgatcgtcgataacacgttcagccaagcggactcgaacggagatggcaggatagatcctgaagaatgggaggagttcgtgaagaagaacccggcaacgttaaggaacatgactctcccctatctgcaggacatcaccatgtcatttccgagcttcataatgcgttcagaagccagtgactgaaatgtttgcgtacatctgcgtgtaaggaagcaccgttccatcagctctgctgtttgttggagcctacagcttagtccatggcacgaggcaccggagaaagttcagaatgtagcagcaacggccagcagagtgcatgagggttgctgccatagctgcaggctgcagccaaacaaaatgatgaccaaagattcatctagtgtcagcttcagggttcagatggtataccagccaacaattttctttctcggtatctaaacaccgtggatgttgcgtttaaaaaaattgttgcagaggatcaacaagtctgttcatcgaagcagtgcctgagtttagaatcagaagctaactgtctattgctgagatgctttcgtctaaatcttgcgtgtagttgtaactgcaaggaaagaataacttgtggagagttggatttgttgatgaaccttagtagttcttgacttggttagttgtttccacatttcttcgcagtgccagtgcgtgcacttgtaacttgcaaattcttctcaatccacccctaatcgaagggtggatccagttccgcatgtaatgaggcaatatcatcaatagtttatgcttcgtttatccc

SEQ ID NO: 5990 - protein, 281 aa, Zea mays subsp. mays
  peptide (1)..(281): Ceres Seq. ID no. 12409244
  misc_feature (142)..(170): Pfam Name: EF hand Pfam Description: EF hand
  misc_feature (71)..(281): Homolog of NCBI NO: 15237928 NR Description: calcium sensor homolog (gb|AAC26110.1); protein At5g24270.1, supported by cDNA: gi_11065946, supported by cDNA: supported by cDNA: gi_20465716 [Arabidopsis thaliana]
  misc_feature (73)..(281): Homolog of NCBI NO: 15217657 NR Description: calcineurin B-like protein; protein id: supported by cDNA: gi_15866275, supported by cDNA: gi_9965361
  misc_feature (71)..(281): Homolog of NCBI NO: 15238015 NR Description: calcineurin B 1; protein id: At5g47100.1, by cDNA: gi_15866278, supported by cDNA: gi_16151824 [Arabidopsis
  misc_feature (71)..(281): Homolog of NCBI NO: 18414931 NR Description: calcineurin B-like protein 1; protein id: supported by cDNA: gi_3309081 [Arabidopsis thaliana]
  misc_feature (73)..(281): Homolog of NCBI NO: 15234011 NR Description: putative protein (fragment); protein id:
  misc_feature (73)..(281): Homolog of NCBI NO: 30689575 NR Description: calcineurin B-like protein (fragment) thaliana] >gi|26449967|dbj|BAC42104.1| unknown protein
  misc_feature (73)..(281): Homolog of NCBI NO: 25295757 NR Description: protein F1N19.5 [imported] - Arabidopsis thaliana
  misc_feature (88)..(281): Homolog of NCBI NO: 16924116 NR Description: putative calcineurin B-like protein [Oryza sativa]
  misc_feature (88)..(281): Homolog of NCBI NO: 15236778 NR Description: calcineurin B-like protein 3; protein id: supported by cDNA: gi_18253012, supported by cDNA: gi_3309085
  misc_feature (88)..(281): Homolog of NCBI NO: 22137326 NR Description: calcineurin B [Pisum sativum]
RETDKRRGVDTGREVDSARRDVARDGERRGGLTKLQVCLLTPRRRAGSPVSLAVGGRIASFTRTTQGRGAMGCATSKQFSRSAPAHADPAVLATQTSFTVNEVEALYELYKKLSCSIVKDGLIHKEEFQLALFRNSRRANLFADRVFDLFDLKRNGVIDFEEFVRSLSVFHPKADTSEKTAFAFKLYDLRGTGYIEKEELREMVLALLDESDLCLSDSTVETIVDNTFSQADSNGDGRIDPEEWEEFVKKNPATLRNMTLPYLQDITMSFPSFIMRSEASD

SEQ ID NO: 5991 - protein, 211 aa, Zea mays subsp. mays
  peptide (1)..(211): Ceres Seq. ID no. 12409245
  misc_feature (72)..(100): Pfam Name: EF hand Pfam Description: EF hand
  misc_feature (1)..(211): Homolog of NCBI NO: 15237928 NR Description: calcium sensor homolog (gb|AAC26110.1); protein At5g24270.1, supported by cDNA: gi_11065946, supported by cDNA: supported by cDNA: gi_20465716 [Arabidopsis thaliana]
  misc_feature (3)..(211): Homolog of NCBI NO: 15217657 NR Description: calcineurin B-like protein; protein id: supported by cDNA: gi_15866275, supported by cDNA: gi_9965361
  misc_feature (1)..(211): Homolog of NCBI NO: 15238015 NR Description: calcineurin B 1; protein id: At5g47100.1, by cDNA: gi_15866278, supported by cDNA: gi_16151824 [Arabidopsis
  misc_feature (1)..(211): Homolog of NCBI NO: 18414931 NR Description: calcineurin B-like protein 1; protein id: supported by cDNA: gi_3309081 [Arabidopsis thaliana]
  misc_feature (3)..(211): Homolog of NCBI NO: 15234011 NR Description: putative protein (fragment); protein id:
  misc_feature (3)..(211): Homolog of NCBI NO: 30689575 NR Description: calcineurin B-like protein (fragment) thaliana] >gi|26449967|dbj|BAC42104.1| unknown protein
  misc_feature (3)..(211): Homolog of NCBI NO: 25295757 NR Description: protein F1N19.5 [imported] - Arabidopsis thaliana
  misc_feature (18)..(211): Homolog of NCBI NO: 16924116 NR Description: putative calcineurin B-like protein [Oryza sativa]
  misc_feature (18)..(211): Homolog of NCBI NO: 15236778 NR Description: calcineurin B-like protein 3; protein id: supported by cDNA: gi_18253012, supported by cDNA: gi_3309085
  misc_feature (18)..(211): Homolog of NCBI NO: 22137326 NR Description: calcineurin B [Pisum sativum]
MGCATSKQFSRSAPAHADPAVLATQTSFTVNEVEALYELYKKLSCSIVKDGLIHKEEFQLALFRNSRRANLFADRVFDLFDLKRNGVIDFEEFVRSLSVFHPKADTSEKTAFAFKLYDLRGTGYIEKEELREMVLALLDESDLCLSDSTVETIVDNTFSQADSNGDGRIDPEEWEEFVKKNPATLRNMTLPYLQDITMSFPSFIMRSEASD

SEQ ID NO: 5992 - DNA, 1764 bp, Zea mays subsp. mays; identical to SEQ ID NO: 1515
  misc_feature (1)..(1764): Ceres Seq. ID no. 13636367
  misc_feature: MA Experiment ID: 108535 Result: Up-regulated in Transcription
  misc_feature: MA Experiment 108535 PARAMETER Experiment Name: Zm_Meristem_P Parameter: Age (day) Value: 8
  misc_feature: MA Experiment 108535 PARAMETER Experiment Name: Zm_Meristem_P Parameter: Organism Value: Zea mays
  misc_feature: MA Experiment 108535 PARAMETER Experiment Name: Zm_Meristem_P Parameter: Plant Line Value: 35A19
  misc_feature: MA Experiment 108535 PARAMETER Experiment Name: Zm_Meristem_P Parameter: Tissue Value: Root Meristem vs. Above Root Meristem
  misc_feature: MA Experiment ID: 108544 Result: Down-regulated in Transcription
  misc_feature: MA Experiment ID: 108556 Result: Down-regulated in Transcription
  misc_feature: MA Experiment 108556 PARAMETER Experiment Name: Zm_Drought_P Parameter: Age (day) Value: 9
  misc_feature: MA Experiment 108556 PARAMETER Experiment Name: Zm_Drought_P Parameter: Organism Value: Zea mays
  misc_feature: MA Experiment 108556 PARAMETER Experiment Name: Zm_Drought_P Parameter: Plant Line Value: 35A19
  misc_feature: MA Experiment 108556 PARAMETER Experiment Name: Zm_Drought_P Parameter: Timepoint (hr) Value: 24
  misc_feature: MA Experiment 108556 PARAMETER Experiment Name: Zm_Drought_P Parameter: Tissue Value: Aerial
  misc_feature: MA Experiment 108556 PARAMETER Experiment Name: Zm_Drought_P Parameter: Treatment Value: Drought vs. No Drought
  misc_feature: MA Experiment ID: 108689 Result: Up-regulated in Transcription
  misc_feature: MA Experiment 108689 PARAMETER Experiment Name: Zm_Drought_Roots_P Parameter: Age (day) Value: 9
  misc_feature: MA Experiment 108689 PARAMETER Experiment Name: Zm_Drought_Roots_P Parameter: Organism Value: Zea mays
  misc_feature: MA Experiment 108689 PARAMETER Experiment Name: Zm_Drought_Roots_P Parameter: Plant Line Value: 35A19
  misc_feature: MA Experiment 108689 PARAMETER Experiment Name: Zm_Drought_Roots_P Parameter: Timepoint (hr) Value: 24
  misc_feature: MA Experiment 108689 PARAMETER Experiment Name: Zm_Drought_Roots_P Parameter: Tissue Value: Roots
  misc_feature: MA Experiment 108689 PARAMETER Experiment Name: Zm_Drought_Roots_P Parameter: Treatment Value: Drought vs. No Drought
  misc_feature: MA Experiment ID: 20000477 Result: Down-regulated in Transcription
  misc_feature: MA Experiment 20000477 PARAMETER Experiment Name: Zm_5mM_SA_P Parameter: Age (day) Value: 10
  misc_feature: MA Experiment 20000477 PARAMETER Experiment Name: Zm_5mM_SA_P Parameter: Organism Value: Zea mays
  misc_feature: MA Experiment 20000477 PARAMETER Experiment Name: Zm_5mM_SA_P Parameter: Plant Line Value: 35A19
  misc_feature: MA Experiment 20000477 PARAMETER Experiment Name: Zm_5mM_SA_P Parameter: Timepoint (hr) Value: 48
  misc_feature: MA Experiment 20000477 PARAMETER Experiment Name: Zm_5mM_SA_P Parameter: Tissue Value: Aerial
  misc_feature: MA Experiment 20000477 PARAMETER Experiment Name: Zm_5mM_SA_P Parameter: Treatment Value: 5mM SA vs. No Treatment
  misc_feature: MA Experiment ID: 20000478 Result: Down-regulated in Transcription
  misc_feature: MA Experiment 20000478 PARAMETER Experiment Name: Zm_5mM_SA_P Parameter: Age (day) Value: 11
  misc_feature: MA Experiment 20000478 PARAMETER Experiment Name: Zm_5mM_SA_P Parameter: Organism Value: Zea mays
  misc_feature: MA Experiment 20000478 PARAMETER Experiment Name: Zm_5mM_SA_P Parameter: Plant Line Value: 35A19
  misc_feature: MA Experiment 20000478 PARAMETER Experiment Name: Zm_5mM_SA_P Parameter: Timepoint (hr) Value: 72
  misc_feature: MA Experiment 20000478 PARAMETER Experiment Name: Zm_5mM_SA_P Parameter: Tissue Value: Aerial
  misc_feature: MA Experiment 20000478 PARAMETER Experiment Name: Zm_5mM_SA_P Parameter: Treatment Value: 5mM SA vs. No Treatment
  misc_feature: MA Experiment ID: 20000479 Result: Down-regulated in Transcription
  misc_feature: MA Experiment 20000479 PARAMETER Experiment Name: Zm_Drought_P Parameter: Age (day) Value: 10
  misc_feature: MA Experiment 20000479 PARAMETER Experiment Name: Zm_Drought_P Parameter: Organism Value: Zea mays
  misc_feature: MA Experiment 20000479 PARAMETER Experiment Name: Zm_Drought_P Parameter: Plant Line Value: 35A19
  misc_feature: MA Experiment 20000479 PARAMETER Experiment Name: Zm_Drought_P Parameter: Timepoint (hr) Value: 48
  misc_feature: MA Experiment 20000479 PARAMETER Experiment Name: Zm_Drought_P Parameter: Tissue Value: Aerial
  misc_feature: MA Experiment 20000479 PARAMETER Experiment Name: Zm_Drought_P Parameter: Treatment Value: Drought vs. No Drought
  misc_feature: MA Experiment ID: 20000480 Result: Down-regulated in Transcription
  misc_feature: MA Experiment 20000480 PARAMETER Experiment Name: Zm_Drought_P Parameter: Age (day) Value: 11
  misc_feature: MA Experiment 20000480 PARAMETER Experiment Name: Zm_Drought_P Parameter: Organism Value: Zea mays
  misc_feature: MA Experiment 20000480 PARAMETER Experiment Name: Zm_Drought_P Parameter: Plant Line Value: 35A19
  misc_feature: MA Experiment 20000480 PARAMETER Experiment Name: Zm_Drought_P Parameter: Timepoint (hr) Value: 72
  misc_feature: MA Experiment 20000480 PARAMETER Experiment Name: Zm_Drought_P Parameter: Tissue Value: Aerial
  misc_feature: MA Experiment 20000480 PARAMETER Experiment Name: Zm_Drought_P Parameter: Treatment Value: Drought vs. No Drought
  misc_feature: MA Experiment ID: 20000535 Result: Up-regulated in Transcription
  misc_feature: MA Experiment 20000535 PARAMETER Experiment Name: Zm_Hybrid_Seed_Dev_P Parameter: DAP Value: 30 vs. 12
  misc_feature: MA Experiment 20000535 PARAMETER Experiment Name: Zm_Hybrid_Seed_Dev_P Parameter: Organism Value: Zea mays
  misc_feature: MA Experiment 20000535 PARAMETER Experiment Name: Zm_Hybrid_Seed_Dev_P Parameter: Plant Line Value: 35A19
  misc_feature: MA Experiment 20000535 PARAMETER Experiment Name: Zm_Hybrid_Seed_Dev_P Parameter: Tissue Value: Embryo vs. Unfert Floret
  misc_feature: MA Experiment ID: 20001610 Result: Up-regulated in Transcription
  misc_feature: MA Experiment 20001610 PARAMETER Experiment Name: Zm_50ppm_KNO3_L-to-H_P Parameter: Age (day) Value: 19
  misc_feature: MA Experiment 20001610 PARAMETER Experiment Name: Zm_50ppm_KNO3_L-to-H_P Parameter: Organism Value: Zea mays
  misc_feature: MA Experiment 20001610 PARAMETER Experiment Name: Zm_50ppm_KNO3_L-to-H_P Parameter: Plant Line Value: 35A19
  misc_feature: MA Experiment 20001610 PARAMETER Experiment Name: Zm_50ppm_KNO3_L-to-H_P Parameter: Timepoint (hr) Value: 2
  misc_feature: MA Experiment 20001610 PARAMETER Experiment Name: Zm_50ppm_KNO3_L-to-H_P Parameter: Tissue Value: Roots
  misc_feature: MA Experiment 20001610 PARAMETER Experiment Name: Zm_50ppm_KNO3_L-to-H_P Parameter: Treatment Value: 50ppm KNO3 vs. 50ppm KCl

SEQ ID NO: 5993 - protein, 456 aa, Zea mays subsp. mays; identical to SEQ ID NO: 1516
  peptide (1)..(456): Ceres Seq. ID no. 13636368
  misc_feature (162)..(414): Pfam Name: Fatty acid desaturase Pfam Description: Fatty acid desaturase
  misc_feature (162)..(414): Pfam Name: Fatty acid desaturase Pfam Description: Fatty acid desaturase
  misc_feature (65)..(452): Homolog of NCBI NO: 28371827 NR Description: delta-12 oleate desaturase [Punica granatum]
  misc_feature (65)..(452): Homolog of NCBI NO: 28564441 NR Description: delta 12-acyl-lipid-desaturase [Punica granatum]
  misc_feature (65)..(456): Homolog of NCBI NO: 27261181 NR Description: delta 12 oleic acid desaturase FAD2 [Vernicia
  misc_feature (65)..(456): Homolog of NCBI NO: 34903462 NR Description: putative omega-6 fatty acid desaturase [Oryza
  misc_feature (65)..(456): Homolog of NCBI NO: 8886726 NR Description: omega-6 fatty acid desaturase [Sesamum indicum]
  misc_feature (65)..(452): Homolog of NCBI NO: 28564441 NR Description: delta 12-acyl-lipid-desaturase [Punica granatum]
  misc_feature (65)..(456): Homolog of NCBI NO: 34903462 NR Description: putative omega-6 fatty acid desaturase [Oryza
  misc_feature (248)..(455): Homolog of NCBI NO: 32421083 NR Description: hypothetical protein [Neurospora crassa]
  misc_feature (65)..(455): Homolog of NCBI NO: 17225582 NR Description: delta-12 fatty acid desaturase [Gossypium
  misc_feature (65)..(455): Homolog of NCBI NO: 7433295 NR Description: omega-6 desaturase, microsomal - upland cotton
  misc_feature (65)..(455): Homolog of NCBI NO: 4378875 NR Description: delta-12 desaturase [Brassica carinata]
  misc_feature (65)..(455): Homolog of NCBI NO: 1345977 NR Description: Omega-6 fatty acid desaturase, endoplasmic
  misc_feature (65)..(456): Homolog of NCBI NO: 8886726 NR Description: omega-6 fatty acid desaturase [Sesamum indicum]
  misc_feature (65)..(456): Homolog of NCBI NO: 27261181 NR Description: delta 12 oleic acid desaturase FAD2 [Vernicia
  misc_feature (65)..(452): Homolog of NCBI NO: 28371827 NR Description: delta-12 oleate desaturase [Punica granatum]
  misc_feature (65)..(455): Homolog of NCBI NO: 1345977 NR Description: Omega-6 fatty acid desaturase, endoplasmic
  misc_feature (65)..(455): Homolog of NCBI NO: 4378875 NR Description: delta-12 desaturase [Brassica carinata]
  misc_feature (65)..(455): Homolog of NCBI NO: 7433295 NR Description: omega-6 desaturase, microsomal - upland cotton
  misc_feature (65)..(455): Homolog of NCBI NO: 17225582 NR Description: delta-12 fatty acid desaturase [Gossypium
  misc_feature (248)..(455): Homolog of NCBI NO: 32421083 NR Description: hypothetical protein [Neurospora crassa]

SEQ ID NO: 5994 - protein, 392 aa, Zea mays subsp. mays; identical to SEQ ID NO: 1517
  peptide (1)..(392): Ceres Seq. ID no. 13636369
  misc_feature (98)..(350): Pfam Name: Fatty acid desaturase Pfam Description: Fatty acid desaturase
  misc_feature (98)..(350): Pfam Name: Fatty acid desaturase Pfam Description: Fatty acid desaturase
  misc_feature (1)..(388): Homolog of NCBI NO: 28371827 NR Description: delta-12 oleate desaturase [Punica granatum]
  misc_feature (1)..(388): Homolog of NCBI NO: 28564441 NR Description: delta 12-acyl-lipid-desaturase [Punica granatum]
  misc_feature (1)..(392): Homolog of NCBI NO: 27261181 NR Description: delta 12 oleic acid desaturase FAD2 [Vernicia
  misc_feature (1)..(392): Homolog of NCBI NO: 34903462 NR Description: putative omega-6 fatty acid desaturase [Oryza
  misc_feature (1)..(392): Homolog of NCBI NO: 8886726 NR Description: omega-6 fatty acid desaturase [Sesamum indicum]
  misc_feature (1)..(388): Homolog of NCBI NO: 28564441 NR Description: delta 12-acyl-lipid-desaturase [Punica granatum]
  misc_feature (1)..(392): Homolog of NCBI NO: 34903462 NR Description: putative omega-6 fatty acid desaturase [Oryza
  misc_feature (184)..(391): Homolog of NCBI NO: 32421083 NR Description: hypothetical protein [Neurospora crassa]
  misc_feature (1)..(391): Homolog of NCBI NO: 17225582 NR Description: delta-12 fatty acid desaturase [Gossypium
  misc_feature (1)..(391): Homolog of NCBI NO: 7433295 NR Description: omega-6 desaturase, microsomal - upland cotton
  misc_feature (1)..(391): Homolog of NCBI NO: 4378875 NR Description: delta-12 desaturase [Brassica carinata]
  misc_feature (1)..(391): Homolog of NCBI NO: 1345977 NR Description: Omega-6 fatty acid desaturase, endoplasmic
  misc_feature (1)..(392): Homolog of NCBI NO: 8886726 NR Description: omega-6 fatty acid desaturase [Sesamum indicum]
  misc_feature (1)..(392): Homolog of NCBI NO: 27261181 NR Description: delta 12 oleic acid desaturase FAD2 [Vernicia
  misc_feature (1)..(388): Homolog of NCBI NO: 28371827 NR Description: delta-12 oleate desaturase [Punica granatum]
  misc_feature (1)..(391): Homolog of NCBI NO: 1345977 NR Description: Omega-6 fatty acid desaturase, endoplasmic
  misc_feature (1)..(391): Homolog of NCBI NO: 4378875 NR Description: delta-12 desaturase [Brassica carinata]
  misc_feature (1)..(391): Homolog of NCBI NO: 7433295 NR Description: omega-6 desaturase, microsomal - upland cotton
  misc_feature (1)..(391): Homolog of NCBI NO: 17225582 NR Description: delta-12 fatty acid desaturase [Gossypium
  misc_feature (184)..(391): Homolog of NCBI NO: 32421083 NR Description: hypothetical protein [Neurospora crassa]

SEQ ID NO: 5995 - protein, 386 aa, Zea mays subsp. mays; identical to SEQ ID NO: 1518
  peptide (1)..(386): Ceres Seq. ID no. 13636370
  misc_feature (92)..(344): Pfam Name: Fatty acid desaturase Pfam Description: Fatty acid desaturase
  misc_feature (92)..(344): Pfam Name: Fatty acid desaturase Pfam Description: Fatty acid desaturase
  misc_feature (1)..(382): Homolog of NCBI NO: 28371827 NR Description: delta-12 oleate desaturase [Punica granatum]
  misc_feature (1)..(382): Homolog of NCBI NO: 28564441 NR Description: delta 12-acyl-lipid-desaturase [Punica granatum]
  misc_feature (1)..(386): Homolog of NCBI NO: 27261181 NR Description: delta 12 oleic acid desaturase FAD2 [Vernicia
  misc_feature (1)..(386): Homolog of NCBI NO: 34903462 NR Description: putative omega-6 fatty acid desaturase [Oryza
  misc_feature (1)..(386): Homolog of NCBI NO: 8886726 NR Description: omega-6 fatty acid desaturase [Sesamum indicum]
  misc_feature (1)..(382): Homolog of NCBI NO: 28564441 NR Description: delta 12-acyl-lipid-desaturase [Punica granatum]
  misc_feature (1)..(386): Homolog of NCBI NO: 34903462 NR Description: putative omega-6 fatty acid desaturase [Oryza
  misc_feature (178)..(385): Homolog of NCBI NO: 32421083 NR Description: hypothetical protein [Neurospora crassa]
  misc_feature (1)..(385): Homolog of NCBI NO: 17225582 NR Description: delta-12 fatty acid desaturase [Gossypium
  misc_feature (1)..(385): Homolog of NCBI NO: 7433295 NR Description: omega-6 desaturase, microsomal - upland cotton
  misc_feature (1)..(385): Homolog of NCBI NO: 4378875 NR Description: delta-12 desaturase [Brassica carinata]
  misc_feature (1)..(385): Homolog of NCBI NO: 1345977 NR Description: Omega-6 fatty acid desaturase, endoplasmic
  misc_feature (1)..(386): Homolog of NCBI NO: 8886726 NR Description: omega-6 fatty acid desaturase [Sesamum indicum]
  misc_feature (1)..(386): Homolog of NCBI NO: 27261181 NR Description: delta 12 oleic acid desaturase FAD2 [Vernicia
  misc_feature (1)..(382): Homolog of NCBI NO: 28371827 NR Description: delta-12 oleate desaturase [Punica granatum]
  misc_feature (1)..(385): Homolog of NCBI NO: 1345977 NR Description: Omega-6 fatty acid desaturase, endoplasmic
  misc_feature (1)..(385): Homolog of NCBI NO: 4378875 NR Description: delta-12 desaturase [Brassica carinata]
  misc_feature (1)..(385): Homolog of NCBI NO: 7433295 NR Description: omega-6 desaturase, microsomal - upland cotton
  misc_feature (1)..(385): Homolog of NCBI NO: 17225582 NR Description: delta-12 fatty acid desaturase [Gossypium
  misc_feature (178)..(385): Homolog of NCBI NO: 32421083 NR Description: hypothetical protein [Neurospora crassa]

SEQ ID NO: 5996 - DNA, 1386 bp, Zea mays subsp. mays
  misc_feature (1)..(1386): Ceres Seq. ID no. 13493626
  misc_feature: MA Experiment ID: 108504 Result: Up-regulated in Transcription
  misc_feature: MA Experiment 108504 PARAMETER Experiment Name: Zm_Drought_P Parameter: Age (day) Value: 8
  misc_feature: MA Experiment 108504 PARAMETER Experiment Name: Zm_Drought_P Parameter: Organism Value: Zea mays
  misc_feature: MA Experiment 108504 PARAMETER Experiment Name: Zm_Drought_P Parameter: Plant Line Value: 35A19
  misc_feature: MA Experiment 108504 PARAMETER Experiment Name: Zm_Drought_P Parameter: Timepoint (hr) Value: 12
  misc_feature: MA Experiment 108504 PARAMETER Experiment Name: Zm_Drought_P Parameter: Tissue Value: Aerial
  misc_feature: MA Experiment 108504 PARAMETER Experiment Name: Zm_Drought_P Parameter: Treatment Value: Drought vs. No Drought
  misc_feature: MA Experiment ID: 108522 Result: Up-regulated in Transcription
  misc_feature: MA Experiment 108522 PARAMETER Experiment Name: Zm_42deg_Heat_P Parameter: Age (day) Value: 8
  misc_feature: MA Experiment 108522 PARAMETER Experiment Name: Zm_42deg_Heat_P Parameter: Organism Value: Zea mays
  misc_feature: MA Experiment 108522 PARAMETER Experiment Name: Zm_42deg_Heat_P Parameter: Plant Line Value: 35A19
  misc_feature: MA Experiment 108522 PARAMETER Experiment Name: Zm_42deg_Heat_P Parameter: Temperature (deg C) Value: 42 vs. 22
  misc_feature: MA Experiment 108522 PARAMETER Experiment Name: Zm_42deg_Heat_P Parameter: Timepoint (hr) Value: 1
  misc_feature: MA Experiment 108522 PARAMETER Experiment Name: Zm_42deg_Heat_P Parameter: Tissue Value: Aerial
  misc_feature: MA Experiment ID: 108523 Result: Up-regulated in Transcription
  misc_feature: MA Experiment 108523 PARAMETER Experiment Name: Zm_42deg_Heat_P Parameter: Age (day) Value: 8
  misc_feature: MA Experiment 108523 PARAMETER Experiment Name: Zm_42deg_Heat_P Parameter: Organism Value: Zea mays
  misc_feature: MA Experiment 108523 PARAMETER Experiment Name: Zm_42deg_Heat_P Parameter: Plant Line Value: 35A19
  misc_feature: MA Experiment 108523 PARAMETER Experiment Name: Zm_42deg_Heat_P Parameter: Temperature (deg C) Value: 42 vs. 22
  misc_feature: MA Experiment 108523 PARAMETER Experiment Name: Zm_42deg_Heat_P Parameter: Timepoint (hr) Value: 6
  misc_feature: MA Experiment 108523 PARAMETER Experiment Name: Zm_42deg_Heat_P Parameter: Tissue Value: Aerial
  misc_feature: MA Experiment ID: 108526 Result: Up-regulated in Transcription
  misc_feature: MA Experiment 108526 PARAMETER Experiment Name: Zm_5mM_NO_P Parameter: Age (day) Value: 8
  misc_feature: MA Experiment 108526 PARAMETER Experiment Name: Zm_5mM_NO_P Parameter: Organism Value: Zea mays
  misc_feature: MA Experiment 108526 PARAMETER Experiment Name: Zm_5mM_NO_P Parameter: Plant Line Value: 35A19
  misc_feature: MA Experiment 108526 PARAMETER Experiment Name: Zm_5mM_NO_P Parameter: Timepoint (hr) Value: 1
  misc_feature: MA Experiment 108526 PARAMETER Experiment Name: Zm_5mM_NO_P Parameter: Tissue Value: Aerial
  misc_feature: MA Experiment 108526 PARAMETER Experiment Name: Zm_5mM_NO_P Parameter: Treatment Value: 5mM NO vs. No Treatment
  misc_feature: MA Experiment ID: 108527 Result: Up-regulated in Transcription
  misc_feature: MA Experiment 108527 PARAMETER Experiment Name: Zm_5mM_NO_P Parameter: Age (day) Value: 8
  misc_feature: MA Experiment 108527 PARAMETER Experiment Name: Zm_5mM_NO_P Parameter: Organism Value: Zea mays
  misc_feature: MA Experiment 108527 PARAMETER Experiment Name: Zm_5mM_NO_P Parameter: Plant Line Value: 35A19
  misc_feature: MA Experiment 108527 PARAMETER Experiment Name: Zm_5mM_NO_P Parameter: Timepoint (hr) Value: 6
  misc_feature: MA Experiment 108527 PARAMETER Experiment Name: Zm_5mM_NO_P Parameter: Tissue Value: Aerial
  misc_feature: MA Experiment 108527 PARAMETER Experiment Name: Zm_5mM_NO_P Parameter: Treatment Value: 5mM NO vs. No Treatment
  misc_feature: MA Experiment ID: 108530 Result: Up-regulated in Transcription
  misc_feature: MA Experiment 108530 PARAMETER Experiment Name: Zm_Imbibed_Seeds_P Parameter: Age (day) Value: 6 vs. 2
  misc_feature: MA Experiment 108530 PARAMETER Experiment Name: Zm_Imbibed_Seeds_P Parameter: Organism Value: Zea mays
  misc_feature: MA Experiment 108530 PARAMETER Experiment Name: Zm_Imbibed_Seeds_P Parameter: Plant Line Value: 35A19
  misc_feature: MA Experiment 108530 PARAMETER Experiment Name: Zm_Imbibed_Seeds_P Parameter: Tissue Value: Aerial vs. Embryo
  misc_feature: MA Experiment ID: 108536 Result: Up-regulated in Transcription
  misc_feature: MA Experiment 108536 PARAMETER Experiment Name: Zm_Meristem_P Parameter: Age (day) Value: 8
  misc_feature: MA Experiment 108536 PARAMETER Experiment Name: Zm_Meristem_P Parameter: Organism Value: Zea mays
  misc_feature: MA Experiment 108536 PARAMETER Experiment Name: Zm_Meristem_P Parameter: Plant Line Value: 35A19
  misc_feature: MA Experiment 108536 PARAMETER Experiment Name: Zm_Meristem_P Parameter: Tissue Value: Shoot Meristem vs. Above Shoot Meristem
  misc_feature: MA Experiment ID: 108540 Result: Up-regulated in Transcription
  misc_feature: MA Experiment 108540 PARAMETER Experiment Name: Zm_20percent_PEG_P Parameter: Age (day) Value: 8
  misc_feature: MA Experiment 108540 PARAMETER Experiment Name: Zm_20percent_PEG_P Parameter: Organism Value: Zea mays
  misc_feature: MA Experiment 108540 PARAMETER Experiment Name: Zm_20percent_PEG_P Parameter: Plant Line Value: 35A19
  misc_feature: MA Experiment 108540 PARAMETER Experiment Name: Zm_20percent_PEG_P Parameter: Timepoint (hr) Value: 6
  misc_feature: MA Experiment 108540 PARAMETER Experiment Name: Zm_20percent_PEG_P Parameter: Tissue Value: Aerial
  misc_feature: MA Experiment 108540 PARAMETER Experiment Name: Zm_20percent_PEG_P Parameter: Treatment Value: 20percent PEG vs. No Treatment
  misc_feature: MA Experiment ID: 108556 Result: Up-regulated in Transcription
  misc_feature: MA Experiment 108556 PARAMETER Experiment Name: Zm_Drought_P Parameter: Age (day) Value: 9
  misc_feature: MA Experiment 108556 PARAMETER Experiment Name: Zm_Drought_P Parameter: Organism Value: Zea mays
  misc_feature: MA Experiment 108556 PARAMETER Experiment Name: Zm_Drought_P Parameter: Plant Line Value: 35A19
  misc_feature: MA Experiment 108556 PARAMETER Experiment Name: Zm_Drought_P Parameter: Timepoint (hr) Value: 24
  misc_feature: MA Experiment 108556 PARAMETER Experiment Name: Zm_Drought_P Parameter: Tissue Value: Aerial
  misc_feature: MA Experiment 108556 PARAMETER Experiment Name: Zm_Drought_P Parameter: Treatment Value: Drought vs. No Drought
  misc_feature: MA Experiment ID: 108559 Result: Up-regulated in Transcription
  misc_feature: MA Experiment 108559 PARAMETER Experiment Name: Zm_5mM_NO_P Parameter: Age (day) Value: 8
  misc_feature: MA Experiment 108559 PARAMETER Experiment Name: Zm_5mM_NO_P Parameter: Organism Value: Zea mays
  misc_feature: MA Experiment 108559 PARAMETER Experiment Name: Zm_5mM_NO_P Parameter: Plant Line Value: 35A19
  misc_feature: MA Experiment 108559 PARAMETER Experiment Name: Zm_5mM_NO_P Parameter: Timepoint (hr) Value: 12
  misc_feature: MA Experiment 108559 PARAMETER Experiment Name: Zm_5mM_NO_P Parameter: Tissue Value: Aerial
  misc_feature: MA Experiment 108559 PARAMETER Experiment Name: Zm_5mM_NO_P Parameter: Treatment Value: 5mM NO vs. No Treatment
  misc_feature: MA Experiment ID: 108597 Result: Up-regulated in Transcription
  misc_feature: MA Experiment 108597 PARAMETER Experiment Name: Zm_100uM_ABA_P Parameter: Age (day) Value: 9
  misc_feature: MA Experiment 108597 PARAMETER Experiment Name: Zm_100uM_ABA_P Parameter: Organism Value: Zea mays
  misc_feature: MA Experiment 108597 PARAMETER Experiment Name: Zm_100uM_ABA_P Parameter: Plant Line Value: 35A19
  misc_feature: MA Experiment 108597 PARAMETER Experiment Name: Zm_100uM_ABA_P Parameter: Timepoint (hr) Value: 24
  misc_feature: MA Experiment 108597 PARAMETER Experiment Name: Zm_100uM_ABA_P Parameter: Tissue Value: Aerial
  misc_feature: MA Experiment 108597 PARAMETER Experiment Name: Zm_100uM_ABA_P Parameter: Treatment Value: 100uM ABA vs. No Treatment
  misc_feature: MA Experiment ID: 20000477 Result: Up-regulated in Transcription
  misc_feature: MA Experiment 20000477 PARAMETER Experiment Name: Zm_5mM_SA_P Parameter: Age (day) Value: 10
  misc_feature: MA Experiment 20000477 PARAMETER Experiment Name: Zm_5mM_SA_P Parameter: Organism Value: Zea mays
  misc_feature: MA Experiment 20000477 PARAMETER Experiment Name: Zm_5mM_SA_P Parameter: Plant Line Value: 35A19
  misc_feature: MA Experiment 20000477 PARAMETER Experiment Name: Zm_5mM_SA_P Parameter: Timepoint (hr) Value: 48
  misc_feature: MA Experiment 20000477 PARAMETER Experiment Name: Zm_5mM_SA_P Parameter: Tissue Value: Aerial
  misc_feature: MA Experiment 20000477 PARAMETER Experiment Name: Zm_5mM_SA_P Parameter: Treatment Value: 5mM SA vs. No Treatment
  misc_feature: MA Experiment ID: 20000478 Result: Up-regulated in Transcription
  misc_feature: MA Experiment 20000478 PARAMETER Experiment Name: Zm_5mM_SA_P Parameter: Age (day) Value: 11
  misc_feature: MA Experiment 20000478 PARAMETER Experiment Name: Zm_5mM_SA_P Parameter: Organism Value: Zea mays
  misc_feature: MA Experiment 20000478 PARAMETER Experiment Name: Zm_5mM_SA_P Parameter: Plant Line Value: 35A19
  misc_feature: MA Experiment 20000478 PARAMETER Experiment Name: Zm_5mM_SA_P Parameter: Timepoint (hr) Value: 72
  misc_feature: MA Experiment 20000478 PARAMETER Experiment Name: Zm_5mM_SA_P Parameter: Tissue Value: Aerial
  misc_feature: MA Experiment 20000478 PARAMETER Experiment Name: Zm_5mM_SA_P Parameter: Treatment Value: 5mM SA vs. No Treatment
  misc_feature: MA Experiment ID: 20000479 Result: Up-regulated in Transcription
  misc_feature: MA Experiment 20000479 PARAMETER Experiment Name: Zm_Drought_P Parameter: Age (day) Value: 10
  misc_feature: MA Experiment 20000479 PARAMETER Experiment Name: Zm_Drought_P Parameter: Organism Value: Zea mays
  misc_feature: MA Experiment 20000479 PARAMETER Experiment Name: Zm_Drought_P Parameter: Plant Line Value: 35A19
  misc_feature: MA Experiment 20000479 PARAMETER Experiment Name: Zm_Drought_P Parameter: Timepoint (hr) Value: 48
  misc_feature: MA Experiment 20000479 PARAMETER Experiment Name: Zm_Drought_P Parameter: Tissue Value: Aerial
  misc_feature: MA Experiment 20000479 PARAMETER Experiment Name: Zm_Drought_P Parameter: Treatment Value: Drought vs. No Drought
  misc_feature: MA Experiment ID: 20000480 Result: Up-regulated in Transcription
  misc_feature: MA Experiment 20000480 PARAMETER Experiment Name: Zm_Drought_P Parameter: Age (day) Value: 11
  misc_feature: MA Experiment 20000480 PARAMETER Experiment Name: Zm_Drought_P Parameter: Organism Value: Zea mays
  misc_feature: MA Experiment 20000480 PARAMETER Experiment Name: Zm_Drought_P Parameter: Plant Line Value: 35A19
  misc_feature: MA Experiment 20000480 PARAMETER Experiment Name: Zm_Drought_P Parameter: Timepoint (hr) Value: 72
  misc_feature: MA Experiment 20000480 PARAMETER Experiment Name: Zm_Drought_P Parameter: Tissue Value: Aerial
  misc_feature: MA Experiment 20000480 PARAMETER Experiment Name: Zm_Drought_P Parameter: Treatment Value: Drought vs. No Drought
  misc_feature: MA Experiment ID: 20000492 Result: Down-regulated in Transcription
  misc_feature: MA Experiment 20000492 PARAMETER Experiment Name: Zm_Hybrid_Seed_Dev_P Parameter: DAP Value: 12
  misc_feature: MA Experiment 20000492 PARAMETER Experiment Name: Zm_Hybrid_Seed_Dev_P Parameter: Organism Value: Zea mays
  misc_feature: MA Experiment 20000492 PARAMETER Experiment Name: Zm_Hybrid_Seed_Dev_P Parameter: Plant Line Value: 35A19
  misc_feature: MA Experiment 20000492 PARAMETER Experiment Name: Zm_Hybrid_Seed_Dev_P Parameter: Tissue Value: Fert Kernel vs. Unfert Floret
  misc_feature: MA Experiment ID: 20000630 Result: Up-regulated in Transcription
  misc_feature: MA Experiment 20000630 PARAMETER Experiment Name: Zm_Herbicide-Treatments_P Parameter: Timepoint (hr) Value: 4
  misc_feature: MA Experiment 20000630 PARAMETER Experiment Name: Zm_Herbicide-Treatments_P Parameter: Tissue Value: Aerial
  misc_feature: MA Experiment 20000630 PARAMETER Experiment Name: Zm_Herbicide-Treatments_P Parameter: Treatment Value: Roundup vs. No Treatment
gaaggaaggaagccatgatgatgatgggcgaaggcgtgagcatgccgccgtggtcccaccacgtccctgtgagcggcgtcgacgaaggcgacgagatgacgccgtacctgctcgcggcgctgcgccagtacctgccgtgcaacgacgccggcgccgaggccgaggaggatgaggcggccgccgccatggcggcgggcgtggacggctacggctgcgacgagttccgcatgtacgagttcaaggtccggcggtgcgcgcgcgcgcgcagccacgactggaccgagtgccccttcgcgcacccgggggagaaggcgcggcgccgcgacccgcgcaagtaccactactccggcgccacctgcccggacttccgcaagggcgggtgcaagcgcggcgacggctgcgacatggcgcacggcgtcttcgagtgctggctccacccggcgcgctaccgcacccagccctgcaaggacggcacggcctgccgccgccgggtctgcttcttcgcgcacaccgcggaccagctgcgcgtgctcccgcccacgccgnancancantccanccccagggggcgccgnctgctcttcccccgctcgccgagtcctacgacggctccccgctccggcgccaggcgttcgagagctacctcaccaagagcatcatgtgctcgtcgccgaccagcaccctcctatcgccgcccaagtcgcccccgtcggagtccccgccattgtcgcccgacttccgccgtgggtgctggccgggcgccgggtcccccgtcaacgacgtgctcgcctcgctccgtcagctccgcctcagcagggccaactcgtccccgtcgggcggctggtgcagctaccctgcatccgcggtcgcgtacggatcgcctacggggggcgcgctctacggcctgtcctccaccccgagggccaccgccggctccggctacatggccaacctggaccctctcgacgtcaccttcggcggcgacgaggagcccgtggagagggtggagtccggccgcgcactccgcgcgaaggtgttcgagcggcttagcagggagggcgctgtttccggcgacgccggtggccccgacgtcgggtgggtctccgacctcatcaactgaggcggcggcgggtccctggcatggcaggtggcaatggcaatgggcatgggcatggagaaaggtgatggtgagccgtatcggagaaggatggcatccaaaaaaatatttccctgcatttgatttcgttcctcagttaattccgctaatccccgtgtacatatctatcaccctgtgaatattctcggttggtaagagggaggatgatgctaggcggtggatggatgggtggatttgttttggggttcttgaggtagcggaaaatatcc

SEQ ID NO: 5997 - protein, 430 aa, Zea mays subsp. mays
  peptide (1)..(430): Ceres Seq. ID no. 13493627
  misc_feature (201)..(376): Pfam Name: Equine herpesvirus glycoprotein gp2 Pfam Description: Equine herpesvirus glycoprotein gp2
  misc_feature (5)..(250): Homolog of NCBI NO: 34906436 NR Description: putative zinc finger transcription factor [Oryza
  misc_feature (33)..(178): Homolog of NCBI NO: 15225213 NR Description: CCCH-type zinc finger protein -related
  misc_feature (33)..(178): Homolog of NCBI NO: 21593538 NR Description: putative CCCH-type zinc finger protein
  misc_feature (6)..(211): Homolog of NCBI NO: 15224852 NR Description: CCCH-type zinc finger protein -related
  misc_feature (37)..(276): Homolog of NCBI NO: 15233491 NR Description: expressed protein [Arabidopsis thaliana]
  misc_feature (67)..(255): Homolog of NCBI NO: 15219557 NR Description: expressed protein [Arabidopsis thaliana]
  misc_feature (67)..(255): Homolog of NCBI NO: 26449538 NR Description: unknown protein [Arabidopsis thaliana]
  misc_feature (67)..(181): Homolog of NCBI NO: 15241451 NR Description: expressed protein [Arabidopsis thaliana] gb|AAD10689.1~gene_id:K9L2.1~similar to unknown protein thaliana] >gi|14334450|gb|AAK59423.1| unknown protein
  misc_feature (69)..(240): Homolog of NCBI NO: 18405834 NR Description: CCCH-type zinc finger protein -related thaliana] >gi|14335106|gb|AAK59832.1| At2g41900/T6D20.20
  misc_feature (69)..(233): Homolog of NCBI NO: 28273376 NR Description: unknown protein [Oryza sativa (japonica
  misc_feature (182)..(182): Xaa is any aa, unknown or other
  misc_feature (183)..(183): Xaa is any aa, unknown or other
  misc_feature (184)..(184): Xaa is any aa, unknown or other
  misc_feature (186)..(186): Xaa is any aa, unknown or other
  misc_feature (191)..(191): Xaa is any aa, unknown or other
RKEAMMMMGEGVSMPPWSHHVPVSGVDEGDEMTPYLLAALRQYLPCNDAGAEAEEDEAAAAMAAGVDGYGCDEFRMYEFKVRRCARARSHDWTECPFAHPGEKARRRDPRKYHYSGATCPDFRKGGCKRGDGCDMAHGVFECWLHPARYRTQPCKDGTACRRRVCFFAHTADQLRVLPPTPXXXSXPRGRXLLFPRSPSPTTAPRSGARRSRATSPRASCARRRPAPSYRRPSRPRRSPRHCRPTSAVGAGRAPGPPSTTCSPRSVSSASAGPTRPRRAAGAATLHPRSRTDRLRGARSTACPPPRGPPPAPATWPTWTLSTSPSAATRSPWRGWSPAAHSARRCSSGLAGRALFPATPVAPTSGGSPTSSTEAAAGPWHGRWQWQWAWAWRKVMVSRIGEGWHPKKYFPAFDFVPQLIPLIPVYISITL

SEQ ID NO: 5998 - protein, 426 aa, Zea mays subsp. mays
  peptide (1)..(426): Ceres Seq. ID no. 13493628
  misc_feature (197)..(372): Pfam Name: Equine herpesvirus glycoprotein gp2 Pfam Description: Equine herpesvirus glycoprotein gp2
  misc_feature (1)..(246): Homolog of NCBI NO: 34906436 NR Description: putative zinc finger transcription factor [Oryza
  misc_feature (29)..(174): Homolog of NCBI NO: 15225213 NR Description: CCCH-type zinc finger protein -related
  misc_feature (29)..(174): Homolog of NCBI NO: 21593538 NR Description: putative CCCH-type zinc finger protein
  misc_feature (2)..(207): Homolog of NCBI NO: 15224852 NR Description: CCCH-type zinc finger protein -related
  misc_feature (33)..(272): Homolog of NCBI NO: 15233491 NR Description: expressed protein [Arabidopsis thaliana]
  misc_feature (63)..(251): Homolog of NCBI NO: 15219557 NR Description: expressed protein [Arabidopsis thaliana]
  misc_feature (63)..(251): Homolog of NCBI NO: 26449538 NR Description: unknown protein [Arabidopsis thaliana]
  misc_feature (63)..(177): Homolog of NCBI NO: 15241451 NR Description: expressed protein [Arabidopsis thaliana] gb|AAD10689.1~gene_id:K9L2.1~similar to unknown protein thaliana] >gi|14334450|gb|AAK59423.1| unknown protein
  misc_feature (65)..(236): Homolog of NCBI NO: 18405834 NR Description: CCCH-type zinc finger protein -related thaliana] >gi|14335106|gb|AAK59832.1| At2g41900/T6D20.20
  misc_feature (65)..(229): Homolog of NCBI NO: 28273376 NR Description: unknown protein [Oryza sativa (japonica
  misc_feature (178)..(178): Xaa is any aa, unknown or other
  misc_feature (179)..(179): Xaa is any aa, unknown or other
  misc_feature (180)..(180): Xaa is any aa, unknown or other
  misc_feature (182)..(182): Xaa is any aa, unknown or other
  misc_feature (187)..(187): Xaa is any aa, unknown or other
MMMMGEGVSMPPWSHHVPVSGVDEGDEMTPYLLAALRQYLPCNDAGAEAEEDEAAAAMAAGVDGYGCDEFRMYEFKVRRCARARSHDWTECPFAHPGEKARRRDPRKYHYSGATCPDFRKGGCKRGDGCDMAHGVFECWLHPARYRTQPCKDGTACRRRVCFFAHTADQLRVLPPTPXXXSXPRGRXLLFPRSPSPTTAPRSGARRSRATSPRASCARRRPAPSYRRPSRPRRSPRHCRPTSAVGAGRAPGPPSTTCSPRSVSSASAGPTRPRRAAGAATLHPRSRTDRLRGARSTACPPPRGPPPAPATWPTWTLSTSPSAATRSPWRGWSPAAHSARRCSSGLAGRALFPATPVAPTSGGSPTSSTEAAAGPWHGRWQWQWAWAWRKVMVSRIGEGWHPKKYFPAFDFVPQLIPLIPVYISITL

SEQ ID NO: 5999 - protein, 425 aa, Zea mays subsp. mays
  peptide (1)..(425): Ceres Seq. ID no. 13493629
  misc_feature (196)..(371): Pfam Name: Equine herpesvirus glycoprotein gp2 Pfam Description: Equine herpesvirus glycoprotein gp2
  misc_feature (1)..(245): Homolog of NCBI NO: 34906436 NR Description: putative zinc finger transcription factor [Oryza
  misc_feature (28)..(173): Homolog of NCBI NO: 15225213 NR Description: CCCH-type zinc finger protein -related
  misc_feature (28)..(173): Homolog of NCBI NO: 21593538 NR Description: putative CCCH-type zinc finger protein
  misc_feature (1)..(206): Homolog of NCBI NO: 15224852 NR Description: CCCH-type zinc finger protein -related
  misc_feature (32)..(271): Homolog of NCBI NO: 15233491 NR Description: expressed protein [Arabidopsis thaliana]
  misc_feature (62)..(250): Homolog of NCBI NO: 15219557 NR Description: expressed protein [Arabidopsis thaliana]
  misc_feature (62)..(250): Homolog of NCBI NO: 26449538 NR Description: unknown protein [Arabidopsis thaliana]
  misc_feature (62)..(176): Homolog of NCBI NO: 15241451 NR Description: expressed protein [Arabidopsis thaliana] gb|AAD10689.1~gene_id:K9L2.1~similar to unknown protein thaliana] >gi|14334450|gb|AAK59423.1| unknown protein
  misc_feature (64)..(235): Homolog of NCBI NO: 18405834 NR Description: CCCH-type zinc finger protein -related thaliana] >gi|14335106|gb|AAK59832.1| At2g41900/T6D20.20
  misc_feature (64)..(228): Homolog of NCBI NO: 28273376 NR Description: unknown protein [Oryza sativa (japonica
  misc_feature (177)..(177): Xaa is any aa, unknown or other
  misc_feature (178)..(178): Xaa is any aa, unknown or other
  misc_feature (179)..(179): Xaa is any aa, unknown or other
  misc_feature (181)..(181): Xaa is any aa, unknown or other
  misc_feature (186)..(186): Xaa is any aa, unknown or other
MMMGEGVSMPPWSHHVPVSGVDEGDEMTPYLLAALRQYLPCNDAGAEAEEDEAAAAMAAGVDGYGCDEFRMYEFKVRRCARARSHDWTECPFAHPGEKARRRDPRKYHYSGATCPDFRKGGCKRGDGCDMAHGVFECWLHPARYRTQPCKDGTACRRRVCFFAHTADQLRVLPPTPXXXSXPRGRXLLFPRSPSPTTAPRSGARRSRATSPRASCARRRPAPSYRRPSRPRRSPRHCRPTSAVGAGRAPGPPSTTCSPRSVSSASAGPTRPRRAAGAATLHPRSRTDRLRGARSTACPPPRGPPPAPATWPTWTLSTSPSAATRSPWRGWSPAAHSARRCSSGLAGRALFPATPVAPTSGGSPTSSTEAAAGPWHGRWQWQWAWAWRKVMVSRIGEGWHPKKYFPAFDFVPQLIPLIPVYISITL

SEQ ID NO: 6000 - DNA, 1653 bp, Zea mays subsp. mays
  misc_feature (1)..(1653): Ceres Seq. ID no. 12347991
  misc_feature: MA Experiment ID: 108535 Result: Down-regulated in Transcription
  misc_feature: MA Experiment 108535 PARAMETER Experiment Name: Zm_Meristem_P Parameter: Age (day) Value: 8
  misc_feature: MA Experiment 108535 PARAMETER Experiment Name: Zm_Meristem_P Parameter: Organism Value: Zea mays
  misc_feature: MA Experiment 108535 PARAMETER Experiment Name: Zm_Meristem_P Parameter: Plant Line Value: 35A19
  misc_feature: MA Experiment 108535 PARAMETER Experiment Name: Zm_Meristem_P Parameter: Tissue Value: Root Meristem vs. Above Root Meristem
  misc_feature: MA Experiment ID: 20000535 Result: Down-regulated in Transcription
  misc_feature: MA Experiment 20000535 PARAMETER Experiment Name: Zm_Hybrid_Seed_Dev_P Parameter: DAP Value: 30 vs. 12
  misc_feature: MA Experiment 20000535 PARAMETER Experiment Name: Zm_Hybrid_Seed_Dev_P Parameter: Organism Value: Zea mays
  misc_feature: MA Experiment 20000535 PARAMETER Experiment Name: Zm_Hybrid_Seed_Dev_P Parameter: Plant Line Value: 35A19
  misc_feature: MA Experiment 20000535 PARAMETER Experiment Name: Zm_Hybrid_Seed_Dev_P Parameter: Tissue Value: Embryo vs. Unfert Floret
aaaaactcctcaagcaatttccatttccaccacgaccactctcttcctcgcagcgcgtaccaacccgccgccgtctactgccactccgcctgctcatggcctcccctacgcaaggtgatgcccccctcgcggctccggctccggcggctgacgctacggacgcggccttcgccgccgcggccgcggtgccggatccaggcgcagagttcgggttccagcgtccggagctcgggaaggagaagctggtcgggacgggtggggttccacgagcgccatgtgttcctctgttacaagggcccggatttgtggccgtcccacctcgaggcctctgagtctgaccgcctcccccgcctcctcgccgccgccatcaaggcccgaaagcccaatctgaagaagaccatcaaattgaccatctgtgaaggagaagatggcactgaatcatcaaatggagatgtgttgatctttccagatatgatcagatataaagggctgacccattttgatgtggacaactttgttgaagaagtgcttgtgaaggatattgactggcttcctagatctcctgagcctatgagtggttcctatatttttgtttgctcccatggaagcagggacaaaaggtgtggtgtttgtggacctgctttgattaaaaggttcaaggaagagataaatgaactgggacttgatgatcaggtggctgtcagtgcatgctcacacgtgggaggtcataagtatgcaggaaatgtcatcattttcagttctgatgccaagggagaagtgactggtcattggtatggttatgttgttcctgatgatgtgcctgttttgctgcataaacatattggacaaggagaagttgtggaccatctatggaggggacagatgggtttatctgtggagcagcagaagcgagctctcgagcttcggaacatggtaaatggtggcgaagaatcccttgaagaaaccagaacagatggtgcttctttcaaccctgcagcagctggtggatgctgccaaggcaatggtggcttcacctgctgccaaactgacctgccaaaggaaaaacaagacaagagcatcatagctgagcagaaccccaagagctctgacaaggagggtggtgctggcagcaagaagggggatacaaagacttgcccagtgcccatctggtttgagacctgggagagagctgacacatatgccgctcttgctgttgttgcagctgccacagcggtgcttgtctccttcagaatctacaagaacctcaactgaagaacatgggagatcctggaagaggtgcccgaaacaagtatatgtgaaacagcttactgtgataagtctgggatgagaataaatttacctgtgcataatgctaggcttaggctatgggctatggctagcaaatcgttgtgcaaaatactgttgtatattgtttacaaagtgatgtttgaaatagaagataacggtgatgaacaagccgttggagatagccttagaacctcaaagtagcttatctggagatggagacggcgatgaaaagatgttgctgccagtgttctcgtatgtgaactccttgtgaacctccactgcaattgaagtttcgatgccttagctgctgtttatcataagcaaggcgatgggatcggcatcacc

SEQ ID NO: 6001 - protein, 423 aa, Zea mays subsp. mays
  peptide (1)..(423): Ceres Seq. ID no. 12347992
  misc_feature (83)..(350): Homolog of NCBI NO: 16604384 NR Description: AT4g26620/T15N24_70 [Arabidopsis thaliana]
  misc_feature (83)..(350): Homolog of NCBI NO: 18416788 NR Description: sucrase-like protein; protein id: At4g26620.1, by cDNA: 111209., supported by cDNA: gi_16604383 [Arabidopsis
  misc_feature (316)..(422): Homolog of NCBI NO: 16604384 NR Description: AT4g26620/T15N24_70 [Arabidopsis thaliana]
  misc_feature (316)..(422): Homolog of NCBI NO: 18416788 NR Description: sucrase-like protein; protein id: At4g26620.1, by cDNA: 111209., supported by cDNA: gi_16604383 [Arabidopsis
  misc_feature (83)..(422): Homolog of NCBI NO: 15241075 NR Description: sucrose cleavage protein-like; protein id: supported by cDNA: 43010. [Arabidopsis thaliana]
  misc_feature (292)..(422): Homolog of NCBI NO: 7488353 NR Description: sucrose cleavage protein homolog T15N24.70 -
  misc_feature (83)..(228): Homolog of NCBI NO: 7488353 NR Description: sucrose cleavage protein homolog T15N24.70 -
  misc_feature (83)..(358): Homolog of NCBI NO: 1086252 NR Description: sucrose cleavage protein - potato
  misc_feature (89)..(358): Homolog of NCBI NO: 21553503 NR Description: sucrose cleavage protein-like [Arabidopsis
  misc_feature (89)..(358): Homolog of NCBI NO: 9758077 NR Description: sucrose cleavage protein-like [Arabidopsis
KNSSSNFHFHHDHSLPRSAYQPAAVYCHSACSWPPLRKVMPPSRLRLRRLTLRTRPSPPRPRCRIQAQSSGSSVRSSGRRSWSGRVGFHERHVFLCYKGPDLWPSHLEASESDRLPRLLAAAIKARKPNLKKTIKLTICEGEDGTESSNGDVLIFPDMIRYKGLTHFDVDNFVEEVLVKDIDWLPRSPEPMSGSYIFVCSHGSRDKRCGVCGPALIKRFKEEINELGLDDQVAVSACSHVGGHKYAGNVIIFSSDAKGEVTGHWYGYVVPDDVPVLLHKHIGQGEVVDHLWRGQMGLSVEQQKRALELRNMVNGGEESLEETRTDGASFNPAAAGGCCQGNGGFTCCQTDLPKEKQDKSIIAEQNPKSSDKEGGAGSKKGDTKTCPVPIWFETWERADTYAALAVVAAATAVLVSFRIYKNLN

SEQ ID NO: 6002 - protein, 384 aa, Zea mays subsp. mays
  peptide (1)..(384): Ceres Seq. ID no. 12347993
  misc_feature (44)..(311): Homolog of NCBI NO: 16604384 NR Description: AT4g26620/T15N24_70 [Arabidopsis thaliana]
  misc_feature (44)..(311): Homolog of NCBI NO: 18416788 NR Description: sucrase-like protein; protein id: At4g26620.1, by cDNA: 111209., supported by cDNA: gi_16604383 [Arabidopsis
  misc_feature (277)..(383): Homolog of NCBI NO: 16604384 NR Description: AT4g26620/T15N24_70 [Arabidopsis thaliana]
  misc_feature (277)..(383): Homolog of NCBI NO: 18416788 NR Description: sucrase-like protein; protein id: At4g26620.1, by cDNA: 111209., supported by cDNA: gi_16604383 [Arabidopsis
  misc_feature (44)..(383): Homolog of NCBI NO: 15241075 NR Description: sucrose cleavage protein-like; protein id: supported by cDNA: 43010. [Arabidopsis thaliana]
  misc_feature (253)..(383): Homolog of NCBI NO: 7488353 NR Description: sucrose cleavage protein homolog T15N24.70 -
  misc_feature (44)..(189): Homolog of NCBI NO: 7488353 NR Description: sucrose cleavage protein homolog T15N24.70 -
  misc_feature (44)..(319): Homolog of NCBI NO: 1086252 NR Description: sucrose cleavage protein - potato
  misc_feature (50)..(319): Homolog of NCBI NO: 21553503 NR Description: sucrose cleavage protein-like [Arabidopsis
  misc_feature (50)..(319): Homolog of NCBI NO: 9758077 NR Description: sucrose cleavage protein-like [Arabidopsis
MPPSRLRLRRLTLRTRPSPPRPRCRIQAQSSGSSVRSSGRRSWSGRVGFHERHVFLCYKGPDLWPSHLEASESDRLPRLLAAAIKARKPNLKKTIKLTICEGEDGTESSNGDVLIFPDMIRYKGLTHFDVDNFVEEVLVKDIDWLPRSPEPMSGSYIFVCSHGSRDKRCGVCGPALIKRFKEEINELGLDDQVAVSACSHVGGHKYAGNVIIFSSDAKGEVTGHWYGYVVPDDVPVLLHKHIGQGEVVDHLWRGQMGLSVEQQKRALELRNMVNGGEESLEETRTDGASFNPAAAGGCCQGNGGFTCCQTDLPKEKQDKSIIAEQNPKSSDKEGGAGSKKGDTKTCPVPIWFETWERADTYAALAVVAAATAVLVSFRIYKNLN

SEQ ID NO: 6003 - protein, 266 aa, Zea mays subsp. mays
  peptide (1)..(266): Ceres Seq. ID no. 12347994
  misc_feature (1)..(193): Homolog of NCBI NO: 16604384 NR Description: AT4g26620/T15N24_70 [Arabidopsis thaliana]
  misc_feature (1)..(193): Homolog of NCBI NO: 18416788 NR Description: sucrase-like protein; protein id: At4g26620.1, by cDNA: 111209., supported by cDNA: gi_16604383 [Arabidopsis
  misc_feature (159)..(265): Homolog of NCBI NO: 16604384 NR Description: AT4g26620/T15N24_70 [Arabidopsis thaliana]
  misc_feature (159)..(265): Homolog of NCBI NO: 18416788 NR Description: sucrase-like protein; protein id: At4g26620.1, by cDNA: 111209., supported by cDNA: gi_16604383 [Arabidopsis
  misc_feature (1)..(265): Homolog of NCBI NO: 15241075 NR Description: sucrose cleavage protein-like; protein id: supported by cDNA: 43010. [Arabidopsis thaliana]
  misc_feature (135)..(265): Homolog of NCBI NO: 7488353 NR Description: sucrose cleavage protein homolog T15N24.70 -
  misc_feature (1)..(71): Homolog of NCBI NO: 7488353 NR Description: sucrose cleavage protein homolog T15N24.70 -
  misc_feature (1)..(201): Homolog of NCBI NO: 1086252 NR Description: sucrose cleavage protein - potato
  misc_feature (1)..(201): Homolog of NCBI NO: 21553503 NR Description: sucrose cleavage protein-like [Arabidopsis
  misc_feature (1)..(201): Homolog of NCBI NO: 9758077 NR Description: sucrose cleavage protein-like [Arabidopsis
MIRYKGLTHFDVDNFVEEVLVKDIDWLPRSPEPMSGSYIFVCSHGSRDKRCGVCGPALIKRFKEEINELGLDDQVAVSACSHVGGHKYAGNVIIFSSDAKGEVTGHWYGYVVPDDVPVLLHKHIGQGEVVDHLWRGQMGLSVEQQKRALELRNMVNGGEESLEETRTDGASFNPAAAGGCCQGNGGFTCCQTDLPKEKQDKSIIAEQNPKSSDKEGGAGSKKGDTKTCPVPIWFETWERADTYAALAVVAAATAVLVSFRIYKNLN

SEQ ID NO: 6004 - DNA, 1517 bp, Zea mays subsp. mays
  misc_feature (1)..(1517): Ceres Seq. ID no. 13570867
  misc_feature: MA Experiment ID: 108527 Result: Down-regulated in Transcription
  misc_feature: MA Experiment 108527 PARAMETER Experiment Name: Zm_5mM_NO_P Parameter: Age (day) Value: 8
  misc_feature: MA Experiment 108527 PARAMETER Experiment Name: Zm_5mM_NO_P Parameter: Organism Value: Zea mays
  misc_feature: MA Experiment 108527 PARAMETER Experiment Name: Zm_5mM_NO_P Parameter: Plant Line Value: 35A19
  misc_feature: MA Experiment 108527 PARAMETER Experiment Name: Zm_5mM_NO_P Parameter: Timepoint (hr) Value: 6
  misc_feature: MA Experiment 108527 PARAMETER Experiment Name: Zm_5mM_NO_P Parameter: Tissue Value: Aerial
  misc_feature: MA Experiment 108527 PARAMETER Experiment Name: Zm_5mM_NO_P Parameter: Treatment Value: 5mM NO vs. No Treatment
  misc_feature: MA Experiment ID: 108528 Result: Up-regulated in Transcription
  misc_feature: MA Experiment 108528 PARAMETER Experiment Name: Zm_Imbibed_Seeds_P Parameter: Age (day) Value: 5 vs. 2
  misc_feature: MA Experiment 108528 PARAMETER Experiment Name: Zm_Imbibed_Seeds_P Parameter: Organism Value: Zea mays
  misc_feature: MA Experiment 108528 PARAMETER Experiment Name: Zm_Imbibed_Seeds_P Parameter: Plant Line Value: 35A19
  misc_feature: MA Experiment 108528 PARAMETER Experiment Name: Zm_Imbibed_Seeds_P Parameter: Tissue Value: Aerial vs. Embryo
  misc_feature: MA Experiment ID: 108530 Result: Up-regulated in Transcription
  misc_feature: MA Experiment 108530 PARAMETER Experiment Name: Zm_Imbibed_Seeds_P Parameter: Age (day) Value: 6 vs. 2
  misc_feature: MA Experiment 108530 PARAMETER Experiment Name: Zm_Imbibed_Seeds_P Parameter: Organism Value: Zea mays
  misc_feature: MA Experiment 108530 PARAMETER Experiment Name: Zm_Imbibed_Seeds_P Parameter: Plant Line Value: 35A19
  misc_feature: MA Experiment 108530 PARAMETER Experiment Name: Zm_Imbibed_Seeds_P Parameter: Tissue Value: Aerial vs. Embryo
  misc_feature: MA Experiment ID: 108547 Result: Up-regulated in Transcription
  misc_feature: MA Experiment 108547 PARAMETER Experiment Name: Zm_Imbibed_Seeds_P Parameter: Age (day) Value: 4 vs. 2
  misc_feature: MA Experiment 108547 PARAMETER Experiment Name: Zm_Imbibed_Seeds_P Parameter: Organism Value: Zea mays
  misc_feature: MA Experiment 108547 PARAMETER Experiment Name: Zm_Imbibed_Seeds_P Parameter: Plant Line Value: 35A19
  misc_feature: MA Experiment 108547 PARAMETER Experiment Name: Zm_Imbibed_Seeds_P Parameter: Tissue Value: Aerial vs. Embryo
  misc_feature: MA Experiment ID: 108556 Result: Down-regulated in Transcription
  misc_feature: MA Experiment 108556 PARAMETER Experiment Name: Zm_Drought_P Parameter: Age (day) Value: 9
  misc_feature: MA Experiment 108556 PARAMETER Experiment Name: Zm_Drought_P Parameter: Organism Value: Zea mays
  misc_feature: MA Experiment 108556 PARAMETER Experiment Name: Zm_Drought_P Parameter: Plant Line Value: 35A19
  misc_feature: MA Experiment 108556 PARAMETER Experiment Name: Zm_Drought_P Parameter: Timepoint (hr) Value: 24
  misc_feature: MA Experiment 108556 PARAMETER Experiment Name: Zm_Drought_P Parameter: Tissue Value: Aerial
  misc_feature: MA Experiment 108556 PARAMETER Experiment Name: Zm_Drought_P Parameter: Treatment Value: Drought vs. No Drought
  misc_feature: MA Experiment ID: 108688 Result: Down-regulated in Transcription
  misc_feature: MA Experiment 108688 PARAMETER Experiment Name: Zm_Embryos-Flowers__P Parameter: Tissue Value: Immature Flowers vs. Aerial+
  misc_feature: MA Experiment ID: 20000108 Result: Up-regulated in Transcription
  misc_feature: MA Experiment 20000108 PARAMETER Experiment Name: Zm_Root-Tips_P Parameter: Age (day) Value: 12
  misc_feature: MA Experiment 20000108 PARAMETER Experiment Name: Zm_Root-Tips_P Parameter: Organism Value: Zea mays
  misc_feature: MA Experiment 20000108 PARAMETER Experiment Name: Zm_Root-Tips_P Parameter: Tissue Value: Root tips vs. Root mid region    35
  misc_feature: MA Experiment 20000108 PARAMETER Experiment Name: Zm_Root-Tips_P Parameter: Tissue Value: Root tips vs. Root mid region   Sequence Listing-Misc Features (4)
  misc_feature: MA Experiment ID: 20000478 Result: Down-regulated in Transcription
  misc_feature: MA Experiment 20000478 PARAMETER Experiment Name: Zm_5mM_SA_P Parameter: Age (day) Value: 11
  misc_feature: MA Experiment 20000478 PARAMETER Experiment Name: Zm_5mM_SA_P Parameter: Organism Value: Zea mays
  misc_feature: MA Experiment 20000478 PARAMETER Experiment Name: Zm_5mM_SA_P Parameter: Plant Line Value: 35A19
  misc_feature: MA Experiment 20000478 PARAMETER Experiment Name: Zm_5mM_SA_P Parameter: Timepoint (hr) Value: 72
  misc_feature: MA Experiment 20000478 PARAMETER Experiment Name: Zm_5mM_SA_P Parameter: Tissue Value: Aerial
  misc_feature: MA Experiment 20000478 PARAMETER Experiment Name: Zm_5mM_SA_P Parameter: Treatment Value: 5mM SA vs. No Treatment
agccacacaagcaaagaacttggccccgcctcccgtctcttaccgcacatgcgcgtcgggccgcgtcgacatagctgcttgccgccgacacccgcagccgcaatggccgtcgcccacgcgccgccgcgccggggcgtgctccccctcctgctcgtcgccgcgctcgtggcggcgttgccggccacctgcgccgcggccaggagcaagaagtcgtacacggccatcttcagcttcggggactcgctctccgacgccggcaacctcatcgtcaacggcacgcccaaggcgctcaccaccgcgcgccctccctacgggatgaccttcttccgcaagcccaccggccgctgctccaacggccgcctcgtcgtcgacttcctggccgagcatttcgggctgccactgccgccaccgtcgcaggccaagggcaaggacttcaagaagggcgccaacttcgccatcaccggcgcgacggccctggagtactccttcttcaaggcgcacggcatcgaccagcgcatctggaacaccggctccatcaacacccagatcggctggctccaggacatgaagccgtccctctgtaaatcggagcaagactgcaaggattacttcagcaaatccctgttcgtcgtcggggagttcgggggcaacgactacaacgcgccgctcttctccggcgtcccattttctgatgtcaagacttacgtgccccttgttgcaaaggctatcgccaatggcgttgagaaactgatcgagcttggggcaacagacctcctggtgcctggcgttctcccaattggctgcttcccgttgtacctgacgctgtacaacaccagcagcaaagcagattacaacgcccggaccgggtgccttcggaggtacaaccgcctggccttccaccacaacagggagctgaagcagcagcttgacgagcttcagaagaagtaccccaagacgaagatcatgtatggagattacttcaaggctgcactgcagtttgtcgtcaaccctgggaaatttggtttcagcacggctttgcaagcgtgctgcggcgccggagggcagggcaactacaacttcaacctgaagaagaagtgtggcgagcagggcgcgagcgtgtgctccaacccgtcgtcgtacgtgagctgggatggcatccacatgaccgaagctgcgtacagaaaggtcgccgatggctggttgaatggcccgtatgctcagcccccaattctcaagtcatgatcgagattactaggctgtgcgtaacaccgccgcagctgcatgctgcggctagagatatatatgaggagtgtttcaggcaatagatatgctaagttatggtaaagctatttggtctgttcattggaagatctgtataaactgcgccggtatagatatgttcccagctgaaatggctctagcacagatgtgcatggcatgttctctgattcttttcatttgttctaaaaaaatattgcggcagtaatatgagttgataaaagtaactaaatttctgc

SEQ ID NO: 6005 - protein, 413 aa, Zea mays subsp. mays
  peptide (1)..(413): Ceres Seq. ID no. 13570868
  misc_feature (75)..(400): Pfam Name: GDSL-like Lipase/Acylhydrolase Pfam Description: GDSL-like Lipase/Acylhydrolase
  misc_feature (50)..(411): Homolog of NCBI NO: 34903956 NR Description: OSJNBa0038J17.23 [Oryza sativa (japonica >gi|7523511|dbj|BAA94239.1| unnamed protein product [Oryza sativa
  misc_feature (52)..(413): Homolog of NCBI NO: 34903958 NR Description: OSJNBa0038J17.24 [Oryza sativa (japonica >gi|7523510|dbj|BAA94238.1| unnamed protein product [Oryza sativa
  misc_feature (70)..(411): Homolog of NCBI NO: 34903978 NR Description: unnamed protein product [Oryza sativa (japonica group)] >gi|7523500|dbj|BAA94228.1| unnamed protein product
  misc_feature (39)..(411): Homolog of NCBI NO: 34903996 NR Description: unnamed protein product [Oryza sativa (japonica group)] >gi|7523491|dbj|BAA94219.1| unnamed protein product
  misc_feature (39)..(411): Homolog of NCBI NO: 34903994 NR Description: unnamed protein product [Oryza sativa (japonica group)] >gi|7523492|dbj|BAA94220.1| unnamed protein product
  misc_feature (39)..(413): Homolog of NCBI NO: 34903986 NR Description: unnamed protein product [Oryza sativa (japonica group)] >gi|7523496|dbj|BAA94224.1| unnamed protein product
  misc_feature (49)..(408): Homolog of NCBI NO: 15242538 NR Description: GDSL-motif lipase/hydrolase protein [Arabidopsis
  misc_feature (51)..(413): Homolog of NCBI NO: 21593234 NR Description: lipase, putative [Arabidopsis thaliana]
  misc_feature (49)..(408): Homolog of NCBI NO: 21553708 NR Description: GDSL-motif lipase/hydrolase-like protein
  misc_feature (51)..(413): Homolog of NCBI NO: 10764858 NR Description: F1K23.17 [Arabidopsis thaliana]
SHTSKELGPASRLLPHMRVGPRRHSCLPPTPAAAMAVAHAPPRRGVLPLLLVAALVAALPATCAAARSKKSYTAIFSFGDSLSDAGNLIVNGTPKALTTARPPYGMTFFRKPTGRCSNGRLVVDFLAEHFGLPLPPPSQAKGKDFKKGANFAITGATALEYSFFKAHGIDQRIWNTGSINTQIGWLQDMKPSLCKSEQDCKDYFSKSLFVVGEFGGNDYNAPLFSGVPFSDVKTYVPLVAKAIANGVEKLIELGATDLLVPGVLPIGCFPLYLTLYNTSSKADYNARTGCLRRYNRLAFHHNRELKQQLDELQKKYPKTKIMYGDYFKAALQFVVNPGKFGFSTALQACCGAGGQGNYNFNLKKKCGEQGASVCSNPSSYVSWDGIHMTEAAYRKVADGWLNGPYAQPPILKS

SEQ ID NO: 6006 - protein, 397 aa, Zea mays subsp. mays
  peptide (1)..(397): Ceres Seq. ID no. 13570869
  misc_feature (59)..(384): Pfam Name: GDSL-like Lipase/Acylhydrolase Pfam Description: GDSL-like Lipase/Acylhydrolase
  misc_feature (23)..(395): Homolog of NCBI NO: 34903996 NR Description: unnamed protein product [Oryza sativa (japonica group)] >gi|7523491|dbj|BAA94219.1| unnamed protein product
  misc_feature (23)..(395): Homolog of NCBI NO: 34903994 NR Description: unnamed protein product [Oryza sativa (japonica group)] >gi|7523492|dbj|BAA94220.1| unnamed protein product
  misc_feature (23)..(397): Homolog of NCBI NO: 34903986 NR Description: unnamed protein product [Oryza sativa (japonica group)] >gi|7523496|dbj|BAA94224.1| unnamed protein product
  misc_feature (33)..(392): Homolog of NCBI NO: 15242538 NR Description: GDSL-motif lipase/hydrolase protein [Arabidopsis
  misc_feature (36)..(397): Homolog of NCBI NO: 34903958 NR Description: OSJNBa0038J17.24 [Oryza sativa (japonica >gi|7523510|dbj|BAA94238.1| unnamed protein product [Oryza sativa
  misc_feature (54)..(395): Homolog of NCBI NO: 34903978 NR Description: unnamed protein product [Oryza sativa (japonica group)] >gi|7523500|dbj|BAA94228.1| unnamed protein product
  misc_feature (34)..(395): Homolog of NCBI NO: 34903956 NR Description: OSJNBa0038J17.23 [Oryza sativa (japonica >gi|7523511|dbj|BAA94239.1| unnamed protein product [Oryza sativa
  misc_feature (35)..(397): Homolog of NCBI NO: 21593234 NR Description: lipase, putative [Arabidopsis thaliana]
  misc_feature (33)..(392): Homolog of NCBI NO: 21553708 NR Description: GDSL-motif lipase/hydrolase-like protein
  misc_feature (35)..(397): Homolog of NCBI NO: 10764858 NR Description: F1K23.17 [Arabidopsis thaliana]
MRVGPRRHSCLPPTPAAAMAVAHAPPRRGVLPLLLVAALVAALPATCAAARSKKSYTAIFSFGDSLSDAGNLIVNGTPKALTTARPPYGMTFFRKPTGRCSNGRLVVDFLAEHFGLPLPPPSQAKGKDFKKGANFAITGATALEYSFFKAHGIDQRIWNTGSINTQIGWLQDMKPSLCKSEQDCKDYFSKSLFVVGEFGGNDYNAPLFSGVPFSDVKTYVPLVAKAIANGVEKLIELGATDLLVPGVLPIGCFPLYLTLYNTSSKADYNARTGCLRRYNRLAFHHNRELKQQLDELQKKYPKTKIMYGDYFKAALQFVVNPGKFGFSTALQACCGAGGQGNYNFNLKKKCGEQGASVCSNPSSYVSWDGIHMTEAAYRKVADGWLNGPYAQPPILKS

SEQ ID NO: 6007 - protein, 379 aa, Zea mays subsp. mays
  peptide (1)..(379): Ceres Seq. ID no. 13570870
  misc_feature (41)..(366): Pfam Name: GDSL-like Lipase/Acylhydrolase Pfam Description: GDSL-like Lipase/Acylhydrolase
  misc_feature (16)..(377): Homolog of NCBI NO: 34903956 NR Description: OSJNBa0038J17.23 [Oryza sativa (japonica >gi|7523511|dbj|BAA94239.1| unnamed protein product [Oryza sativa
  misc_feature (18)..(379): Homolog of NCBI NO: 34903958 NR Description: OSJNBa0038J17.24 [Oryza sativa (japonica >gi|7523510|dbj|BAA94238.1| unnamed protein product [Oryza sativa
  misc_feature (36)..(377): Homolog of NCBI NO: 34903978 NR Description: unnamed protein product [Oryza sativa (japonica group)] >gi|7523500|dbj|BAA94228.1| unnamed protein product
  misc_feature (5)..(377): Homolog of NCBI NO: 34903996 NR Description: unnamed protein product [Oryza sativa (japonica group)] >gi|7523491|dbj|BAA94219.1| unnamed protein product
  misc_feature (5)..(377): Homolog of NCBI NO: 34903994 NR Description: unnamed protein product [Oryza sativa (japonica group)] >gi|7523492|dbj|BAA94220.1| unnamed protein product
  misc_feature (5)..(379): Homolog of NCBI NO: 34903986 NR Description: unnamed protein product [Oryza sativa (japonica group)] >gi|7523496|dbj|BAA94224.1| unnamed protein product
  misc_feature (15)..(374): Homolog of NCBI NO: 15242538 NR Description: GDSL-motif lipase/hydrolase protein [Arabidopsis
  misc_feature (17)..(379): Homolog of NCBI NO: 21593234 NR Description: lipase, putative [Arabidopsis thaliana]
  misc_feature (15)..(374): Homolog of NCBI NO: 21553708 NR Description: GDSL-motif lipase/hydrolase-like protein
  misc_feature (17)..(379): Homolog of NCBI NO: 10764858 NR Description: F1K23.17 [Arabidopsis thaliana]
MAVAHAPPRRGVLPLLLVAALVAALPATCAAARSKKSYTAIFSFGDSLSDAGNLIVNGTPKALTTARPPYGMTFFRKPTGRCSNGRLVVDFLAEHFGLPLPPPSQAKGKDFKKGANFAITGATALEYSFFKAHGIDQRIWNTGSINTQIGWLQDMKPSLCKSEQDCKDYFSKSLFVVGEFGGNDYNAPLFSGVPFSDVKTYVPLVAKAIANGVEKLIELGATDLLVPGVLPIGCFPLYLTLYNTSSKADYNARTGCLRRYNRLAFHHNRELKQQLDELQKKYPKTKIMYGDYFKAALQFVVNPGKFGFSTALQACCGAGGQGNYNFNLKKKCGEQGASVCSNPSSYVSWDGIHMTEAAYRKVADGWLNGPYAQPPILKS

SEQ ID NO: 6008 - DNA, 983 bp, Zea mays subsp. mays
  misc_feature (1)..(983): Ceres Seq. ID no. 12340823
  misc_feature: MA Experiment ID: 108529 Result: Up-regulated in Transcription
  misc_feature: MA Experiment 108529 PARAMETER Experiment Name: Zm_Imbibed_Seeds_P Parameter: Age (day) Value: 5 vs. 2
  misc_feature: MA Experiment 108529 PARAMETER Experiment Name: Zm_Imbibed_Seeds_P Parameter: Organism Value: Zea mays
  misc_feature: MA Experiment 108529 PARAMETER Experiment Name: Zm_Imbibed_Seeds_P Parameter: Plant Line Value: 35A19
  misc_feature: MA Experiment 108529 PARAMETER Experiment Name: Zm_Imbibed_Seeds_P Parameter: Tissue Value: Roots vs. Embryo
  misc_feature: MA Experiment ID: 108546 Result: Up-regulated in Transcription
  misc_feature: MA Experiment 108546 PARAMETER Experiment Name: Zm_Imbibed_Seeds_P Parameter: Age (day) Value: 3 vs. 2
  misc_feature: MA Experiment 108546 PARAMETER Experiment Name: Zm_Imbibed_Seeds_P Parameter: Organism Value: Zea mays
  misc_feature: MA Experiment 108546 PARAMETER Experiment Name: Zm_Imbibed_Seeds_P Parameter: Plant Line Value: 35A19
  misc_feature: MA Experiment 108546 PARAMETER Experiment Name: Zm_Imbibed_Seeds_P Parameter: Tissue Value: Roots vs. Embryo
  misc_feature: MA Experiment ID: 108689 Result: Up-regulated in Transcription
  misc_feature: MA Experiment 108689 PARAMETER Experiment Name: Zm_Drought_Roots_P Parameter: Age (day) Value: 9
  misc_feature: MA Experiment 108689 PARAMETER Experiment Name: Zm_Drought_Roots_P Parameter: Organism Value: Zea mays
  misc_feature: MA Experiment 108689 PARAMETER Experiment Name: Zm_Drought_Roots_P Parameter: Plant Line Value: 35A19
  misc_feature: MA Experiment 108689 PARAMETER Experiment Name: Zm_Drought_Roots_P Parameter: Timepoint (hr) Value: 24
  misc_feature: MA Experiment 108689 PARAMETER Experiment Name: Zm_Drought_Roots_P Parameter: Tissue Value: Roots
  misc_feature: MA Experiment 108689 PARAMETER Experiment Name: Zm_Drought_Roots_P Parameter: Treatment Value: Drought vs. No Drought
  misc_feature: MA Experiment ID: 20000534 Result: Up-regulated in Transcription
  misc_feature: MA Experiment 20000534 PARAMETER Experiment Name: Zm_Hybrid_Pollen_P Parameter: Age (day) Value: 8
  misc_feature: MA Experiment 20000534 PARAMETER Experiment Name: Zm_Hybrid_Pollen_P Parameter: Organism Value: Zea mays
  misc_feature: MA Experiment 20000534 PARAMETER Experiment Name: Zm_Hybrid_Pollen_P Parameter: Plant Line Value: 35A19
  misc_feature: MA Experiment 20000534 PARAMETER Experiment Name: Zm_Hybrid_Pollen_P Parameter: Tissue Value: Pollen vs. Aerial
aaccttatttggcccggcgcgggagcccgtcctataactgaataaccgatcgaggcgcgcaacgcacacctccgattcaggacgagcagccggccagccagcgcgcgagaggacgtacggacgcacagctaggcggaggcgatggacggccgacgacgacggcaatggccgcggtcgcgctcgggggctgccgccgcgcctctcctcctcctgctgctcctggcggtgtccttgggtgggcatggtgatcacggcgcggcggctgcgggcgtcgccccggcaggcggcaacggcatgacggagctgcagaagcacgtggcgttcttcgaccgcaaccacgacggcatcatcaccttcgacgagacctaccaaggtctgcgggacgtcggagtcggcgatgtcacggccaaagccagcgccgcgttcataaacggcgccctcgggcccaagaccagacctgacaattccaactcctcaagcatggatatctacgtagagaacattcagaagggcaaacatggaagcgacacaggcgcctacgacgctcaaggaaggttcgttcccgcgaagctggacgagatgttcaccaagcacgccaagaccgtaccgaacgctctgacgaaagacgagctcgacgagatgctcaaggataaccgggagaagatggacgtcgcaggatggctgggagccaagtcggagtgggagatgctgtacaagctggccaaggacaaggacgggcgcctgcccaaggacaccgtcaggaccgtgtacgacggatccctcttttaccagctggcggcgcaggggaagaagggctgattcggttacgttaatttcagtaatcaataacaagcaacgtttttttttttttgtcgtttctgaatgcttgcctgtgtggctgtgtaagaaagcgagtgggtcggactcaatggcaggcaacggttttgttttttttattattattttaacggatcggttctact

SEQ ID NO: 6009 - protein, 225 aa, Zea mays subsp. mays
  peptide (1)..(225): Ceres Seq. ID no. 12340824
  misc_feature (51)..(218): Pfam Name: Caleosin related protein Pfam Description: Caleosin related protein
  misc_feature (1)..(218): Homolog of NCBI NO: 34902470 NR Description: Putative abscisic acid-induced protein - rice
  misc_feature (55)..(221): Homolog of NCBI NO: 18409649 NR Description: Ca2+-binding EF-hand common family protein, protein id: At1g70670.1, supported by cDNA: 5143., supported by gi_15810176 [Arabidopsis thaliana] >gi|25406062|pir||A96731
  misc_feature (55)..(221): Homolog of NCBI NO: 18409651 NR Description: Ca2+-binding EF-hand common family protein, protein id: At1g70680.1, supported by cDNA: 9200. [Arabidopsis
  misc_feature (55)..(221): Homolog of NCBI NO: 21593851 NR Description: unknown [Arabidopsis thaliana]
  misc_feature (55)..(221): Homolog of NCBI NO: 21617961 NR Description: unknown [Arabidopsis thaliana]
  misc_feature (52)..(218): Homolog of NCBI NO: 15220687 NR Description: pollen coat EF-hand protein; protein id: supported by cDNA: 16644. [Arabidopsis thaliana]
  misc_feature (10)..(218): Homolog of NCBI NO: 6900308 NR Description: putative calcium binding EF-hand protein [Hordeum
  misc_feature (55)..(197): Homolog of NCBI NO: 37652831 NR Description: calcium binding protein [Fagus sylvatica]
  misc_feature (50)..(225): Homolog of NCBI NO: 6478218 NR Description: caleosin [Sesamum indicum]
MDGRRRRQWPRSRSGAAAAPLLLLLLLAVSLGGHGDHGAAAAGVAPAGGNGMTELQKHVAFFDRNHDGIITFDETYQGLRDVGVGDVTAKASAAFINGALGPKTRPDNSNSSSMDIYVENIQKGKHGSDTGAYDAQGRFVPAKLDEMFTKHAKTVPNALTKDELDEMLKDNREKMDVAGWLGAKSEWEMLYKLAKDKDGRLPKDTVRTVYDGSLFYQLAAQGKKG

SEQ ID NO: 6010 - protein, 174 aa, Zea mays subsp. mays
  peptide (1)..(174): Ceres Seq. ID no. 12340825
  misc_feature (1)..(167): Pfam Name: Caleosin related protein Pfam Description: Caleosin related protein
  misc_feature (1)..(167): Homolog of NCBI NO: 34902470 NR Description: Putative abscisic acid-induced protein - rice
  misc_feature (4)..(170): Homolog of NCBI NO: 18409649 NR Description: Ca2+-binding EF-hand common family protein, protein id: At1g70670.1, supported by cDNA: 5143., supported by gi_15810176 [Arabidopsis thaliana] >gi|25406062|pir||A96731
  misc_feature (4)..(170): Homolog of NCBI NO: 18409651 NR Description: Ca2+-binding EF-hand common family protein, protein id: At1g70680.1, supported by cDNA: 9200. [Arabidopsis
  misc_feature (4)..(170): Homolog of NCBI NO: 21593851 NR Description: unknown [Arabidopsis thaliana]
  misc_feature (4)..(170): Homolog of NCBI NO: 21617961 NR Description: unknown [Arabidopsis thaliana]
  misc_feature (1)..(167): Homolog of NCBI NO: 15220687 NR Description: pollen coat EF-hand protein; protein id: supported by cDNA: 16644. [Arabidopsis thaliana]
  misc_feature (1)..(167): Homolog of NCBI NO: 6900308 NR Description: putative calcium binding EF-hand protein [Hordeum
  misc_feature (4)..(146): Homolog of NCBI NO: 37652831 NR Description: calcium binding protein [Fagus sylvatica]
  misc_feature (1)..(174): Homolog of NCBI NO: 6478218 NR Description: caleosin [Sesamum indicum]
MTELQKHVAFFDRNHDGIITFDETYQGLRDVGVGDVTAKASAAFINGALGPKTRPDNSNSSSMDIYVENIQKGKHGSDTGAYDAQGRFVPAKLDEMFTKHAKTVPNALTKDELDEMLKDNREKMDVAGWLGAKSEWEMLYKLAKDKDGRLPKDTVRTVYDGSLFYQLAAQGKKG

SEQ ID NO: 6011 - protein, 112 aa, Zea mays subsp. mays
  peptide (1)..(112): Ceres Seq. ID no. 12340826
  misc_feature (1)..(105): Pfam Name: Caleosin related protein Pfam Description: Caleosin related protein
  misc_feature (1)..(105): Homolog of NCBI NO: 34902470 NR Description: Putative abscisic acid-induced protein - rice
  misc_feature (1)..(108): Homolog of NCBI NO: 18409649 NR Description: Ca2+-binding EF-hand common family protein, protein id: At1g70670.1, supported by cDNA: 5143., supported by gi_15810176 [Arabidopsis thaliana] >gi|25406062|pir||A96731
  misc_feature (1)..(108): Homolog of NCBI NO: 18409651 NR Description: Ca2+-binding EF-hand common family protein, protein id: At1g70680.1, supported by cDNA: 9200. [Arabidopsis
  misc_feature (1)..(108): Homolog of NCBI NO: 21593851 NR Description: unknown [Arabidopsis thaliana]
  misc_feature (1)..(108): Homolog of NCBI NO: 21617961 NR Description: unknown [Arabidopsis thaliana]
  misc_feature (1)..(105): Homolog of NCBI NO: 15220687 NR Description: pollen coat EF-hand protein; protein id: supported by cDNA: 16644. [Arabidopsis thaliana]
  misc_feature (1)..(105): Homolog of NCBI NO: 6900308 NR Description: putative calcium binding EF-hand protein [Hordeum
  misc_feature (1)..(84): Homolog of NCBI NO: 37652831 NR Description: calcium binding protein [Fagus sylvatica]
  misc_feature (1)..(112): Homolog of NCBI NO: 6478218 NR Description: caleosin [Sesamum indicum]
MDIYVENIQKGKHGSDTGAYDAQGRFVPAKLDEMFTKHAKTVPNALTKDELDEMLKDNREKMDVAGWLGAKSEWEMLYKLAKDKDGRLPKDTVRTVYDGSLFYQLAAQGKKG

SEQ ID NO: 6012 - DNA, 1514 bp, Zea mays subsp. mays; identical to SEQ ID NO: 2054
  misc_feature (1)..(1514): Ceres Seq. ID no. 12340715
  misc_feature: MA Experiment ID: 108535 Result: Up-regulated in Transcription
  misc_feature: MA Experiment 108535 PARAMETER Experiment Name: Zm_Meristem_P Parameter: Age (day) Value: 8
  misc_feature: MA Experiment 108535 PARAMETER Experiment Name: Zm_Meristem_P Parameter: Organism Value: Zea mays
  misc_feature: MA Experiment 108535 PARAMETER Experiment Name: Zm_Meristem_P Parameter: Plant Line Value: 35A19
  misc_feature: MA Experiment 108535 PARAMETER Experiment Name: Zm_Meristem_P Parameter: Tissue Value: Root Meristem vs. Above Root Meristem
  misc_feature: MA Experiment ID: 108544 Result: Down-regulated in Transcription

SEQ ID NO: 6013 - protein, 309 aa, Zea mays subsp. mays; identical to SEQ ID NO: 2055
  peptide (1)..(309): Ceres Seq. ID no. 12340716
  misc_feature (1)..(309): Homolog of NCBI NO: 34914658 NR Description: P0504D03.20 [Oryza sativa (japonica >gi|18202717|sp|Q9AWM9|BXD1_ORYSA Brix domain containing protein
  misc_feature (5)..(309): Homolog of NCBI NO: 18403828 NR Description: expressed protein; protein id: At3g23620.1, by cDNA: 25758., supported by cDNA: gi_17979360 [Arabidopsis >gi|18203245|sp|Q9LUG5|U170_ARATH Hypothetical protein At3g23620
  misc_feature (5)..(309): Homolog of NCBI NO: 21554561 NR Description: unknown [Arabidopsis thaliana]
  misc_feature (5)..(305): Homolog of NCBI NO: 7670547 NR Description: unnamed protein product [Mus musculus]
  misc_feature (8)..(305): Homolog of NCBI NO: 27705690 NR Description: similar to RIKEN cDNA 2810470K21 gene [Mus
  misc_feature (8)..(305): Homolog of NCBI NO: 18203123 NR Description: Brix domain containing protein 1 unnamed protein product [Mus musculus] unnamed protein product [Mus musculus]
  misc_feature (8)..(305): Homolog of NCBI NO: 39930469 NR Description: brix domain containing 1 [Homo sapiens] Brix domain containing protein 1 >gi|22268137|gb|AAH35314.1|
  misc_feature (8)..(305): Homolog of NCBI NO: 31982662 NR Description: RIKEN cDNA 2810470K21 [Mus musculus]
  misc_feature (8)..(305): Homolog of NCBI NO: 12850727 NR Description: unnamed protein product [Mus musculus]
  misc_feature (8)..(307): Homolog of NCBI NO: 28461332 NR Description: Similar to RIKEN cDNA 2810470K21 gene [Xenopus

SEQ ID NO: 6014 - protein, 182 aa, Zea mays subsp. mays; identical to SEQ ID NO: 2056
  peptide (1)..(182): Ceres Seq. ID no. 12340717
  misc_feature (1)..(182): Homolog of NCBI NO: 34914658 NR Description: P0504D03.20 [Oryza sativa (japonica >gi|18202717|sp|Q9AWM9|BXD1_ORYSA Brix domain containing protein
  misc_feature (1)..(182): Homolog of NCBI NO: 18403828 NR Description: expressed protein; protein id: At3g23620.1, by cDNA: 25758., supported by cDNA: gi_17979360 [Arabidopsis >gi|18203245|sp|Q9LUG5|U170_ARATH Hypothetical protein At3g23620
  misc_feature (1)..(182): Homolog of NCBI NO: 21554561 NR Description: unknown [Arabidopsis thaliana]
  misc_feature (1)..(178): Homolog of NCBI NO: 7670547 NR Description: unnamed protein product [Mus musculus]
  misc_feature (1)..(178): Homolog of NCBI NO: 27705690 NR Description: similar to RIKEN cDNA 2810470K21 gene [Mus
  misc_feature (1)..(178): Homolog of NCBI NO: 18203123 NR Description: Brix domain containing protein 1 unnamed protein product [Mus musculus] unnamed protein product [Mus musculus]
  misc_feature (1)..(178): Homolog of NCBI NO: 39930469 NR Description: brix domain containing 1 [Homo sapiens] Brix domain containing protein 1 >gi|22268137|gb|AAH35314.1|
  misc_feature (1)..(178): Homolog of NCBI NO: 31982662 NR Description: RIKEN cDNA 2810470K21 [Mus musculus]
  misc_feature (1)..(178): Homolog of NCBI NO: 12850727 NR Description: unnamed protein product [Mus musculus]
  misc_feature (1)..(180): Homolog of NCBI NO: 28461332 NR Description: Similar to RIKEN cDNA 2810470K21 gene [Xenopus

SEQ ID NO: 6015 - DNA, 1070 bp, Zea mays subsp. mays
  misc_feature (1)..(1070): Ceres Seq. ID no. 12356321
  misc_feature: MA Experiment ID: 108543 Result: Up-regulated in Transcription
  misc_feature: MA Experiment ID: 108559 Result: Down-regulated in Transcription
  misc_feature: MA Experiment 108559 PARAMETER Experiment Name: Zm_5mM_NO_P Parameter: Age (day) Value: 8
  misc_feature: MA Experiment 108559 PARAMETER Experiment Name: Zm_5mM_NO_P Parameter: Organism Value: Zea mays
  misc_feature: MA Experiment 108559 PARAMETER Experiment Name: Zm_5mM_NO_P Parameter: Plant Line Value: 35A19
  misc_feature: MA Experiment 108559 PARAMETER Experiment Name: Zm_5mM_NO_P Parameter: Timepoint (hr) Value: 12
  misc_feature: MA Experiment 108559 PARAMETER Experiment Name: Zm_5mM_NO_P Parameter: Tissue Value: Aerial
  misc_feature: MA Experiment 108559 PARAMETER Experiment Name: Zm_5mM_NO_P Parameter: Treatment Value: 5mM NO vs. No Treatment
  misc_feature: MA Experiment ID: 20000534 Result: Down-regulated in Transcription
  misc_feature: MA Experiment 20000534 PARAMETER Experiment Name: Zm_Hybrid_Pollen_P Parameter: Age (day) Value: 8
  misc_feature: MA Experiment 20000534 PARAMETER Experiment Name: Zm_Hybrid_Pollen_P Parameter: Organism Value: Zea mays
  misc_feature: MA Experiment 20000534 PARAMETER Experiment Name: Zm_Hybrid_Pollen_P Parameter: Plant Line Value: 35A19
  misc_feature: MA Experiment 20000534 PARAMETER Experiment Name: Zm_Hybrid_Pollen_P Parameter: Tissue Value: Pollen vs. Aerial
  misc_feature: MA Experiment ID: 20000535 Result: Down-regulated in Transcription
  misc_feature: MA Experiment 20000535 PARAMETER Experiment Name: Zm_Hybrid_Seed_Dev_P Parameter: DAP Value: 30 vs. 12
  misc_feature: MA Experiment 20000535 PARAMETER Experiment Name: Zm_Hybrid_Seed_Dev_P Parameter: Organism Value: Zea mays
  misc_feature: MA Experiment 20000535 PARAMETER Experiment Name: Zm_Hybrid_Seed_Dev_P Parameter: Plant Line Value: 35A19
  misc_feature: MA Experiment 20000535 PARAMETER Experiment Name: Zm_Hybrid_Seed_Dev_P Parameter: Tissue Value: Embryo vs. Unfert Floret
agattttgacaacgccttcccaacttgctcgctcccgcaacgacagcgcgcacttggattcggcgaccaccggagcgcggaggaggcacaggcgccgatctagagacgatggccgccgcgggctcctcgccgtccttctcctcctcgagtaagcggctggaagggaaggtggccctcgtcaccggtggcgccaccggcatcggcgaggccatcgttcgcctcttcatggagcacggcgccaaggtctgcatcgcggacatccaggatgaggccgggcagcagctgcgcgacgccctgggaggtgacgcgcagggcgccatgttcgtccactgcgacgtgacgtcggaggaggacgtgagccgcgccgtggacgctgcggcggagcggttcggcgcgctggacgtgatggtgaataacgccggcgtgacgggcaccaaggtgacggacatccgcaccgtggacttcgcggaggcgcgcagggtgctcgacgtcaacgtgcacggcgtgttcctggtgatgaagcacgcggcgcgcgctatgatcccgcggaagcggggctccatcgtgtcgctggccagcgtggccagcgccatcggcgggacgggcccgcacgtctacacggcgtccaagcacgccgtggtcgggctcaccaagagcgtcgccgcggagctcggccgtcatggggtgcgcgtcaactgcgtgtccccctatgccgtgcccacggcgctgtcgatgccgcacctgccccagggcgcgcgcgcagatgacgcgctcaaggacttcctggcctttgtcggcggcgaggccaacctcaagggcgtcgacgccatgcccgaggacgtcgcccaggcggtgctctacctggccagcgacgaggcgaggtacgtcagcgcggtcaacctcatggtggacggaggcttcacagccgtaaacaataacctcagggcgtttgaggattagttgaggcatttatgccagctctgggattgggagggagtattaccactatttcttctgctgttgtgacaagtgagtgcaagactaataaactgcagcatgttcatgtagcc

SEQ ID NO: 6016 - protein, 283 aa, Zea mays subsp. mays
  peptide (1)..(283): Ceres Seq. ID no. 12356322
  misc_feature (1)..(283): Homolog of NCBI NO: 32129315 NR Description: putative short chain alcohol dehydrogenase [Oryza
  misc_feature (1)..(281): Homolog of NCBI NO: 15218213 NR Description: short chain alcohol dehydrogenase, putative; id: At1g52340.1, supported by cDNA: gi_20466273 [Arabidopsis
  misc_feature (15)..(224): Homolog of NCBI NO: 1717794 NR Description: SEX DETERMINATION PROTEIN TASSELSEED 2
  misc_feature (218)..(276): Homolog of NCBI NO: 1717794 NR Description: SEX DETERMINATION PROTEIN TASSELSEED 2
  misc_feature (15)..(276): Homolog of NCBI NO: 1877480 NR Description: short-chain alcohol dehydrogenase [Tripsacum
  misc_feature (4)..(282): Homolog of NCBI NO: 13752458 NR Description: stem secoisolariciresinol dehydrogenase
  misc_feature (4)..(283): Homolog of NCBI NO: 38346185 NR Description: OSJNBa0096F01.12 [Oryza sativa (japonica
  misc_feature (3)..(283): Homolog of NCBI NO: 38346186 NR Description: OSJNBa0096F01.13 [Oryza sativa (japonica
  misc_feature (11)..(276): Homolog of NCBI NO: 34898190 NR Description: putative short-chain alcohol dehydrogenase [Oryza
  misc_feature (4)..(276): Homolog of NCBI NO: 33146885 NR Description: putative short-chain alcohol dehydrogenase [Oryza
MAAAGSSPSFSSSSKRLEGKVALVTGGATGIGEAIVRLFMEHGAKVCIADIQDEAGQQLRDALGGDAQGAMFVHCDVTSEEDVSRAVDAAAERFGALDVMVNNAGVTGTKVTDIRTVDFAEARRVLDVNVHGVFLVMKHAARAMIPRKRGSIVSLASVASAIGGTGPHVYTASKHAVVGLTKSVAAELGRHGVRVNCVSPYAVPTALSMPHLPQGARADDALKDFLAFVGGEANLKGVDAMPEDVAQAVLYLASDEARYVSAVNLMVDGGFTAVNNNLRAFED

SEQ ID NO: 6017 - protein, 244 aa, Zea mays subsp. mays
  peptide (1)..(244): Ceres Seq. ID no. 12356323
  misc_feature (1)..(244): Homolog of NCBI NO: 32129315 NR Description: putative short chain alcohol dehydrogenase [Oryza
  misc_feature (1)..(242): Homolog of NCBI NO: 15218213 NR Description: short chain alcohol dehydrogenase, putative; id: At1g52340.1, supported by cDNA: gi_20466273 [Arabidopsis
  misc_feature (1)..(185): Homolog of NCBI NO: 1717794 NR Description: SEX DETERMINATION PROTEIN TASSELSEED 2
  misc_feature (179)..(237): Homolog of NCBI NO: 1717794 NR Description: SEX DETERMINATION PROTEIN TASSELSEED 2
  misc_feature (1)..(237): Homolog of NCBI NO: 1877480 NR Description: short-chain alcohol dehydrogenase [Tripsacum
  misc_feature (1)..(243): Homolog of NCBI NO: 13752458 NR Description: stem secoisolariciresinol dehydrogenase
  misc_feature (1)..(244): Homolog of NCBI NO: 38346185 NR Description: OSJNBa0096F01.12 [Oryza sativa (japonica
  misc_feature (1)..(244): Homolog of NCBI NO: 38346186 NR Description: OSJNBa0096F01.13 [Oryza sativa (japonica
  misc_feature (1)..(237): Homolog of NCBI NO: 34898190 NR Description: putative short-chain alcohol dehydrogenase [Oryza
  misc_feature (1)..(237): Homolog of NCBI NO: 33146885 NR Description: putative short-chain alcohol dehydrogenase [Oryza
MEHGAKVCIADIQDEAGQQLRDALGGDAQGAMFVHCDVTSEEDVSRAVDAAAERFGALDVMVNNAGVTGTKVTDIRTVDFAEARRVLDVNVHGVFLVMKHAARAMIPRKRGSIVSLASVASAIGGTGPHVYTASKHAVVGLTKSVAAELGRHGVRVNCVSPYAVPTALSMPHLPQGARADDALKDFLAFVGGEANLKGVDAMPEDVAQAVLYLASDEARYVSAVNLMVDGGFTAVNNNLRAFED

SEQ ID NO: 6018 - protein, 213 aa, Zea mays subsp. mays
  peptide (1)..(213): Ceres Seq. ID no. 12356324
  misc_feature (1)..(213): Homolog of NCBI NO: 32129315 NR Description: putative short chain alcohol dehydrogenase [Oryza
  misc_feature (1)..(211): Homolog of NCBI NO: 15218213 NR Description: short chain alcohol dehydrogenase, putative; id: At1g52340.1, supported by cDNA: gi_20466273 [Arabidopsis
  misc_feature (1)..(154): Homolog of NCBI NO: 1717794 NR Description: SEX DETERMINATION PROTEIN TASSELSEED 2
  misc_feature (148)..(206): Homolog of NCBI NO: 1717794 NR Description: SEX DETERMINATION PROTEIN TASSELSEED 2
  misc_feature (1)..(206): Homolog of NCBI NO: 1877480 NR Description: short-chain alcohol dehydrogenase [Tripsacum
  misc_feature (1)..(212): Homolog of NCBI NO: 13752458 NR Description: stem secoisolariciresinol dehydrogenase
  misc_feature (1)..(213): Homolog of NCBI NO: 38346185 NR Description: OSJNBa0096F01.12 [Oryza sativa (japonica
  misc_feature (1)..(213): Homolog of NCBI NO: 38346186 NR Description: OSJNBa0096F01.13 [Oryza sativa (japonica
  misc_feature (1)..(206): Homolog of NCBI NO: 34898190 NR Description: putative short-chain alcohol dehydrogenase [Oryza
  misc_feature (1)..(206): Homolog of NCBI NO: 33146885 NR Description: putative short-chain alcohol dehydrogenase [Oryza
MFVHCDVTSEEDVSRAVDAAAERFGALDVMVNNAGVTGTKVTDIRTVDFAEARRVLDVNVHGVFLVMKHAARAMIPRKRGSIVSLASVASAIGGTGPHVYTASKHAVVGLTKSVAAELGRHGVRVNCVSPYAVPTALSMPHLPQGARADDALKDFLAFVGGEANLKGVDAMPEDVAQAVLYLASDEARYVSAVNLMVDGGFTAVNNNLRAFED

SEQ ID NO: 6019 - DNA, 791 bp, Zea mays subsp. mays
  misc_feature (1)..(791): Ceres Seq. ID no. 12386614
  misc_feature: MA Experiment ID: 108528 Result: Up-regulated in Transcription
  misc_feature: MA Experiment 108528 PARAMETER Experiment Name: Zm_Imbibed_Seeds_P Parameter: Age (day) Value: 5 vs. 2
  misc_feature: MA Experiment 108528 PARAMETER Experiment Name: Zm_Imbibed_Seeds_P Parameter: Organism Value: Zea mays
  misc_feature: MA Experiment 108528 PARAMETER Experiment Name: Zm_Imbibed_Seeds_P Parameter: Plant Line Value: 35A19
  misc_feature: MA Experiment 108528 PARAMETER Experiment Name: Zm_Imbibed_Seeds_P Parameter: Tissue Value: Aerial vs. Embryo
  misc_feature: MA Experiment ID: 108529 Result: Up-regulated in Transcription
  misc_feature: MA Experiment 108529 PARAMETER Experiment Name: Zm_Imbibed_Seeds_P Parameter: Age (day) Value: 5 vs. 2
  misc_feature: MA Experiment 108529 PARAMETER Experiment Name: Zm_Imbibed_Seeds_P Parameter: Organism Value: Zea mays
  misc_feature: MA Experiment 108529 PARAMETER Experiment Name: Zm_Imbibed_Seeds_P Parameter: Plant Line Value: 35A19
  misc_feature: MA Experiment 108529 PARAMETER Experiment Name: Zm_Imbibed_Seeds_P Parameter: Tissue Value: Roots vs. Embryo
  misc_feature: MA Experiment ID: 108530 Result: Up-regulated in Transcription
  misc_feature: MA Experiment 108530 PARAMETER Experiment Name: Zm_Imbibed_Seeds_P Parameter: Age (day) Value: 6 vs. 2
  misc_feature: MA Experiment 108530 PARAMETER Experiment Name: Zm_Imbibed_Seeds_P Parameter: Organism Value: Zea mays
  misc_feature: MA Experiment 108530 PARAMETER Experiment Name: Zm_Imbibed_Seeds_P Parameter: Plant Line Value: 35A19
  misc_feature: MA Experiment 108530 PARAMETER Experiment Name: Zm_Imbibed_Seeds_P Parameter: Tissue Value: Aerial vs. Embryo
  misc_feature: MA Experiment ID: 108533 Result: Up-regulated in Transcription
  misc_feature: MA Experiment 108533 PARAMETER Experiment Name: Zm_4deg_Cold_P Parameter: Age (hr) Value: 8
  misc_feature: MA Experiment 108533 PARAMETER Experiment Name: Zm_4deg_Cold_P Parameter: Organism Value: Zea mays
  misc_feature: MA Experiment 108533 PARAMETER Experiment Name: Zm_4deg_Cold_P Parameter: Plant Line Value: 35A19
  misc_feature: MA Experiment 108533 PARAMETER Experiment Name: Zm_4deg_Cold_P Parameter: Temperature (deg C) Value: 4 vs. 22
  misc_feature: MA Experiment 108533 PARAMETER Experiment Name: Zm_4deg_Cold_P Parameter: Timepoint (hr) Value: 1
  misc_feature: MA Experiment 108533 PARAMETER Experiment Name: Zm_4deg_Cold_P Parameter: Tissue Value: Aerial
  misc_feature: MA Experiment ID: 108535 Result: Down-regulated in Transcription
  misc_feature: MA Experiment 108535 PARAMETER Experiment Name: Zm_Meristem_P Parameter: Age (day) Value: 8
  misc_feature: MA Experiment 108535 PARAMETER Experiment Name: Zm_Meristem_P Parameter: Organism Value: Zea mays
  misc_feature: MA Experiment 108535 PARAMETER Experiment Name: Zm_Meristem_P Parameter: Plant Line Value: 35A19
  misc_feature: MA Experiment 108535 PARAMETER Experiment Name: Zm_Meristem_P Parameter: Tissue Value: Root Meristem vs. Above Root Meristem
  misc_feature: MA Experiment ID: 108545 Result: Up-regulated in Transcription
  misc_feature: MA Experiment 108545 PARAMETER Experiment Name: Zm_Imbibed_Seeds_P Parameter: Age (day) Value: 3 vs. 2
  misc_feature: MA Experiment 108545 PARAMETER Experiment Name: Zm_Imbibed_Seeds_P Parameter: Organism Value: Zea mays
  misc_feature: MA Experiment 108545 PARAMETER Experiment Name: Zm_Imbibed_Seeds_P Parameter: Plant Line Value: 35A19
  misc_feature: MA Experiment 108545 PARAMETER Experiment Name: Zm_Imbibed_Seeds_P Parameter: Tissue Value: Aerial vs. Embryo
  misc_feature: MA Experiment ID: 108547 Result: Up-regulated in Transcription
  misc_feature: MA Experiment 108547 PARAMETER Experiment Name: Zm_Imbibed_Seeds_P Parameter: Age (day) Value: 4 vs. 2
  misc_feature: MA Experiment 108547 PARAMETER Experiment Name: Zm_Imbibed_Seeds_P Parameter: Organism Value: Zea mays
  misc_feature: MA Experiment 108547 PARAMETER Experiment Name: Zm_Imbibed_Seeds_P Parameter: Plant Line Value: 35A19
  misc_feature: MA Experiment 108547 PARAMETER Experiment Name: Zm_Imbibed_Seeds_P Parameter: Tissue Value: Aerial vs. Embryo
  misc_feature: MA Experiment ID: 108687 Result: Down-regulated in Transcription
  misc_feature: MA Experiment 108687 PARAMETER Experiment Name: Zm_Embryos-Flowers__P Parameter: Tissue Value: Embryo vs. Aerial+
  misc_feature: MA Experiment ID: 20000480 Result: Down-regulated in Transcription
  misc_feature: MA Experiment 20000480 PARAMETER Experiment Name: Zm_Drought_P Parameter: Age (day) Value: 11
  misc_feature: MA Experiment 20000480 PARAMETER Experiment Name: Zm_Drought_P Parameter: Organism Value: Zea mays
  misc_feature: MA Experiment 20000480 PARAMETER Experiment Name: Zm_Drought_P Parameter: Plant Line Value: 35A19
  misc_feature: MA Experiment 20000480 PARAMETER Experiment Name: Zm_Drought_P Parameter: Timepoint (hr) Value: 72
  misc_feature: MA Experiment 20000480 PARAMETER Experiment Name: Zm_Drought_P Parameter: Tissue Value: Aerial
  misc_feature: MA Experiment 20000480 PARAMETER Experiment Name: Zm_Drought_P Parameter: Treatment Value: Drought vs. No Drought
  misc_feature: MA Experiment ID: 20000626 Result: Down-regulated in Transcription
  misc_feature: MA Experiment 20000626 PARAMETER Experiment Name: Zm_Herbicide-Treatments_P Parameter: Timepoint (hr) Value: 12
  misc_feature: MA Experiment 20000626 PARAMETER Experiment Name: Zm_Herbicide-Treatments_P Parameter: Tissue Value: Aerial
  misc_feature: MA Experiment 20000626 PARAMETER Experiment Name: Zm_Herbicide-Treatments_P Parameter: Treatment Value: Roundup vs. No Treatment
  misc_feature: MA Experiment ID: 20001610 Result: Down-regulated in Transcription
  misc_feature: MA Experiment 20001610 PARAMETER Experiment Name: Zm_50ppm_KNO3_L-to-H_P Parameter: Age (day) Value: 19
  misc_feature: MA Experiment 20001610 PARAMETER Experiment Name: Zm_50ppm_KNO3_L-to-H_P Parameter: Organism Value: Zea mays
  misc_feature: MA Experiment 20001610 PARAMETER Experiment Name: Zm_50ppm_KNO3_L-to-H_P Parameter: Plant Line Value: 35A19
  misc_feature: MA Experiment 20001610 PARAMETER Experiment Name: Zm_50ppm_KNO3_L-to-H_P Parameter: Timepoint (hr) Value: 2
  misc_feature: MA Experiment 20001610 PARAMETER Experiment Name: Zm_50ppm_KNO3_L-to-H_P Parameter: Tissue Value: Roots
  misc_feature: MA Experiment 20001610 PARAMETER Experiment Name: Zm_50ppm_KNO3_L-to-H_P Parameter: Treatment Value: 50ppm KNO3 vs. 50ppm KCl
  misc_feature: MA Experiment ID: 20001612 Result: Down-regulated in Transcription
  misc_feature: MA Experiment 20001612 PARAMETER Experiment Name: Zm_50ppm_KNO3_L-to-H_P Parameter: Age (day) Value: 19
  misc_feature: MA Experiment 20001612 PARAMETER Experiment Name: Zm_50ppm_KNO3_L-to-H_P Parameter: Organism Value: Zea mays
  misc_feature: MA Experiment 20001612 PARAMETER Experiment Name: Zm_50ppm_KNO3_L-to-H_P Parameter: Plant Line Value: 35A19
  misc_feature: MA Experiment 20001612 PARAMETER Experiment Name: Zm_50ppm_KNO3_L-to-H_P Parameter: Timepoint (hr) Value: 8
  misc_feature: MA Experiment 20001612 PARAMETER Experiment Name: Zm_50ppm_KNO3_L-to-H_P Parameter: Tissue Value: Roots
  misc_feature: MA Experiment 20001612 PARAMETER Experiment Name: Zm_50ppm_KNO3_L-to-H_P Parameter: Treatment Value: 50ppm KNO3 vs. 50ppm KCl
  misc_feature: MA Experiment ID: 20001613 Result: Down-regulated in Transcription
  misc_feature: MA Experiment 20001613 PARAMETER Experiment Name: Zm_50ppm_KNO3_L-to-H_P Parameter: Age (day) Value: 20
  misc_feature: MA Experiment 20001613 PARAMETER Experiment Name: Zm_50ppm_KNO3_L-to-H_P Parameter: Organism Value: Zea mays
  misc_feature: MA Experiment 20001613 PARAMETER Experiment Name: Zm_50ppm_KNO3_L-to-H_P Parameter: Plant Line Value: 35A19
  misc_feature: MA Experiment 20001613 PARAMETER Experiment Name: Zm_50ppm_KNO3_L-to-H_P Parameter: Timepoint (hr) Value: 24
  misc_feature: MA Experiment 20001613 PARAMETER Experiment Name: Zm_50ppm_KNO3_L-to-H_P Parameter: Tissue Value: Roots
  misc_feature: MA Experiment 20001613 PARAMETER Experiment Name: Zm_50ppm_KNO3_L-to-H_P Parameter: Treatment Value: 50ppm KNO3 vs. 50ppm KCl
cttctcacgccgcctgcccagagcctctgcatcatccaacaacagcgacaccacgggactcgcgccatcttcagccagcgcaaacacatggcgaggatactcgtcgaagcgcccgcaggctcgggctcgccggaggactccatcaactcggacatgatcctcatcctcgccggcctgctctgcgcgctggtctgcgtcctcggcctgggcctcgtcgcccggtgcgcgtgctcgtggcgctgggccaccgagtccggccgggcgcagccggacgccgccaaagccgcgaacaggggcgtcaagaaggaggttctgcgctcgctcccgaccgtcacgtacgtctccgacagcggcaaggcggcggcggccgcggagggaggggccgacgagtgcgccatctgcctcgccgagttcgagggaggccaggccgtgcgcgtgctgccgcagtgcggccacgcgttccacgccgcctgcgtcgacacgtggctgcgcgcgcactcctcctgcccgtcctgccgccgggtgctggccgtcgacctgccccccgccgagcggtgccgccgctgtggcgcgcgccccggtgccggcatcagcgcgctctggaaggcgcccacncgctgcagcgccgaggggccgacgttcttggcgtagtgccgtgcgcactcgatatacaggaattgaaccgacgcgcagtctcagtgatgaacttgtttttttttttagcctggtaggtttcaccttttttaggtgtgtgtagtgattagctcaacggtggagtgttctggacaagc

SEQ ID NO: 6020 - protein, 242 aa, Zea mays subsp. mays
  peptide (1)..(242): Ceres Seq. ID no. 12386615
  misc_feature (205)..(205): Xaa is any aa, unknown or other
SHAACPEPLHHPTTATPRDSRHLQPAQTHGEDTRRSARRLGLAGGLHQLGHDPHPRRPALRAGLRPRPGPRRPVRVLVALGHRVRPGAAGRRQSREQGRQEGGSALAPDRHVRLRQRQGGGGRGGRGRRVRHLPRRVRGRPGRARAAAVRPRVPRRLRRHVAARALLLPVLPPGAGRRPAPRRAVPPLWRAPRCRHQRALEGAHXLQRRGADVLGVVPCALDIQELNRRAVSVMNLFFFLAW

SEQ ID NO: 6021 - protein, 216 aa, Zea mays subsp. mays
  peptide (1)..(216): Ceres Seq. ID no. 12386616
  misc_feature (131)..(172): Pfam Name: Zinc finger, C3HC4 type (RING finger) Pfam Description: Zinc finger, C3HC4 type (RING finger)
  misc_feature (30)..(198): Homolog of NCBI NO: 15223041 NR Description: putative RING zinc finger protein; protein id: supported by cDNA: 27464. [Arabidopsis thaliana]
  misc_feature (30)..(198): Homolog of NCBI NO: 21555237 NR Description: putative RING zinc finger protein [Arabidopsis
  misc_feature (32)..(204): Homolog of NCBI NO: 15218042 NR Description: similar to putative RING zinc finger protein; id: At1g20823.1 [Arabidopsis thaliana] >gi|25402932|pir||F86340
  misc_feature (92)..(191): Homolog of NCBI NO: 37536508 NR Description: putative ring finger protein [Oryza sativa
  misc_feature (44)..(96): Homolog of NCBI NO: 37536508 NR Description: putative ring finger protein [Oryza sativa
  misc_feature (31)..(199): Homolog of NCBI NO: 7489432 NR Description: probable ring finger protein - barley
  misc_feature (34)..(190): Homolog of NCBI NO: 15227839 NR Description: putative RING zinc finger protein; protein id: supported by cDNA: gi_13877952, supported by cDNA: gi_17065625,
  misc_feature (44)..(190): Homolog of NCBI NO: 15237013 NR Description: RING-H2 finger protein RHA3b; protein id: supported by cDNA: 31493., supported by cDNA: gi_3790574
  misc_feature (40)..(199): Homolog of NCBI NO: 34907826 NR Description: P0485B12.26 [Oryza sativa (japonica
  misc_feature (47)..(176): Homolog of NCBI NO: 17016985 NR Description: RING-H2 zinc finger protein [Cucumis melo]
  misc_feature (205)..(205): Xaa is any aa, unknown or other
LLTPPAQSLCIIQQQRHHGTRAIFSQRKHMARILVEAPAGSGSPEDSINSDMILILAGLLCALVCVLGLGLVARCACSWRWATESGRAQPDAAKAANRGVKKEVLRSLPTVTYVSDSGKAAAAAEGGADECAICLAEFEGGQAVRVLPQCGHAFHAACVDTWLRAHSSCPSCRRVLAVDLPPAERCRRCGARPGAGISALWKAPXRCSAEGPTFLA

SEQ ID NO: 6022 - protein, 187 aa, Zea mays subsp. mays
  peptide (1)..(187): Ceres Seq. ID no. 12386617
  misc_feature (102)..(143): Pfam Name: Zinc finger, C3HC4 type (RING finger) Pfam Description: Zinc finger, C3HC4 type (RING finger)
  misc_feature (1)..(169): Homolog of NCBI NO: 15223041 NR Description: putative RING zinc finger protein; protein id: supported by cDNA: 27464. [Arabidopsis thaliana]
  misc_feature (1)..(169): Homolog of NCBI NO: 21555237 NR Description: putative RING zinc finger protein [Arabidopsis
  misc_feature (3)..(175): Homolog of NCBI NO: 15218042 NR Description: similar to putative RING zinc finger protein; id: At1g20823.1 [Arabidopsis thaliana] >gi|25402932|pir||F86340
  misc_feature (63)..(162): Homolog of NCBI NO: 37536508 NR Description: putative ring finger protein [Oryza sativa
  misc_feature (15)..(67): Homolog of NCBI NO: 37536508 NR Description: putative ring finger protein [Oryza sativa
  misc_feature (2)..(170): Homolog of NCBI NO: 7489432 NR Description: probable ring finger protein - barley
  misc_feature (5)..(161): Homolog of NCBI NO: 15227839 NR Description: putative RING zinc finger protein; protein id: supported by cDNA: gi_13877952, supported by cDNA: gi_17065625,
  misc_feature (15)..(161): Homolog of NCBI NO: 15237013 NR Description: RING-H2 finger protein RHA3b; protein id: supported by cDNA: 31493., supported by cDNA: gi_3790574
  misc_feature (11)..(170): Homolog of NCBI NO: 34907826 NR Description: P0485B12.26 [Oryza sativa (japonica
  misc_feature (18)..(147): Homolog of NCBI NO: 17016985 NR Description: RING-H2 zinc finger protein [Cucumis melo]
  misc_feature (176)..(176): Xaa is any aa, unknown or other
MARILVEAPAGSGSPEDSINSDMILILAGLLCALVCVLGLGLVARCACSWRWATESGRAQPDAAKAANRGVKKEVLRSLPTVTYVSDSGKAAAAAEGGADECAICLAEFEGGQAVRVLPQCGHAFHAACVDTWLRAHSSCPSCRRVLAVDLPPAERCRRCGARPGAGISALWKAPXRCSAEGPTFLA

SEQ ID NO: 6023 - DNA, 1042 bp, Zea mays subsp. mays
  misc_feature (1)..(1042): Ceres Seq. ID no. 13598836
  misc_feature: MA Experiment ID: 108535 Result: Down-regulated in Transcription
  misc_feature: MA Experiment 108535 PARAMETER Experiment Name: Zm_Meristem_P Parameter: Age (day) Value: 8
  misc_feature: MA Experiment 108535 PARAMETER Experiment Name: Zm_Meristem_P Parameter: Organism Value: Zea mays
  misc_feature: MA Experiment 108535 PARAMETER Experiment Name: Zm_Meristem_P Parameter: Plant Line Value: 35A19
  misc_feature: MA Experiment 108535 PARAMETER Experiment Name: Zm_Meristem_P Parameter: Tissue Value: Root Meristem vs. Above Root Meristem
  misc_feature: MA Experiment ID: 108536 Result: Down-regulated in Transcription
  misc_feature: MA Experiment 108536 PARAMETER Experiment Name: Zm_Meristem_P Parameter: Age (day) Value: 8
  misc_feature: MA Experiment 108536 PARAMETER Experiment Name: Zm_Meristem_P Parameter: Organism Value: Zea mays
  misc_feature: MA Experiment 108536 PARAMETER Experiment Name: Zm_Meristem_P Parameter: Plant Line Value: 35A19
  misc_feature: MA Experiment 108536 PARAMETER Experiment Name: Zm_Meristem_P Parameter: Tissue Value: Shoot Meristem vs. Above Shoot Meristem
  misc_feature: MA Experiment ID: 108543 Result: Up-regulated in Transcription
  misc_feature: MA Experiment ID: 108556 Result: Down-regulated in Transcription
  misc_feature: MA Experiment 108556 PARAMETER Experiment Name: Zm_Drought_P Parameter: Age (day) Value: 9
  misc_feature: MA Experiment 108556 PARAMETER Experiment Name: Zm_Drought_P Parameter: Organism Value: Zea mays
  misc_feature: MA Experiment 108556 PARAMETER Experiment Name: Zm_Drought_P Parameter: Plant Line Value: 35A19
  misc_feature: MA Experiment 108556 PARAMETER Experiment Name: Zm_Drought_P Parameter: Timepoint (hr) Value: 24
  misc_feature: MA Experiment 108556 PARAMETER Experiment Name: Zm_Drought_P Parameter: Tissue Value: Aerial
  misc_feature: MA Experiment 108556 PARAMETER Experiment Name: Zm_Drought_P Parameter: Treatment Value: Drought vs. No Drought
  misc_feature: MA Experiment ID: 108597 Result: Down-regulated in Transcription
  misc_feature: MA Experiment 108597 PARAMETER Experiment Name: Zm_100uM_ABA_P Parameter: Age (day) Value: 9
  misc_feature: MA Experiment 108597 PARAMETER Experiment Name: Zm_100uM_ABA_P Parameter: Organism Value: Zea mays
  misc_feature: MA Experiment 108597 PARAMETER Experiment Name: Zm_100uM_ABA_P Parameter: Plant Line Value: 35A19
  misc_feature: MA Experiment 108597 PARAMETER Experiment Name: Zm_100uM_ABA_P Parameter: Timepoint (hr) Value: 24
  misc_feature: MA Experiment 108597 PARAMETER Experiment Name: Zm_100uM_ABA_P Parameter: Tissue Value: Aerial
  misc_feature: MA Experiment 108597 PARAMETER Experiment Name: Zm_100uM_ABA_P Parameter: Treatment Value: 100uM ABA vs. No Treatment
  misc_feature: MA Experiment ID: 108688 Result: Down-regulated in Transcription
  misc_feature: MA Experiment 108688 PARAMETER Experiment Name: Zm_Embryos-Flowers__P Parameter: Tissue Value: Immature Flowers vs. Aerial+
  misc_feature: MA Experiment ID: 20000477 Result: Down-regulated in Transcription
  misc_feature: MA Experiment 20000477 PARAMETER Experiment Name: Zm_5mM_SA_P Parameter: Age (day) Value: 10
  misc_feature: MA Experiment 20000477 PARAMETER Experiment Name: Zm_5mM_SA_P Parameter: Organism Value: Zea mays
  misc_feature: MA Experiment 20000477 PARAMETER Experiment Name: Zm_5mM_SA_P Parameter: Plant Line Value: 35A19
  misc_feature: MA Experiment 20000477 PARAMETER Experiment Name: Zm_5mM_SA_P Parameter: Timepoint (hr) Value: 48
  misc_feature: MA Experiment 20000477 PARAMETER Experiment Name: Zm_5mM_SA_P Parameter: Tissue Value: Aerial
  misc_feature: MA Experiment 20000477 PARAMETER Experiment Name: Zm_5mM_SA_P Parameter: Treatment Value: 5mM SA vs. No Treatment
  misc_feature: MA Experiment ID: 20000478 Result: Down-regulated in Transcription
  misc_feature: MA Experiment 20000478 PARAMETER Experiment Name: Zm_5mM_SA_P Parameter: Age (day) Value: 11
  misc_feature: MA Experiment 20000478 PARAMETER Experiment Name: Zm_5mM_SA_P Parameter: Organism Value: Zea mays
  misc_feature: MA Experiment 20000478 PARAMETER Experiment Name: Zm_5mM_SA_P Parameter: Plant Line Value: 35A19
  misc_feature: MA Experiment 20000478 PARAMETER Experiment Name: Zm_5mM_SA_P Parameter: Timepoint (hr) Value: 72
  misc_feature: MA Experiment 20000478 PARAMETER Experiment Name: Zm_5mM_SA_P Parameter: Tissue Value: Aerial
  misc_feature: MA Experiment 20000478 PARAMETER Experiment Name: Zm_5mM_SA_P Parameter: Treatment Value: 5mM SA vs. No Treatment
  misc_feature: MA Experiment ID: 20000479 Result: Down-regulated in Transcription
  misc_feature: MA Experiment 20000479 PARAMETER Experiment Name: Zm_Drought_P Parameter: Age (day) Value: 10
  misc_feature: MA Experiment 20000479 PARAMETER Experiment Name: Zm_Drought_P Parameter: Organism Value: Zea mays
  misc_feature: MA Experiment 20000479 PARAMETER Experiment Name: Zm_Drought_P Parameter: Plant Line Value: 35A19
  misc_feature: MA Experiment 20000479 PARAMETER Experiment Name: Zm_Drought_P Parameter: Timepoint (hr) Value: 48
  misc_feature: MA Experiment 20000479 PARAMETER Experiment Name: Zm_Drought_P Parameter: Tissue Value: Aerial
  misc_feature: MA Experiment 20000479 PARAMETER Experiment Name: Zm_Drought_P Parameter: Treatment Value: Drought vs. No Drought
  misc_feature: MA Experiment ID: 20000480 Result: Down-regulated in Transcription
  misc_feature: MA Experiment 20000480 PARAMETER Experiment Name: Zm_Drought_P Parameter: Age (day) Value: 11
  misc_feature: MA Experiment 20000480 PARAMETER Experiment Name: Zm_Drought_P Parameter: Organism Value: Zea mays
  misc_feature: MA Experiment 20000480 PARAMETER Experiment Name: Zm_Drought_P Parameter: Plant Line Value: 35A19
  misc_feature: MA Experiment 20000480 PARAMETER Experiment Name: Zm_Drought_P Parameter: Timepoint (hr) Value: 72
  misc_feature: MA Experiment 20000480 PARAMETER Experiment Name: Zm_Drought_P Parameter: Tissue Value: Aerial
  misc_feature: MA Experiment 20000480 PARAMETER Experiment Name: Zm_Drought_P Parameter: Treatment Value: Drought vs. No Drought
  misc_feature: MA Experiment ID: 20000488 Result: Down-regulated in Transcription
  misc_feature: MA Experiment 20000488 PARAMETER Experiment Name: Zm_50mM_NH4NO3_L_to_H_P Parameter: Organism Value: Zea mays
  misc_feature: MA Experiment 20000488 PARAMETER Experiment Name: Zm_50mM_NH4NO3_L_to_H_P Parameter: Timepoint (hr) Value: 8
  misc_feature: MA Experiment 20000488 PARAMETER Experiment Name: Zm_50mM_NH4NO3_L_to_H_P Parameter: Tissue Value: Leaves
  misc_feature: MA Experiment 20000488 PARAMETER Experiment Name: Zm_50mM_NH4NO3_L_to_H_P Parameter: Treatment Value: 50mM NH4NO3 vs. 100mM Mannitol
  misc_feature: MA Experiment ID: 20000533 Result: Down-regulated in Transcription
  misc_feature: MA Experiment 20000533 PARAMETER Experiment Name: Zm_0.001percent_MeJA_P Parameter: Age (day) Value: 11
  misc_feature: MA Experiment 20000533 PARAMETER Experiment Name: Zm_0.001percent_MeJA_P Parameter: Organism Value: Zea mays
  misc_feature: MA Experiment 20000533 PARAMETER Experiment Name: Zm_0.001percent_MeJA_P Parameter: Plant Line Value: 35A19
  misc_feature: MA Experiment 20000533 PARAMETER Experiment Name: Zm_0.001percent_MeJA_P Parameter: Timepoint (hr) Value: 72
  misc_feature: MA Experiment 20000533 PARAMETER Experiment Name: Zm_0.001percent_MeJA_P Parameter: Tissue Value: Aerial
  misc_feature: MA Experiment 20000533 PARAMETER Experiment Name: Zm_0.001percent_MeJA_P Parameter: Treatment Value: 0.001percent MeJA vs. No Treatment
  misc_feature: MA Experiment ID: 20000534 Result: Down-regulated in Transcription
  misc_feature: MA Experiment 20000534 PARAMETER Experiment Name: Zm_Hybrid_Pollen_P Parameter: Age (day) Value: 8
  misc_feature: MA Experiment 20000534 PARAMETER Experiment Name: Zm_Hybrid_Pollen_P Parameter: Organism Value: Zea mays
  misc_feature: MA Experiment 20000534 PARAMETER Experiment Name: Zm_Hybrid_Pollen_P Parameter: Plant Line Value: 35A19
  misc_feature: MA Experiment 20000534 PARAMETER Experiment Name: Zm_Hybrid_Pollen_P Parameter: Tissue Value: Pollen vs. Aerial
  misc_feature: MA Experiment ID: 20000626 Result: Down-regulated in Transcription
  misc_feature: MA Experiment 20000626 PARAMETER Experiment Name: Zm_Herbicide-Treatments_P Parameter: Timepoint (hr) Value: 12
  misc_feature: MA Experiment 20000626 PARAMETER Experiment Name: Zm_Herbicide-Treatments_P Parameter: Tissue Value: Aerial
  misc_feature: MA Experiment 20000626 PARAMETER Experiment Name: Zm_Herbicide-Treatments_P Parameter: Treatment Value: Roundup vs. No Treatment
agcatcaccattcttcatccctcgttgtcatctcacagcttgggctagagaccaaacaaaccaaagggaagcatggcagcaggcctgcaagtgtttggccagccggcgtctactgatgttgccagggttctgacgtgcctgtttgagaagaaattggagtttgagcttgtccgcattgatacatttaagacacatcacaggcttcctgagttcatcaggctgcgggatccgaatgggcaagtgaccttcaagcatggcgacaaaacccttgttgattcaagggacatatgccggtacgtttgcaaccagtttccaaattacggaaacaagagcctctatggatctggtgctctagaacgggcatcgatagaacagtggctccaggcagaagcccagaactttggccctcccagctctgcgcttgtgtttcagctggcgttcgttccgcacctcagtcacctgggcgttcgtcaggaccctgctgttattgctgaaaacgaggacaaactgaagcaggttcttgatgtttacgacgaaatactctccaagaacgagtacctggctggtgatgagttcaccctggccgacctgtctcaccttccgaactcgcactacatcgtaaacaccgagagaggaaggaagctcttcaccaacaagaagaatgtggcgaaatggtatgacaggctctcgaagcgcgagacatgggtgcaggtcgtcaagatgcagaaggaacatcctggtgcgttcaagtaatggcttgtcttggggagttgtgagtatggcttcatcgtccgtgttggtctggctcatcagtgttaaaagcccatcagtgtcgtcaaccagaataatgtgaagcccaactgtgatgtatggtcttttttttttttaaaagcgcatttgtaaactattggctatttcttgcacgtgccaattcatcgtcacatataaaataaactgtatctttggaccttgaaaaaaaaaaaaaaaaaaaaaaaaagaaaaaaaaaaaaaaaaaacggcacgagaagccggcacgagaagc

SEQ ID NO: 6024 - protein, 226 aa, Zea mays subsp. mays
  peptide (1)..(226): Ceres Seq. ID no. 15222432
  misc_feature (1)..(226): Homolog of NCBI NO: 11385475 NR Description: glutathione S-transferase GST 12 [Zea mays]
  misc_feature (1)..(226): Homolog of NCBI NO: 11385477 NR Description: glutathione S-transferase GST 13 [Zea mays]
  misc_feature (1)..(226): Homolog of NCBI NO: 22758269 NR Description: Putative glutathione S-transferase [Oryza sativa
  misc_feature (131)..(226): Homolog of NCBI NO: 22758268 NR Description: Putative glutathione S-transferase [Oryza sativa
  misc_feature (1)..(83): Homolog of NCBI NO: 22758268 NR Description: Putative glutathione S-transferase [Oryza sativa
  misc_feature (5)..(155): Homolog of NCBI NO: 11385479 NR Description: glutathione S-transferase GST 14 [Zea mays]
  misc_feature (145)..(224): Homolog of NCBI NO: 11385479 NR Description: glutathione S-transferase GST 14 [Zea mays]
  misc_feature (1)..(218): Homolog of NCBI NO: 11177845 NR Description: putative glutathione S-transferase OsGSTF3 [Oryza
  misc_feature (1)..(218): Homolog of NCBI NO: 22758267 NR Description: Putative glutathione S-transferase [Oryza sativa
  misc_feature (1)..(226): Homolog of NCBI NO: 11385469 NR Description: glutathione S-transferase GST 9 [Zea mays]
MAAGLQVFGQPASTDVARVLTCLFEKKLEFELVRIDTFKTHHRLPEFIRLRDPNGQVTFKHGDKTLVDSRDICRYVCNQFPNYGNKSLYGSGALERASIEQWLQAEAQNFGPPSSALVFQLAFVPHLSHLGVRQDPAVIAENEDKLKQVLDVYDEILSKNEYLAGDEFTLADLSHLPNSHYIVNTERGRKLFTNKKNVAKWYDRLSKRETWVQVVKMQKEHPGAFK

SEQ ID NO: 6025 - DNA, 929 bp, Zea mays subsp. mays
  misc_feature (1)..(929): Ceres Seq. ID no. 12342915
  misc_feature: MA Experiment ID: 108530 Result: Up-regulated in Transcription
  misc_feature: MA Experiment 108530 PARAMETER Experiment Name: Zm_Imbibed_Seeds_P Parameter: Age (day) Value: 6 vs. 2
  misc_feature: MA Experiment 108530 PARAMETER Experiment Name: Zm_Imbibed_Seeds_P Parameter: Organism Value: Zea mays
  misc_feature: MA Experiment 108530 PARAMETER Experiment Name: Zm_Imbibed_Seeds_P Parameter: Plant Line Value: 35A19
  misc_feature: MA Experiment 108530 PARAMETER Experiment Name: Zm_Imbibed_Seeds_P Parameter: Tissue Value: Aerial vs. Embryo
ctgttcttcttcgatttattagcccagcgttctccctctctcgtgggcgtggcgacgacttggaggccatcgctgccgccctacgccaggtgcccagatcatctgcggccccttcgccggcgacgatcaccatccatcagaaataggatcaagcgcttgaacttacagcgagatggaaaatgatagaaggcaacttggtcagatcgatccaagaagagcccgctttccttgctgcatagtatggactccaataccattcatcacttggttggtgccctttatcggtcacattggcatctgcagagaagacggtgtaattctggacttctctggtccacattttgtatcagttgacaattttgcattcggagctgttgcgcgctacattcaagtaaactgcgatgagtgctataagcttattgaacctgaaggagatgccacgtgggacggcgcgctgaagaaaggcacgcaggagttccaaaacagggaactacaacctgttcacctgcaactgccactcctttgtcgcaaacaatctgaacaggctgttttattccggccacgacgaatggaatgtggtcagcttggctgctgtgatgttcttacgaggccgctgggtgagcacggcatcggtggtgaagaccttattgccatttgcagttgtgctttccatcggtaccttccttggcggcacgaccttcctgaccggccttcttgctttcgccgctgcgatgactgtctggttccttgtgggcacctactgcatcaaaggtctcatagagttgtgattagagtatgttagactcgttgtagggggttcaagggtggcatatttttaagagttcaagcgtggcacatttttatttgtattgcattcctgtataatggattcttgatgttattcatgcacctatatgttccaaattccg

SEQ ID NO: 6026 - protein, 209 aa, Zea mays subsp. mays
  peptide (1)..(209): Ceres Seq. ID no. 12342916
  misc_feature (10)..(75): Pfam Name: Protein of unknown function (DUF778) Pfam Description: Protein of unknown function (DUF778)
  misc_feature (1)..(105): Homolog of NCBI NO: 34897172 NR Description: hypothetical protein [Oryza sativa (japonica group)] >gi|28209510|gb|AAO37528.1| hypothetical protein [Oryza
  misc_feature (10)..(75): Homolog of NCBI NO: 21592754 NR Description: unknown [Arabidopsis thaliana]
  misc_feature (10)..(75): Homolog of NCBI NO: 15230386 NR Description: putative protein; protein id: At3g51040.1, by cDNA: 32231., supported by cDNA: gi_15027928, supported by
  misc_feature (2)..(105): Homolog of NCBI NO: 7452462 NR Description: hypothetical protein At2g26070 [imported] - thaliana >gi|3413706|gb|AAC31229.1| hypothetical protein
  misc_feature (2)..(105): Homolog of NCBI NO: 30682996 NR Description: expressed protein [Arabidopsis thaliana]
  misc_feature (8)..(105): Homolog of NCBI NO: 34910502 NR Description: P0456F08.26 [Oryza sativa (japonica
  misc_feature (27)..(105): Homolog of NCBI NO: 26449550 NR Description: unknown protein [Arabidopsis thaliana]
  misc_feature (7)..(105): Homolog of NCBI NO: 19920918 NR Description: CG8372-PA [Drosophila melanogaster]
  misc_feature (7)..(105): Homolog of NCBI NO: 24582738 NR Description: CG8372-PB [Drosophila melanogaster]
  misc_feature (11)..(105): Homolog of NCBI NO: 14149779 NR Description: hypothetical protein DKFZp564D0478 [Homo sapiens] hypothetical protein [Homo sapiens]
MENDRRQLGQIDPRRARFPCCIVWTPIPFITWLVPFIGHIGICREDGVILDFSGPHFVSVDNFAFGAVARYIQVNCDECYKLIEPEGDATWDGALKKGTQEFQNRELQPVHLQLPLLCRKQSEQAVLFRPRRMECGQLGCCDVLTRPLGEHGIGGEDLIAICSCAFHRYLPWRHDLPDRPSCFRRCDDCLVPCGHLLHQRSHRVVIRVC

SEQ ID NO: 6027 - DNA, 876 bp, Zea mays subsp. mays
  misc_feature (1)..(876): Ceres Seq. ID no. 12390099
  misc_feature: MA Experiment ID: 20000479 Result: Down-regulated in Transcription
  misc_feature: MA Experiment 20000479 PARAMETER Experiment Name: Zm_Drought_P Parameter: Age (day) Value: 10
  misc_feature: MA Experiment 20000479 PARAMETER Experiment Name: Zm_Drought_P Parameter: Organism Value: Zea mays
  misc_feature: MA Experiment 20000479 PARAMETER Experiment Name: Zm_Drought_P Parameter: Plant Line Value: 35A19
  misc_feature: MA Experiment 20000479 PARAMETER Experiment Name: Zm_Drought_P Parameter: Timepoint (hr) Value: 48
  misc_feature: MA Experiment 20000479 PARAMETER Experiment Name: Zm_Drought_P Parameter: Tissue Value: Aerial
  misc_feature: MA Experiment 20000479 PARAMETER Experiment Name: Zm_Drought_P Parameter: Treatment Value: Drought vs. No Drought
  misc_feature: MA Experiment ID: 20000480 Result: Down-regulated in Transcription
  misc_feature: MA Experiment 20000480 PARAMETER Experiment Name: Zm_Drought_P Parameter: Age (day) Value: 11
  misc_feature: MA Experiment 20000480 PARAMETER Experiment Name: Zm_Drought_P Parameter: Organism Value: Zea mays
  misc_feature: MA Experiment 20000480 PARAMETER Experiment Name: Zm_Drought_P Parameter: Plant Line Value: 35A19
  misc_feature: MA Experiment 20000480 PARAMETER Experiment Name: Zm_Drought_P Parameter: Timepoint (hr) Value: 72
  misc_feature: MA Experiment 20000480 PARAMETER Experiment Name: Zm_Drought_P Parameter: Tissue Value: Aerial
  misc_feature: MA Experiment 20000480 PARAMETER Experiment Name: Zm_Drought_P Parameter: Treatment Value: Drought vs. No Drought
  misc_feature: MA Experiment ID: 20000492 Result: Down-regulated in Transcription
  misc_feature: MA Experiment 20000492 PARAMETER Experiment Name: Zm_Hybrid_Seed_Dev_P Parameter: DAP Value: 12
  misc_feature: MA Experiment 20000492 PARAMETER Experiment Name: Zm_Hybrid_Seed_Dev_P Parameter: Organism Value: Zea mays
  misc_feature: MA Experiment 20000492 PARAMETER Experiment Name: Zm_Hybrid_Seed_Dev_P Parameter: Plant Line Value: 35A19
  misc_feature: MA Experiment 20000492 PARAMETER Experiment Name: Zm_Hybrid_Seed_Dev_P Parameter: Tissue Value: Fert Kernel vs. Unfert Floret
  misc_feature: MA Experiment ID: 20000534 Result: Down-regulated in Transcription
  misc_feature: MA Experiment 20000534 PARAMETER Experiment Name: Zm_Hybrid_Pollen_P Parameter: Age (day) Value: 8
  misc_feature: MA Experiment 20000534 PARAMETER Experiment Name: Zm_Hybrid_Pollen_P Parameter: Organism Value: Zea mays
  misc_feature: MA Experiment 20000534 PARAMETER Experiment Name: Zm_Hybrid_Pollen_P Parameter: Plant Line Value: 35A19
  misc_feature: MA Experiment 20000534 PARAMETER Experiment Name: Zm_Hybrid_Pollen_P Parameter: Tissue Value: Pollen vs. Aerial
gcacgagaccattacctagaacatcctaatcgaaaaccactcgcgcgtccgttccgcctccactgaacatctccttttaacacccggctccggcgactcgccccttcctccactggtgcatccaccattccacctaccccacccccacaacccgctcgcgcggctgtccaatggcgggaggcggggcgccgtcagcgtggggcccgagcccggcgctggtgaccgcactggtggcgctgcttgggctcggcctcgccgcctacatcgtcggcccgcagctctactggcacgccgcggaggtgctcacggcggcggccgcgtgccccgcctgcgactgcaactgcgacgcgcgcccgctcctcgaccttccggaagattgtgctaaacacttcaaaggggtcaagagtcgcgcatctggtgaagagacagaaaagagtttcacagagctgcttgtagaagaactaaaacagagagaagaggaggcaacacaagctcagcaagaggccgatgttaagttgctcgaggccaaaaagttagcttcacagtatcagaaggaagctgacaaatgcagctcaggcatggatacctgtgaagaaactagggagaactcagcggaagcattggtccaacaaaagaaactgacttctttgtgggagcgaagggctcgggaactaggatggagacccgagaatgccaaggcacgtctaaagtagtaaaaccagtggatggtgttggatactatgtgtagcaatagatctcattgtaaaaccagtggatggtgttggatactacgagctcgagatgatgaggaaacaaatgagttcctggttggactcgactctctttacacgccatggggccttattgttcatagtt

SEQ ID NO: 6028 - protein, 180 aa, Zea mays subsp. mays
  peptide (1)..(180): Ceres Seq. ID no. 12390100
  misc_feature (10)..(176): Pfam Name: Protein of unknown function (DUF1068) Pfam Description: Protein of unknown function (DUF1068)
  misc_feature (1)..(176): Homolog of NCBI NO: 34897026 NR Description: unknown protein [Oryza sativa (japonica
  misc_feature (21)..(180): Homolog of NCBI NO: 25364108 NR Description: hypothetical protein [imported] - Arabidopsis >gi|4056420|gb|AAC97994.1|AAC97994 ESTs gb|T144077 and gb|T43352
  misc_feature (21)..(180): Homolog of NCBI NO: 7487433 NR Description: hypothetical protein At2g32580 [imported] -
  misc_feature (21)..(180): Homolog of NCBI NO: 18390477 NR Description: expressed protein; protein id: At1g05070.1, by cDNA: 13725., supported by cDNA: gi_15081798 [Arabidopsis >gi|15081799|gb|AAK82554.1| At1g05070/T7A14_6 [Arabidopsis
  misc_feature (21)..(180): Homolog of NCBI NO: 18403016 NR Description: expressed protein; protein id: At2g32580.1, by cDNA: 16625., supported by cDNA: gi_20259342 [Arabidopsis >gi|20197239|gb|AAC25940.2| expressed protein [Arabidopsis
  misc_feature (21)..(180): Homolog of NCBI NO: 21553781 NR Description: unknown [Arabidopsis thaliana]
  misc_feature (16)..(171): Homolog of NCBI NO: 27922919 NR Description: unknown protein [Phytophthora sojae]
  misc_feature (68)..(171): Homolog of NCBI NO: 15233480 NR Description: hypothetical protein; protein id: At4g04360.1
  misc_feature (29)..(173): Homolog of NCBI NO: 18417716 NR Description: Expressed protein; protein id: At4g30996.1, by cDNA: gi_15028200, supported by cDNA: gi_21281114 [Arabidopsis >gi|15028201|gb|AAK76597.1| unknown protein [Arabidopsis
  misc_feature (29)..(173): Homolog of NCBI NO: 18400504 NR Description: expressed protein; protein id: At2g24290.1, by cDNA: gi_13877800 [Arabidopsis thaliana] unknown protein [Arabidopsis thaliana]
MAGGGAPSAWGPSPALVTALVALLGLGLAAYIVGPQLYWHAAEVLTAAAACPACDCNCDARPLLDLPEDCAKHFKGVKSRASGEETEKSFTELLVEELKQREEEATQAQQEADVKLLEAKKLASQYQKEADKCSSGMDTCEETRENSAEALVQQKKLTSLWERRARELGWRPENAKARLK

SEQ ID NO: 6029 - DNA, 1183 bp, Zea mays subsp. mays
  misc_feature (1)..(1183): Ceres Seq. ID no. 12341715
  misc_feature: MA Experiment ID: 20000492 Result: Down-regulated in Transcription
  misc_feature: MA Experiment 20000492 PARAMETER Experiment Name: Zm_Hybrid_Seed_Dev_P Parameter: DAP Value: 12
  misc_feature: MA Experiment 20000492 PARAMETER Experiment Name: Zm_Hybrid_Seed_Dev_P Parameter: Organism Value: Zea mays
  misc_feature: MA Experiment 20000492 PARAMETER Experiment Name: Zm_Hybrid_Seed_Dev_P Parameter: Plant Line Value: 35A19
  misc_feature: MA Experiment 20000492 PARAMETER Experiment Name: Zm_Hybrid_Seed_Dev_P Parameter: Tissue Value: Fert Kernel vs. Unfert Floret
aataatttggctaaggcttgtgctgcctatcgtgactttgtatcacaaaatgctataagagttaaaacttcttgttttttcttaaaaagttttggactagggtagtggggttttaaattttgctgagatacttctacctgcctgtaaggactagggtagtggggttttaaattttgcccacaaatgtaaacttttggcctaatccacctgaatagacaggatttaacactattatttgcagcactgataaccttattttgcagtgtttacttgcacaatgtgcgcttttttcctccttgcccatgttatcctaaaaattgaggaagttcttacatttgtcgacggacagagtactagatcttatattatcaacatccactaccttaacgagctggcatctgctggttacattctgctcccttcatgtagcattatggatgaagttctttgagcataagccttttgattcaagaactgtcatgggatttggagtacttaacggaatctccattgggctcctcaacttgagtcttggcttcaactctgttgggttttaccagatgactaagctggcaatcatcccgtgcactgtcattttagagacacttttcttcaggaagaagttcagtcggagtatccagatgtccctttctgtgcttcttcttggtgttggtgttgcaactgtcactgatctgcaactcaatgctgtgggatccatactgtccttgctggcaattatcacgacttgcattgctcaaattatgacaaacactatccagaagaagttcaaggtctcatcaacccaactgctttaccagtcttgcccttaccaatcactgaccctgtttctcattggccccttccttgatggctttttgactaaccaaaatgtctttgcttttaattatacatctcaagttgtgtttttcatcgtcctgtcatgcttgatatctgtttcagtgaacttcagcactttccttgtgatcggaaagacatctcctgttacttaccaagtcctgggccatcttaaaacatgccttgttcttgcttttggttatgttttgcttcacgatccgtttagctggagaaacatacttggaatcctaattgctgtagttggaatggtcttgtattcatacttctgcacagtggagacccagcaaaaaaatgttgaagtctcccc

SEQ ID NO: 6030 - protein, 248 aa, Zea mays subsp. mays
  peptide (1)..(248): Ceres Seq. ID no. 12341716
  misc_feature (1)..(247): Homolog of NCBI NO: 13699188 NR Description: putative glucose-6-phosphate/phosphate-tranlocat
  misc_feature (1)..(247): Homolog of NCBI NO: 34896140 NR Description: P0701D05.25 [Oryza sativa (japonica >gi|13486667|dbj|BAB39904.1| contains ESTs
  misc_feature (1)..(247): Homolog of NCBI NO: 22329373 NR Description: unknown protein; protein id: At1g06890.1, by cDNA: gi_19423945 [Arabidopsis thaliana] unknown protein [Arabidopsis thaliana]
  misc_feature (1)..(247): Homolog of NCBI NO: 27311731 NR Description: putative integral membrane protein [Arabidopsis
  misc_feature (1)..(243): Homolog of NCBI NO: 30683853 NR Description: transporter-related [Arabidopsis thaliana]
  misc_feature (1)..(245): Homolog of NCBI NO: 13384378 NR Description: putative phosphate translocator [Oryza sativa
  misc_feature (42)..(247): Homolog of NCBI NO: 25406945 NR Description: hypothetical protein [imported] - Arabidopsis >gi|7523696|gb|AAF63135.1|AC011001_5 Hypothetical protein
  misc_feature (42)..(245): Homolog of NCBI NO: 37535412 NR Description: putative
  misc_feature (1)..(20): Homolog of NCBI NO: 37535412 NR Description: putative
  misc_feature (1)..(241): Homolog of NCBI NO: 15238957 NR Description: putative protein; protein id: At5g42420.1 thaliana] >gi|9759478|dbj|BAB10483.1|
MKFFEHKPFDSRTVMGFGVLNGISIGLLNLSLGFNSVGFYQMTKLAIIPCTVILETLFFRKKFSRSIQMSLSVLLLGVGVATVTDLQLNAVGSILSLLAIITTCIAQIMTNTIQKKFKVSSTQLLYQSCPYQSLTLFLIGPFLDGFLTNQNVFAFNYTSQVVFFIVLSCLISVSVNFSTFLVIGKTSPVTYQVLGHLKTCLVLAFGYVLLHDPFSWRNILGILIAVVGMVLYSYFCTVETQQKNVEVS

SEQ ID NO: 6031 - protein, 234 aa, Zea mays subsp. mays
  peptide (1)..(234): Ceres Seq. ID no. 12341717
  misc_feature (1)..(233): Homolog of NCBI NO: 13699188 NR Description: putative glucose-6-phosphate/phosphate-tranlocat
  misc_feature (1)..(233): Homolog of NCBI NO: 34896140 NR Description: P0701D05.25 [Oryza sativa (japonica >gi|13486667|dbj|BAB39904.1| contains ESTs
  misc_feature (1)..(233): Homolog of NCBI NO: 22329373 NR Description: unknown protein; protein id: At1g06890.1, by cDNA: gi_19423945 [Arabidopsis thaliana] unknown protein [Arabidopsis thaliana]
  misc_feature (1)..(233): Homolog of NCBI NO: 27311731 NR Description: putative integral membrane protein [Arabidopsis
  misc_feature (1)..(229): Homolog of NCBI NO: 30683853 NR Description: transporter-related [Arabidopsis thaliana]
  misc_feature (1)..(231): Homolog of NCBI NO: 13384378 NR Description: putative phosphate translocator [Oryza sativa
  misc_feature (28)..(233): Homolog of NCBI NO: 25406945 NR Description: hypothetical protein [imported] - Arabidopsis >gi|7523696|gb|AAF63135.1|AC011001_5 Hypothetical protein
  misc_feature (28)..(231): Homolog of NCBI NO: 37535412 NR Description: putative
  misc_feature (1)..(227): Homolog of NCBI NO: 15238957 NR Description: putative protein; protein id: At5g42420.1 thaliana] >gi|9759478|dbj|BAB10483.1|
  misc_feature (1)..(230): Homolog of NCBI NO: 18394949 NR Description: expressed protein; protein id: At1g21070.1, by cDNA: 108746. [Arabidopsis thaliana] >gi|25354485|pir||G86343
MGFGVLNGISIGLLNLSLGFNSVGFYQMTKLAIIPCTVILETLFFRKKFSRSIQMSLSVLLLGVGVATVTDLQLNAVGSILSLLAIITTCIAQIMTNTIQKKFKVSSTQLLYQSCPYQSLTLFLIGPFLDGFLTNQNVFAFNYTSQVVFFIVLSCLISVSVNFSTFLVIGKTSPVTYQVLGHLKTCLVLAFGYVLLHDPFSWRNILGILIAVVGMVLYSYFCTVETQQKNVEVS

SEQ ID NO: 6032 - protein, 207 aa, Zea mays subsp. mays
  peptide (1)..(207): Ceres Seq. ID no. 12341718
  misc_feature (1)..(206): Homolog of NCBI NO: 13699188 NR Description: putative glucose-6-phosphate/phosphate-tranlocat
  misc_feature (1)..(206): Homolog of NCBI NO: 34896140 NR Description: P0701D05.25 [Oryza sativa (japonica >gi|13486667|dbj|BAB39904.1| contains ESTs
  misc_feature (1)..(206): Homolog of NCBI NO: 22329373 NR Description: unknown protein; protein id: At1g06890.1, by cDNA: gi_19423945 [Arabidopsis thaliana] unknown protein [Arabidopsis thaliana]
  misc_feature (1)..(206): Homolog of NCBI NO: 27311731 NR Description: putative integral membrane protein [Arabidopsis
  misc_feature (1)..(202): Homolog of NCBI NO: 30683853 NR Description: transporter-related [Arabidopsis thaliana]
  misc_feature (1)..(204): Homolog of NCBI NO: 13384378 NR Description: putative phosphate translocator [Oryza sativa
  misc_feature (1)..(206): Homolog of NCBI NO: 25406945 NR Description: hypothetical protein [imported] - Arabidopsis >gi|7523696|gb|AAF63135.1|AC011001_5 Hypothetical protein
  misc_feature (1)..(204): Homolog of NCBI NO: 37535412 NR Description: putative
  misc_feature (1)..(200): Homolog of NCBI NO: 15238957 NR Description: putative protein; protein id: At5g42420.1 thaliana] >gi|9759478|dbj|BAB10483.1|
  misc_feature (1)..(203): Homolog of NCBI NO: 18394949 NR Description: expressed protein; protein id: At1g21070.1, by cDNA: 108746. [Arabidopsis thaliana] >gi|25354485|pir||G86343
MTKLAIIPCTVILETLFFRKKFSRSIQMSLSVLLLGVGVATVTDLQLNAVGSILSLLAIITTCIAQIMTNTIQKKFKVSSTQLLYQSCPYQSLTLFLIGPFLDGFLTNQNVFAFNYTSQVVFFIVLSCLISVSVNFSTFLVIGKTSPVTYQVLGHLKTCLVLAFGYVLLHDPFSWRNILGILIAVVGMVLYSYFCTVETQQKNVEVS

SEQ ID NO: 6033 - DNA, 791 bp, Zea mays subsp. mays
  misc_feature (1)..(791): Ceres Seq. ID no. 12401397
  misc_feature: MA Experiment ID: 108535 Result: Up-regulated in Transcription
  misc_feature: MA Experiment 108535 PARAMETER Experiment Name: Zm_Meristem_P Parameter: Age (day) Value: 8
  misc_feature: MA Experiment 108535 PARAMETER Experiment Name: Zm_Meristem_P Parameter: Organism Value: Zea mays
  misc_feature: MA Experiment 108535 PARAMETER Experiment Name: Zm_Meristem_P Parameter: Plant Line Value: 35A19
  misc_feature: MA Experiment 108535 PARAMETER Experiment Name: Zm_Meristem_P Parameter: Tissue Value: Root Meristem vs. Above Root Meristem
  misc_feature: MA Experiment ID: 20000534 Result: Down-regulated in Transcription
  misc_feature: MA Experiment 20000534 PARAMETER Experiment Name: Zm_Hybrid_Pollen_P Parameter: Age (day) Value: 8
  misc_feature: MA Experiment 20000534 PARAMETER Experiment Name: Zm_Hybrid_Pollen_P Parameter: Organism Value: Zea mays
  misc_feature: MA Experiment 20000534 PARAMETER Experiment Name: Zm_Hybrid_Pollen_P Parameter: Plant Line Value: 35A19
  misc_feature: MA Experiment 20000534 PARAMETER Experiment Name: Zm_Hybrid_Pollen_P Parameter: Tissue Value: Pollen vs. Aerial
ccaataggtggtcactctactacccgaagccgcgggctcaaccctaactgacccagagcgatcggagctgacgacgatggccgggaaggcggcggccgcgacggcggcgaggtgggcggaggggtacccgtggaaggagaagctggcaaagtacaagggtgagctcgggaagggggtgtggggatactgggagctcggcgcgtggaagccgctcggcatcagcgctcgcaagcgcgcccgcctccgcaaggaggtgctcctcgccggcgaggactggagctacgatcctccccgcggggagatgcgtaccaagcgcaagggccacaagtgcgaccgcatctccgccgagaagcgagcaaatactgttgagctgatgaagaagatgccccagatgctgctcgactacaagaaacgtaggtgggagaagaagatgaaagtggaggagagcggcaagaattgataccacgcggctcgtccagggtgcttctcttcctaaataaggtccaaactttatccaggaggtttgcaggacggctagattctgacgcatcatttccttggtggattccgtctctcctgtgatgcgactttggacgcactatcctgattgtgatgctttccaacactttgccactggatcgtgatttcagtgagccccaacttctgcagcactagtattttgttgagacaaatcagctataagcatgccatctgcccaataaacttgttcatcatgtaagatcaatgctgttagtttttgtccgagtttgtgcttgcgtttgcttatactc

SEQ ID NO: 6034 - protein, 127 aa, Zea mays subsp. mays
  peptide (1)..(127): Ceres Seq. ID no. 12401398
  misc_feature (1)..(126): Homolog of NCBI NO: 18415817 NR Description: expressed protein; protein id: At4g22000.1, by cDNA: 21244., supported by cDNA: gi_17064891 [Arabidopsis
MAGKAAAATAARWAEGYPWKEKLAKYKGELGKGVWGYWELGAWKPLGISARKRARLRKEVLLAGEDWSYDPPRGEMRTKRKGHKCDRISAEKRANTVELMKKMPQMLLDYKKRRWEKKMKVEESGKN

SEQ ID NO: 6035 - DNA, 751 bp, Zea mays subsp. mays
  misc_feature (1)..(751): Ceres Seq. ID no. 12356325
  misc_feature: MA Experiment ID: 108527 Result: Up-regulated in Transcription
  misc_feature: MA Experiment 108527 PARAMETER Experiment Name: Zm_5mM_NO_P Parameter: Age (day) Value: 8
  misc_feature: MA Experiment 108527 PARAMETER Experiment Name: Zm_5mM_NO_P Parameter: Organism Value: Zea mays
  misc_feature: MA Experiment 108527 PARAMETER Experiment Name: Zm_5mM_NO_P Parameter: Plant Line Value: 35A19
  misc_feature: MA Experiment 108527 PARAMETER Experiment Name: Zm_5mM_NO_P Parameter: Timepoint (hr) Value: 6
  misc_feature: MA Experiment 108527 PARAMETER Experiment Name: Zm_5mM_NO_P Parameter: Tissue Value: Aerial
  misc_feature: MA Experiment 108527 PARAMETER Experiment Name: Zm_5mM_NO_P Parameter: Treatment Value: 5mM NO vs. No Treatment
  misc_feature: MA Experiment ID: 108559 Result: Up-regulated in Transcription
  misc_feature: MA Experiment 108559 PARAMETER Experiment Name: Zm_5mM_NO_P Parameter: Age (day) Value: 8
  misc_feature: MA Experiment 108559 PARAMETER Experiment Name: Zm_5mM_NO_P Parameter: Organism Value: Zea mays
  misc_feature: MA Experiment 108559 PARAMETER Experiment Name: Zm_5mM_NO_P Parameter: Plant Line Value: 35A19
  misc_feature: MA Experiment 108559 PARAMETER Experiment Name: Zm_5mM_NO_P Parameter: Timepoint (hr) Value: 12
  misc_feature: MA Experiment 108559 PARAMETER Experiment Name: Zm_5mM_NO_P Parameter: Tissue Value: Aerial
  misc_feature: MA Experiment 108559 PARAMETER Experiment Name: Zm_5mM_NO_P Parameter: Treatment Value: 5mM NO vs. No Treatment
  misc_feature: MA Experiment ID: 20000477 Result: Up-regulated in Transcription
  misc_feature: MA Experiment 20000477 PARAMETER Experiment Name: Zm_5mM_SA_P Parameter: Age (day) Value: 10
  misc_feature: MA Experiment 20000477 PARAMETER Experiment Name: Zm_5mM_SA_P Parameter: Organism Value: Zea mays
  misc_feature: MA Experiment 20000477 PARAMETER Experiment Name: Zm_5mM_SA_P Parameter: Plant Line Value: 35A19
  misc_feature: MA Experiment 20000477 PARAMETER Experiment Name: Zm_5mM_SA_P Parameter: Timepoint (hr) Value: 48
  misc_feature: MA Experiment 20000477 PARAMETER Experiment Name: Zm_5mM_SA_P Parameter: Tissue Value: Aerial
  misc_feature: MA Experiment 20000477 PARAMETER Experiment Name: Zm_5mM_SA_P Parameter: Treatment Value: 5mM SA vs. No Treatment
  misc_feature: MA Experiment ID: 20000478 Result: Up-regulated in Transcription
  misc_feature: MA Experiment 20000478 PARAMETER Experiment Name: Zm_5mM_SA_P Parameter: Age (day) Value: 11
  misc_feature: MA Experiment 20000478 PARAMETER Experiment Name: Zm_5mM_SA_P Parameter: Organism Value: Zea mays
  misc_feature: MA Experiment 20000478 PARAMETER Experiment Name: Zm_5mM_SA_P Parameter: Plant Line Value: 35A19
  misc_feature: MA Experiment 20000478 PARAMETER Experiment Name: Zm_5mM_SA_P Parameter: Timepoint (hr) Value: 72
  misc_feature: MA Experiment 20000478 PARAMETER Experiment Name: Zm_5mM_SA_P Parameter: Tissue Value: Aerial
  misc_feature: MA Experiment 20000478 PARAMETER Experiment Name: Zm_5mM_SA_P Parameter: Treatment Value: 5mM SA vs. No Treatment
  misc_feature: MA Experiment ID: 20000479 Result: Up-regulated in Transcription
  misc_feature: MA Experiment 20000479 PARAMETER Experiment Name: Zm_Drought_P Parameter: Age (day) Value: 10
  misc_feature: MA Experiment 20000479 PARAMETER Experiment Name: Zm_Drought_P Parameter: Organism Value: Zea mays
  misc_feature: MA Experiment 20000479 PARAMETER Experiment Name: Zm_Drought_P Parameter: Plant Line Value: 35A19
  misc_feature: MA Experiment 20000479 PARAMETER Experiment Name: Zm_Drought_P Parameter: Timepoint (hr) Value: 48
  misc_feature: MA Experiment 20000479 PARAMETER Experiment Name: Zm_Drought_P Parameter: Tissue Value: Aerial
  misc_feature: MA Experiment 20000479 PARAMETER Experiment Name: Zm_Drought_P Parameter: Treatment Value: Drought vs. No Drought
ggcttcatctcctcctttcctccccaaaagacacaagagggggaagagagagagaggagaggcagagagaagagggggaggcagtccagtgtccacgtaggtacgctccacagaagagagatggcgatgcggatggcggcggcggcagtggcgctggtggcggtgatgggcgtgctggcgccccgagcggcggcgcagacgccgaactgcgcggagaagctgatcccgtgctcgccgtacatgaacacgacggggacgccgccggatacctgctgcggcccgctcaaggacgccgtccagaacgacctcaagtgcctctgcgacctctacgcctcgccggagatcttcaaggccttcaacatcagcctcgaccaggccctcggcctctccaagcgttgcggcctcagcgacaccaccgccgcctgcaagggcctttctcctacgcagtctcctccaggttcgccgccatcaggcggcagcagcaacgccgcccatcgcgctctgccggccagtttcgcgggactggtgacgagcttgttcctagctctgtggtctgtaatggcgtaaataaaagttccgcaatgcttgtcttaccccacagtagatggtttgcacatacgatacgatacaattcgacatttgttttgctgtgtattggtagagtgcggtgtgtctgagatcagaatttctcattggtttcttcgcggtgttcgtgttagactctgcacaattaaatggaaggtttctggcg

SEQ ID NO: 6036 - protein, 224 aa, Zea mays subsp. mays
  peptide (1)..(224): Ceres Seq. ID no. 12356326
LHLLLSSPKDTRGGREREERQREEGEAVQCPRRYAPQKRDGDADGGGGSGAGGGDGRAGAPSGGADAELRGEADPVLAVHEHDGDAAGYLLRPAQGRRPERPQVPLRPLRLAGDLQGLQHQPRPGPRPLQALRPQRHHRRLQGPFSYAVSSRFAAIRRQQQRRPSRSAGQFRGTGDELVPSSVVCNGVNKSSAMLVLPHSRWFAHTIRYNSTFVLLCIGRVRCV

SEQ ID NO: 6037 - protein, 188 aa, Zea mays subsp. mays
  peptide (1)..(188): Ceres Seq. ID no. 12356327
  misc_feature (70)..(142): Pfam Name: Protease inhibitor/seed storage/LTP family Pfam Description: Protease inhibitor/seed storage/LTP family
  misc_feature (43)..(185): Homolog of NCBI NO: 15221585 NR Description: unknown protein; protein id: At1g62790.1
  misc_feature (43)..(185): Homolog of NCBI NO: 30696757 NR Description: protease inhibitor/seed storage/lipid transfer
  misc_feature (43)..(144): Homolog of NCBI NO: 6630451 NR Description: F23N19.16 [Arabidopsis thaliana]
  misc_feature (44)..(183): Homolog of NCBI NO: 18410388 NR Description: lipid transfer protein, putative; protein id:
  misc_feature (41)..(183): Homolog of NCBI NO: 21593596 NR Description: lipid transfer protein, putative [Arabidopsis
  misc_feature (52)..(144): Homolog of NCBI NO: 15223104 NR Description: lipid transfer protein, putative; protein id: [Arabidopsis thaliana] >gi|25406043|pir||D96725 hypothetical
  misc_feature (44)..(146): Homolog of NCBI NO: 25406276 NR Description: probable lipid transfer protein F6D5.5 [imported] Arabidopsis thaliana >gi|11120788|gb|AAG30968.1|AC012396_4 protein [Arabidopsis thaliana]
  misc_feature (70)..(164): Homolog of NCBI NO: 15221052 NR Description: lipid transfer protein, putative; protein id: supported by cDNA: 30040. [Arabidopsis thaliana] F15H18.20 [Arabidopsis thaliana]
  misc_feature (66)..(169): Homolog of NCBI NO: 15219496 NR Description: hypothetical protein; protein id: At1g73550.1 thaliana] >gi|11120793|gb|AAG30973.1|AC012396_9 hypothetical
  misc_feature (66)..(160): Homolog of NCBI NO: 25406275 NR Description: hypothetical protein F6D5.6 [imported] - thaliana >gi|12323697|gb|AAG51811.1|AC079676_6 lipid transfer
GFISSFPPQKTQEGEERERRGREKRGRQSSVHVGTLHRREMAMRMAAAAVALVAVMGVLAPRAAAQTPNCAEKLIPCSPYMNTTGTPPDTCCGPLKDAVQNDLKCLCDLYASPEIFKAFNISLDQALGLSKRCGLSDTTAACKGLSPTQSPPGSPPSGGSSNAAHRALPASFAGLVTSLFLALWSVMA

SEQ ID NO: 6038 - protein, 148 aa, Zea mays subsp. mays
  peptide (1)..(148): Ceres Seq. ID no. 12356328
  misc_feature (30)..(102): Pfam Name: Protease inhibitor/seed storage/LTP family Pfam Description: Protease inhibitor/seed storage/LTP family
  misc_feature (3)..(145): Homolog of NCBI NO: 15221585 NR Description: unknown protein; protein id: At1g62790.1
  misc_feature (3)..(145): Homolog of NCBI NO: 30696757 NR Description: protease inhibitor/seed storage/lipid transfer
  misc_feature (3)..(104): Homolog of NCBI NO: 6630451 NR Description: F23N19.16 [Arabidopsis thaliana]
  misc_feature (4)..(143): Homolog of NCBI NO: 18410388 NR Description: lipid transfer protein, putative; protein id:
  misc_feature (1)..(143): Homolog of NCBI NO: 21593596 NR Description: lipid transfer protein, putative [Arabidopsis
  misc_feature (12)..(104): Homolog of NCBI NO: 15223104 NR Description: lipid transfer protein, putative; protein id: [Arabidopsis thaliana] >gi|25406043|pir||D96725 hypothetical
  misc_feature (4)..(106): Homolog of NCBI NO: 25406276 NR Description: probable lipid transfer protein F6D5.5 [imported] Arabidopsis thaliana >gi|11120788|gb|AAG30968.1|AC012396_4 protein [Arabidopsis thaliana]
  misc_feature (30)..(124): Homolog of NCBI NO: 15221052 NR Description: lipid transfer protein, putative; protein id: supported by cDNA: 30040. [Arabidopsis thaliana] F15H18.20 [Arabidopsis thaliana]
  misc_feature (26)..(129): Homolog of NCBI NO: 15219496 NR Description: hypothetical protein; protein id: At1g73550.1 thaliana] >gi|11120793|gb|AAG30973.1|AC012396_9 hypothetical
  misc_feature (26)..(120): Homolog of NCBI NO: 25406275 NR Description: hypothetical protein F6D5.6 [imported] - thaliana >gi|12323697|gb|AAG51811.1|AC079676_6 lipid transfer
MAMRMAAAAVALVAVMGVLAPRAAAQTPNCAEKLIPCSPYMNTTGTPPDTCCGPLKDAVQNDLKCLCDLYASPEIFKAFNISLDQALGLSKRCGLSDTTAACKGLSPTQSPPGSPPSGGSSNAAHRALPASFAGLVTSLFLALWSVMA

SEQ ID NO: 6039 - DNA, 924 bp, Zea mays subsp. mays
  misc_feature (1)..(924): Ceres Seq. ID no. 12342917
  misc_feature: MA Experiment ID: 108528 Result: Up-regulated in Transcription
  misc_feature: MA Experiment 108528 PARAMETER Experiment Name: Zm_Imbibed_Seeds_P Parameter: Age (day) Value: 5 vs. 2
  misc_feature: MA Experiment 108528 PARAMETER Experiment Name: Zm_Imbibed_Seeds_P Parameter: Organism Value: Zea mays
  misc_feature: MA Experiment 108528 PARAMETER Experiment Name: Zm_Imbibed_Seeds_P Parameter: Plant Line Value: 35A19
  misc_feature: MA Experiment 108528 PARAMETER Experiment Name: Zm_Imbibed_Seeds_P Parameter: Tissue Value: Aerial vs. Embryo
  misc_feature: MA Experiment ID: 108530 Result: Up-regulated in Transcription
  misc_feature: MA Experiment 108530 PARAMETER Experiment Name: Zm_Imbibed_Seeds_P Parameter: Age (day) Value: 6 vs. 2
  misc_feature: MA Experiment 108530 PARAMETER Experiment Name: Zm_Imbibed_Seeds_P Parameter: Organism Value: Zea mays
  misc_feature: MA Experiment 108530 PARAMETER Experiment Name: Zm_Imbibed_Seeds_P Parameter: Plant Line Value: 35A19
  misc_feature: MA Experiment 108530 PARAMETER Experiment Name: Zm_Imbibed_Seeds_P Parameter: Tissue Value: Aerial vs. Embryo
  misc_feature: MA Experiment ID: 108545 Result: Up-regulated in Transcription
  misc_feature: MA Experiment 108545 PARAMETER Experiment Name: Zm_Imbibed_Seeds_P Parameter: Age (day) Value: 3 vs. 2
  misc_feature: MA Experiment 108545 PARAMETER Experiment Name: Zm_Imbibed_Seeds_P Parameter: Organism Value: Zea mays
  misc_feature: MA Experiment 108545 PARAMETER Experiment Name: Zm_Imbibed_Seeds_P Parameter: Plant Line Value: 35A19
  misc_feature: MA Experiment 108545 PARAMETER Experiment Name: Zm_Imbibed_Seeds_P Parameter: Tissue Value: Aerial vs. Embryo
  misc_feature: MA Experiment ID: 108547 Result: Up-regulated in Transcription
  misc_feature: MA Experiment 108547 PARAMETER Experiment Name: Zm_Imbibed_Seeds_P Parameter: Age (day) Value: 4 vs. 2
  misc_feature: MA Experiment 108547 PARAMETER Experiment Name: Zm_Imbibed_Seeds_P Parameter: Organism Value: Zea mays
  misc_feature: MA Experiment 108547 PARAMETER Experiment Name: Zm_Imbibed_Seeds_P Parameter: Plant Line Value: 35A19
  misc_feature: MA Experiment 108547 PARAMETER Experiment Name: Zm_Imbibed_Seeds_P Parameter: Tissue Value: Aerial vs. Embryo
  misc_feature: MA Experiment ID: 108556 Result: Down-regulated in Transcription
  misc_feature: MA Experiment 108556 PARAMETER Experiment Name: Zm_Drought_P Parameter: Age (day) Value: 9
  misc_feature: MA Experiment 108556 PARAMETER Experiment Name: Zm_Drought_P Parameter: Organism Value: Zea mays
  misc_feature: MA Experiment 108556 PARAMETER Experiment Name: Zm_Drought_P Parameter: Plant Line Value: 35A19
  misc_feature: MA Experiment 108556 PARAMETER Experiment Name: Zm_Drought_P Parameter: Timepoint (hr) Value: 24
  misc_feature: MA Experiment 108556 PARAMETER Experiment Name: Zm_Drought_P Parameter: Tissue Value: Aerial
  misc_feature: MA Experiment 108556 PARAMETER Experiment Name: Zm_Drought_P Parameter: Treatment Value: Drought vs. No Drought
  misc_feature: MA Experiment ID: 108559 Result: Down-regulated in Transcription
  misc_feature: MA Experiment 108559 PARAMETER Experiment Name: Zm_5mM_NO_P Parameter: Age (day) Value: 8
  misc_feature: MA Experiment 108559 PARAMETER Experiment Name: Zm_5mM_NO_P Parameter: Organism Value: Zea mays
  misc_feature: MA Experiment 108559 PARAMETER Experiment Name: Zm_5mM_NO_P Parameter: Plant Line Value: 35A19
  misc_feature: MA Experiment 108559 PARAMETER Experiment Name: Zm_5mM_NO_P Parameter: Timepoint (hr) Value: 12
  misc_feature: MA Experiment 108559 PARAMETER Experiment Name: Zm_5mM_NO_P Parameter: Tissue Value: Aerial
  misc_feature: MA Experiment 108559 PARAMETER Experiment Name: Zm_5mM_NO_P Parameter: Treatment Value: 5mM NO vs. No Treatment
  misc_feature: MA Experiment ID: 108688 Result: Down-regulated in Transcription
  misc_feature: MA Experiment 108688 PARAMETER Experiment Name: Zm_Embryos-Flowers__P Parameter: Tissue Value: Immature Flowers vs. Aerial+
  misc_feature: MA Experiment ID: 20000479 Result: Down-regulated in Transcription
  misc_feature: MA Experiment 20000479 PARAMETER Experiment Name: Zm_Drought_P Parameter: Age (day) Value: 10
  misc_feature: MA Experiment 20000479 PARAMETER Experiment Name: Zm_Drought_P Parameter: Organism Value: Zea mays
  misc_feature: MA Experiment 20000479 PARAMETER Experiment Name: Zm_Drought_P Parameter: Plant Line Value: 35A19
  misc_feature: MA Experiment 20000479 PARAMETER Experiment Name: Zm_Drought_P Parameter: Timepoint (hr) Value: 48
  misc_feature: MA Experiment 20000479 PARAMETER Experiment Name: Zm_Drought_P Parameter: Tissue Value: Aerial
  misc_feature: MA Experiment 20000479 PARAMETER Experiment Name: Zm_Drought_P Parameter: Treatment Value: Drought vs. No Drought
  misc_feature: MA Experiment ID: 20000480 Result: Down-regulated in Transcription
  misc_feature: MA Experiment 20000480 PARAMETER Experiment Name: Zm_Drought_P Parameter: Age (day) Value: 11
  misc_feature: MA Experiment 20000480 PARAMETER Experiment Name: Zm_Drought_P Parameter: Organism Value: Zea mays
  misc_feature: MA Experiment 20000480 PARAMETER Experiment Name: Zm_Drought_P Parameter: Plant Line Value: 35A19
  misc_feature: MA Experiment 20000480 PARAMETER Experiment Name: Zm_Drought_P Parameter: Timepoint (hr) Value: 72
  misc_feature: MA Experiment 20000480 PARAMETER Experiment Name: Zm_Drought_P Parameter: Tissue Value: Aerial
  misc_feature: MA Experiment 20000480 PARAMETER Experiment Name: Zm_Drought_P Parameter: Treatment Value: Drought vs. No Drought
  misc_feature: MA Experiment ID: 20000492 Result: Down-regulated in Transcription
  misc_feature: MA Experiment 20000492 PARAMETER Experiment Name: Zm_Hybrid_Seed_Dev_P Parameter: DAP Value: 12
  misc_feature: MA Experiment 20000492 PARAMETER Experiment Name: Zm_Hybrid_Seed_Dev_P Parameter: Organism Value: Zea mays
  misc_feature: MA Experiment 20000492 PARAMETER Experiment Name: Zm_Hybrid_Seed_Dev_P Parameter: Plant Line Value: 35A19
  misc_feature: MA Experiment 20000492 PARAMETER Experiment Name: Zm_Hybrid_Seed_Dev_P Parameter: Tissue Value: Fert Kernel vs. Unfert Floret
aaggacgacccaagcaagctagctcgatctactactactactatctggtacacatactagccatcctgccagccagccagcttgccatggcgcccaccgtgatgatggcctcgtcggcaaccgccgtcgccccgttccagggtctcaagtccgccgccagcctccccgtcgcccgccgcagcaccaggagcctcggcaacgtcagcaacggcggaaggatccggtgcatgcaggtgtggccggcctacggcaacaagaagttcgagacgctgtcgtacctgccgccgctgtcgacggacgacctgctgaagcaggtggactacctgctgcgcaacggctggataccctgcctcgagttcagcaagctcgggttcgtgtaccgcgagaactccacctccccgtgctactacgatggccgctactggaccatgtggaagctgcccatgttcggctgcaccgacgccacgcaggtgtacaaggagctgcaggaggccatcgccgcgtacccggacgccttccaccgcgtcatcggcttcgacaacgtcaggcagacgcagtgcgtcagcttcatcgcctacaagccccccggcagcgagtagagaccgtggctagatcgaccaatggccatgtctctgcctgttgatcggatcaccttcttgcattggttcctctctctctccctccttttttttccctttatctcatcatttcttttctcctgcatgcaatggttccttttgcttccaacaattctcctgctgatgtatccagcatggcatcatccatctacaattacgtacgtagtgcaacgactgtcgattcgttgggtgaggaacatatatgtgaatgcaagctccggctaccatacatgtgtaatgtgtaatagatatatatacaaaactgccgaggcgccgacaatacttt

SEQ ID NO: 6040 - protein, 198 aa, Zea mays subsp. mays
  peptide (1)..(198): Ceres Seq. ID no. 12342918
  misc_feature (76)..(194): Pfam Name: Ribulose bisphosphate carboxylase, small chain Pfam Description: Ribulose bisphosphate carboxylase, small chain
  misc_feature (29)..(198): Homolog of NCBI NO: 1673456 NR Description: rubisco small subunit [Zea mays]
  misc_feature (29)..(198): Homolog of NCBI NO: 132147 NR Description: Ribulose bisphosphate carboxylase small chain,
  misc_feature (29)..(198): Homolog of NCBI NO: 22465 NR Description: ribulose 1,5-bisphosphate carboxylase/oxygenase
  misc_feature (29)..(198): Homolog of NCBI NO: 3914607 NR Description: Ribulose bisphosphate carboxylase small chain,
  misc_feature (29)..(198): Homolog of NCBI NO: 38374128 NR Description: ribulose-1,5-bisphosphate carboxylase/oxygenase
  misc_feature (29)..(198): Homolog of NCBI NO: 132105 NR Description: Ribulose bisphosphate carboxylase small chain C,
  misc_feature (35)..(198): Homolog of NCBI NO: 347451 NR Description: ribulose 1,5-bisphosphate carboxylase
  misc_feature (29)..(198): Homolog of NCBI NO: 132096 NR Description: Ribulose bisphosphate carboxylase small chain A,
  misc_feature (29)..(198): Homolog of NCBI NO: 3063524 NR Description: ribulose 1,5-bisphosphate carboxylase small
  misc_feature (34)..(198): Homolog of NCBI NO: 4038689 NR Description: ribulose-1,5-bisphosphate carboxylase/oxygenase
GRPKQASSIYYYYYLVHILAILPASQLAMAPTVMMASSATAVAPFQGLKSAASLPVARRSTRSLGNVSNGGRIRCMQVWPAYGNKKFETLSYLPPLSTDDLLKQVDYLLRNGWIPCLEFSKLGFVYRENSTSPCYYDGRYWTMWKLPMFGCTDATQVYKELQEAIAAYPDAFHRVIGFDNVRQTQCVSFIAYKPPGSE

SEQ ID NO: 6041 - protein, 170 aa, Zea mays subsp. mays
  peptide (1)..(170): Ceres Seq. ID no. 12342919
  misc_feature (48)..(166): Pfam Name: Ribulose bisphosphate carboxylase, small chain Pfam Description: Ribulose bisphosphate carboxylase, small chain
  misc_feature (1)..(170): Homolog of NCBI NO: 1673456 NR Description: rubisco small subunit [Zea mays]
  misc_feature (1)..(170): Homolog of NCBI NO: 132147 NR Description: Ribulose bisphosphate carboxylase small chain,
  misc_feature (1)..(170): Homolog of NCBI NO: 22465 NR Description: ribulose 1,5-bisphosphate carboxylase/oxygenase
  misc_feature (1)..(170): Homolog of NCBI NO: 3914607 NR Description: Ribulose bisphosphate carboxylase small chain,
  misc_feature (1)..(170): Homolog of NCBI NO: 38374128 NR Description: ribulose-1,5-bisphosphate carboxylase/oxygenase
  misc_feature (1)..(170): Homolog of NCBI NO: 132105 NR Description: Ribulose bisphosphate carboxylase small chain C,
  misc_feature (7)..(170): Homolog of NCBI NO: 347451 NR Description: ribulose 1,5-bisphosphate carboxylase
  misc_feature (1)..(170): Homolog of NCBI NO: 132096 NR Description: Ribulose bisphosphate carboxylase small chain A,
  misc_feature (1)..(170): Homolog of NCBI NO: 3063524 NR Description: ribulose 1,5-bisphosphate carboxylase small
  misc_feature (6)..(170): Homolog of NCBI NO: 4038689 NR Description: ribulose-1,5-bisphosphate carboxylase/oxygenase
MAPTVMMASSATAVAPFQGLKSAASLPVARRSTRSLGNVSNGGRIRCMQVWPAYGNKKFETLSYLPPLSTDDLLKQVDYLLRNGWIPCLEFSKLGFVYRENSTSPCYYDGRYWTMWKLPMFGCTDATQVYKELQEAIAAYPDAFHRVIGFDNVRQTQCVSFIAYKPPGSE

SEQ ID NO: 6042 - protein, 165 aa, Zea mays subsp. mays
  peptide (1)..(165): Ceres Seq. ID no. 12342920
  misc_feature (43)..(161): Pfam Name: Ribulose bisphosphate carboxylase, small chain Pfam Description: Ribulose bisphosphate carboxylase, small chain
  misc_feature (1)..(165): Homolog of NCBI NO: 38374128 NR Description: ribulose-1,5-bisphosphate carboxylase/oxygenase
  misc_feature (1)..(165): Homolog of NCBI NO: 132105 NR Description: Ribulose bisphosphate carboxylase small chain C,
  misc_feature (2)..(165): Homolog of NCBI NO: 347451 NR Description: ribulose 1,5-bisphosphate carboxylase
  misc_feature (1)..(165): Homolog of NCBI NO: 1673456 NR Description: rubisco small subunit [Zea mays]
  misc_feature (1)..(165): Homolog of NCBI NO: 22465 NR Description: ribulose 1,5-bisphosphate carboxylase/oxygenase
  misc_feature (1)..(165): Homolog of NCBI NO: 3914607 NR Description: Ribulose bisphosphate carboxylase small chain,
  misc_feature (1)..(165): Homolog of NCBI NO: 132147 NR Description: Ribulose bisphosphate carboxylase small chain,
  misc_feature (1)..(165): Homolog of NCBI NO: 132096 NR Description: Ribulose bisphosphate carboxylase small chain A,
  misc_feature (1)..(165): Homolog of NCBI NO: 3063524 NR Description: ribulose 1,5-bisphosphate carboxylase small
  misc_feature (1)..(165): Homolog of NCBI NO: 4038689 NR Description: ribulose-1,5-bisphosphate carboxylase/oxygenase
MMASSATAVAPFQGLKSAASLPVARRSTRSLGNVSNGGRIRCMQVWPAYGNKKFETLSYLPPLSTDDLLKQVDYLLRNGWIPCLEFSKLGFVYRENSTSPCYYDGRYWTMWKLPMFGCTDATQVYKELQEAIAAYPDAFHRVIGFDNVRQTQCVSFIAYKPPGSE

SEQ ID NO: 6043 - DNA, 1042 bp, Zea mays subsp. mays
  misc_feature (1)..(1042): Ceres Seq. ID no. 12372360
  misc_feature: MA Experiment ID: 108527 Result: Up-regulated in Transcription
  misc_feature: MA Experiment 108527 PARAMETER Experiment Name: Zm_5mM_NO_P Parameter: Age (day) Value: 8
  misc_feature: MA Experiment 108527 PARAMETER Experiment Name: Zm_5mM_NO_P Parameter: Organism Value: Zea mays
  misc_feature: MA Experiment 108527 PARAMETER Experiment Name: Zm_5mM_NO_P Parameter: Plant Line Value: 35A19
  misc_feature: MA Experiment 108527 PARAMETER Experiment Name: Zm_5mM_NO_P Parameter: Timepoint (hr) Value: 6
  misc_feature: MA Experiment 108527 PARAMETER Experiment Name: Zm_5mM_NO_P Parameter: Tissue Value: Aerial
  misc_feature: MA Experiment 108527 PARAMETER Experiment Name: Zm_5mM_NO_P Parameter: Treatment Value: 5mM NO vs. No Treatment
  misc_feature: MA Experiment ID: 108529 Result: Up-regulated in Transcription
  misc_feature: MA Experiment 108529 PARAMETER Experiment Name: Zm_Imbibed_Seeds_P Parameter: Age (day) Value: 5 vs. 2
  misc_feature: MA Experiment 108529 PARAMETER Experiment Name: Zm_Imbibed_Seeds_P Parameter: Organism Value: Zea mays
  misc_feature: MA Experiment 108529 PARAMETER Experiment Name: Zm_Imbibed_Seeds_P Parameter: Plant Line Value: 35A19
  misc_feature: MA Experiment 108529 PARAMETER Experiment Name: Zm_Imbibed_Seeds_P Parameter: Tissue Value: Roots vs. Embryo
  misc_feature: MA Experiment ID: 108534 Result: Up-regulated in Transcription
  misc_feature: MA Experiment 108534 PARAMETER Experiment Name: Zm_4deg_Cold_P Parameter: Age (hr) Value: 8
  misc_feature: MA Experiment 108534 PARAMETER Experiment Name: Zm_4deg_Cold_P Parameter: Organism Value: Zea mays
  misc_feature: MA Experiment 108534 PARAMETER Experiment Name: Zm_4deg_Cold_P Parameter: Plant Line Value: 35A19
  misc_feature: MA Experiment 108534 PARAMETER Experiment Name: Zm_4deg_Cold_P Parameter: Temperature (deg C) Value: 4 vs. 22
  misc_feature: MA Experiment 108534 PARAMETER Experiment Name: Zm_4deg_Cold_P Parameter: Timepoint (hr) Value: 6
  misc_feature: MA Experiment 108534 PARAMETER Experiment Name: Zm_4deg_Cold_P Parameter: Tissue Value: Aerial
  misc_feature: MA Experiment ID: 108535 Result: Down-regulated in Transcription
  misc_feature: MA Experiment 108535 PARAMETER Experiment Name: Zm_Meristem_P Parameter: Age (day) Value: 8
  misc_feature: MA Experiment 108535 PARAMETER Experiment Name: Zm_Meristem_P Parameter: Organism Value: Zea mays
  misc_feature: MA Experiment 108535 PARAMETER Experiment Name: Zm_Meristem_P Parameter: Plant Line Value: 35A19
  misc_feature: MA Experiment 108535 PARAMETER Experiment Name: Zm_Meristem_P Parameter: Tissue Value: Root Meristem vs. Above Root Meristem
  misc_feature: MA Experiment ID: 108543 Result: Up-regulated in Transcription
  misc_feature: MA Experiment ID: 108545 Result: Down-regulated in Transcription
  misc_feature: MA Experiment 108545 PARAMETER Experiment Name: Zm_Imbibed_Seeds_P Parameter: Age (day) Value: 3 vs. 2
  misc_feature: MA Experiment 108545 PARAMETER Experiment Name: Zm_Imbibed_Seeds_P Parameter: Organism Value: Zea mays
  misc_feature: MA Experiment 108545 PARAMETER Experiment Name: Zm_Imbibed_Seeds_P Parameter: Plant Line Value: 35A19
  misc_feature: MA Experiment 108545 PARAMETER Experiment Name: Zm_Imbibed_Seeds_P Parameter: Tissue Value: Aerial vs. Embryo
  misc_feature: MA Experiment ID: 108546 Result: Up-regulated in Transcription
  misc_feature: MA Experiment 108546 PARAMETER Experiment Name: Zm_Imbibed_Seeds_P Parameter: Age (day) Value: 3 vs. 2
  misc_feature: MA Experiment 108546 PARAMETER Experiment Name: Zm_Imbibed_Seeds_P Parameter: Organism Value: Zea mays
  misc_feature: MA Experiment 108546 PARAMETER Experiment Name: Zm_Imbibed_Seeds_P Parameter: Plant Line Value: 35A19
  misc_feature: MA Experiment 108546 PARAMETER Experiment Name: Zm_Imbibed_Seeds_P Parameter: Tissue Value: Roots vs. Embryo
  misc_feature: MA Experiment ID: 108556 Result: Up-regulated in Transcription
  misc_feature: MA Experiment 108556 PARAMETER Experiment Name: Zm_Drought_P Parameter: Age (day) Value: 9
  misc_feature: MA Experiment 108556 PARAMETER Experiment Name: Zm_Drought_P Parameter: Organism Value: Zea mays
  misc_feature: MA Experiment 108556 PARAMETER Experiment Name: Zm_Drought_P Parameter: Plant Line Value: 35A19
  misc_feature: MA Experiment 108556 PARAMETER Experiment Name: Zm_Drought_P Parameter: Timepoint (hr) Value: 24
  misc_feature: MA Experiment 108556 PARAMETER Experiment Name: Zm_Drought_P Parameter: Tissue Value: Aerial
  misc_feature: MA Experiment 108556 PARAMETER Experiment Name: Zm_Drought_P Parameter: Treatment Value: Drought vs. No Drought
  misc_feature: MA Experiment ID: 108559 Result: Up-regulated in Transcription
  misc_feature: MA Experiment 108559 PARAMETER Experiment Name: Zm_5mM_NO_P Parameter: Age (day) Value: 8
  misc_feature: MA Experiment 108559 PARAMETER Experiment Name: Zm_5mM_NO_P Parameter: Organism Value: Zea mays
  misc_feature: MA Experiment 108559 PARAMETER Experiment Name: Zm_5mM_NO_P Parameter: Plant Line Value: 35A19
  misc_feature: MA Experiment 108559 PARAMETER Experiment Name: Zm_5mM_NO_P Parameter: Timepoint (hr) Value: 12
  misc_feature: MA Experiment 108559 PARAMETER Experiment Name: Zm_5mM_NO_P Parameter: Tissue Value: Aerial
  misc_feature: MA Experiment 108559 PARAMETER Experiment Name: Zm_5mM_NO_P Parameter: Treatment Value: 5mM NO vs. No Treatment
  misc_feature: MA Experiment ID: 20000108 Result: Down-regulated in Transcription
  misc_feature: MA Experiment 20000108 PARAMETER Experiment Name: Zm_Root-Tips_P Parameter: Age (day) Value: 12
  misc_feature: MA Experiment 20000108 PARAMETER Experiment Name: Zm_Root-Tips_P Parameter: Organism Value: Zea mays
  misc_feature: MA Experiment 20000108 PARAMETER Experiment Name: Zm_Root-Tips_P Parameter: Tissue Value: Root tips vs. Root mid region    35
  misc_feature: MA Experiment 20000108 PARAMETER Experiment Name: Zm_Root-Tips_P Parameter: Tissue Value: Root tips vs. Root mid region   Sequence Listing-Misc Features (4)
  misc_feature: MA Experiment ID: 20000535 Result: Down-regulated in Transcription
  misc_feature: MA Experiment 20000535 PARAMETER Experiment Name: Zm_Hybrid_Seed_Dev_P Parameter: DAP Value: 30 vs. 12
  misc_feature: MA Experiment 20000535 PARAMETER Experiment Name: Zm_Hybrid_Seed_Dev_P Parameter: Organism Value: Zea mays
  misc_feature: MA Experiment 20000535 PARAMETER Experiment Name: Zm_Hybrid_Seed_Dev_P Parameter: Plant Line Value: 35A19
  misc_feature: MA Experiment 20000535 PARAMETER Experiment Name: Zm_Hybrid_Seed_Dev_P Parameter: Tissue Value: Embryo vs. Unfert Floret
  misc_feature: MA Experiment ID: 20001608 Result: Down-regulated in Transcription
  misc_feature: MA Experiment 20001608 PARAMETER Experiment Name: Zm_50ppm_KNO3_L-to-H_P Parameter: Age (day) Value: 21
  misc_feature: MA Experiment 20001608 PARAMETER Experiment Name: Zm_50ppm_KNO3_L-to-H_P Parameter: Organism Value: Zea mays
  misc_feature: MA Experiment 20001608 PARAMETER Experiment Name: Zm_50ppm_KNO3_L-to-H_P Parameter: Plant Line Value: 35A19
  misc_feature: MA Experiment 20001608 PARAMETER Experiment Name: Zm_50ppm_KNO3_L-to-H_P Parameter: Timepoint (hr) Value: 48
  misc_feature: MA Experiment 20001608 PARAMETER Experiment Name: Zm_50ppm_KNO3_L-to-H_P Parameter: Tissue Value: Shoots
  misc_feature: MA Experiment 20001608 PARAMETER Experiment Name: Zm_50ppm_KNO3_L-to-H_P Parameter: Treatment Value: 50ppm KNO3 vs. 50ppm KCl
gggaaggctttgctggtagttgtagcacacacggcacaccacacggtttcgtcctcgtccaccatgctatcgtcctcgcacctcgttaagctgcccctcctgccgcgcggcctcctctcgcacctccccgcatccatcctcccgagcgggcgcgagagcaccgcggacgcagcaccctccacgccgccttcttccaagaagatgtcgtcgtccgcgcagcagcagcagcagcagcaagcgggcagcagcaaggcggagtcggcggagctggcgcgcgtgttcgagctgttcgacaaggacggcgacgggcgcatcacgcgggaggagctggcggagtcgctgcgcaagctggggcatgggcgtgccgggcgacgacgagctggcgtccatgatggcgcgcgtggacgccaacggcgacgggtgcgtggacgcggaggagttcggggagctctaccgcggcatcatggacggcgccgcggaggaggaggaggaggaggaggacgacgacgacgacatgcgggaggcgttccgcgtgttcgacgccaacggcgacgggtacatcaccgcggacgagctgggcgcggtgctgtcgtcgctggggctgcggcagggccgcaccgcggaggagtgccggcgcatgatcggccgcgtggaccgcgacggcgacggcagggtcgacttccgcgagttccgccagatgatgcgcgccggcgggctcgccacgctcgggtgatgggtgaccgtcgccggccggtgctgcctgcctcctgctcctgcacctgggcctggccatggagcgccgggcacctttttttctgcatctgcgtgcttgatttcgtgtgctagaaagaacctgtagatagatattgcttgcttggagcgaggggggagctcacgtcacgtaaccgcgttgttccgtcttcgttctgttgatttggttctttagaattgatgggcttgctaattaactgttgtatacttgtatgtactggttgttgccctgcccttaaggattgttcggggacaaggtttcccctgtttt

SEQ ID NO: 6044 - protein, 281 aa, Zea mays subsp. mays
  peptide (1)..(281): Ceres Seq. ID no. 12372361
  misc_feature (31)..(118): Homolog of NCBI NO: 28301674 NR Description: calcium-binding protein [Lotus japonicus]
  misc_feature (86)..(118): Homolog of NCBI NO: 15236276 NR Description: putative calmodulin; protein id: At4g03290.1
  misc_feature (86)..(118): Homolog of NCBI NO: 15231470 NR Description: putative calmodulin; protein id: At3g07490.1 thaliana] >gi|6041859|gb|AAF02168.1|AC009853_28 putative
  misc_feature (86)..(118): Homolog of NCBI NO: 15235516 NR Description: putative calmodulin; protein id: At4g12860.1
  misc_feature (83)..(118): Homolog of NCBI NO: 15231685 NR Description: calmodulin-like protein; protein id: At3g59440.1
  misc_feature (65)..(119): Homolog of NCBI NO: 19386815 NR Description: B1147A04.10 [Oryza sativa (japonica
  misc_feature (83)..(118): Homolog of NCBI NO: 38048675 NR Description: similar to Drosophila melanogaster Cam
  misc_feature (88)..(118): Homolog of NCBI NO: 34903134 NR Description: unnamed protein product [Oryza sativa (japonica
  misc_feature (88)..(118): Homolog of NCBI NO: 34903330 NR Description: unnamed protein product [Oryza sativa (japonica group)] >gi|6498422|dbj|BAA87825.1| unnamed protein product
  misc_feature (83)..(118): Homolog of NCBI NO: 34909152 NR Description: putative calmodulin [Oryza sativa (japonica >gi|20160697|dbj|BAB89640.1| putative calmodulin [Oryza sativa
GKALLVVVAHTAHHTVSSSSTMLSSSHLVKLPLLPRGLLSHLPASILPSGRESTADAAPSTPPSSKKMSSSAQQQQQQQAGSSKAESAELARVFELFDKDGDGRITREELAESLRKLGHGRAGRRRAGVHDGARGRQRRRVRGRGGVRGALPRHHGRRRGGGGGGGGRRRRHAGGVPRVRRQRRRVHHRGRAGRGAVVAGAAAGPHRGGVPAHDRPRGPRRRRQGRLPRVPPDDARRRARHARVMGDRRRPVLPASCSCTWAWPWSAGHLFFCICVLDFVC

SEQ ID NO: 6045 - protein, 260 aa, Zea mays subsp. mays
  peptide (1)..(260): Ceres Seq. ID no. 12372362
  misc_feature (10)..(97): Homolog of NCBI NO: 28301674 NR Description: calcium-binding protein [Lotus japonicus]
  misc_feature (65)..(97): Homolog of NCBI NO: 15236276 NR Description: putative calmodulin; protein id: At4g03290.1
  misc_feature (65)..(97): Homolog of NCBI NO: 15231470 NR Description: putative calmodulin; protein id: At3g07490.1 thaliana] >gi|6041859|gb|AAF02168.1|AC009853_28 putative
  misc_feature (65)..(97): Homolog of NCBI NO: 15235516 NR Description: putative calmodulin; protein id: At4g12860.1
  misc_feature (62)..(97): Homolog of NCBI NO: 15231685 NR Description: calmodulin-like protein; protein id: At3g59440.1
  misc_feature (44)..(98): Homolog of NCBI NO: 19386815 NR Description: B1147A04.10 [Oryza sativa (japonica
  misc_feature (62)..(97): Homolog of NCBI NO: 38048675 NR Description: similar to Drosophila melanogaster Cam
  misc_feature (67)..(97): Homolog of NCBI NO: 34903134 NR Description: unnamed protein product [Oryza sativa (japonica
  misc_feature (67)..(97): Homolog of NCBI NO: 34903330 NR Description: unnamed protein product [Oryza sativa (japonica group)] >gi|6498422|dbj|BAA87825.1| unnamed protein product
  misc_feature (62)..(97): Homolog of NCBI NO: 34909152 NR Description: putative calmodulin [Oryza sativa (japonica >gi|20160697|dbj|BAB89640.1| putative calmodulin [Oryza sativa
MLSSSHLVKLPLLPRGLLSHLPASILPSGRESTADAAPSTPPSSKKMSSSAQQQQQQQAGSSKAESAELARVFELFDKDGDGRITREELAESLRKLGHGRAGRRRAGVHDGARGRQRRRVRGRGGVRGALPRHHGRRRGGGGGGGGRRRRHAGGVPRVRRQRRRVHHRGRAGRGAVVAGAAAGPHRGGVPAHDRPRGPRRRRQGRLPRVPPDDARRRARHARVMGDRRRPVLPASCSCTWAWPWSAGHLFFCICVLDFVC

SEQ ID NO: 6046 - protein, 214 aa, Zea mays subsp. mays
  peptide (1)..(214): Ceres Seq. ID no. 12372363
  misc_feature (1)..(51): Homolog of NCBI NO: 28301674 NR Description: calcium-binding protein [Lotus japonicus]
  misc_feature (19)..(51): Homolog of NCBI NO: 15236276 NR Description: putative calmodulin; protein id: At4g03290.1
  misc_feature (19)..(51): Homolog of NCBI NO: 15231470 NR Description: putative calmodulin; protein id: At3g07490.1 thaliana] >gi|6041859|gb|AAF02168.1|AC009853_28 putative
  misc_feature (19)..(51): Homolog of NCBI NO: 15235516 NR Description: putative calmodulin; protein id: At4g12860.1
  misc_feature (16)..(51): Homolog of NCBI NO: 15231685 NR Description: calmodulin-like protein; protein id: At3g59440.1
  misc_feature (1)..(52): Homolog of NCBI NO: 19386815 NR Description: B1147A04.10 [Oryza sativa (japonica
  misc_feature (16)..(51): Homolog of NCBI NO: 38048675 NR Description: similar to Drosophila melanogaster Cam
  misc_feature (21)..(51): Homolog of NCBI NO: 34903134 NR Description: unnamed protein product [Oryza sativa (japonica
  misc_feature (21)..(51): Homolog of NCBI NO: 34903330 NR Description: unnamed protein product [Oryza sativa (japonica group)] >gi|6498422|dbj|BAA87825.1| unnamed protein product
  misc_feature (16)..(51): Homolog of NCBI NO: 34909152 NR Description: putative calmodulin [Oryza sativa (japonica >gi|20160697|dbj|BAB89640.1| putative calmodulin [Oryza sativa
MSSSAQQQQQQQAGSSKAESAELARVFELFDKDGDGRITREELAESLRKLGHGRAGRRRAGVHDGARGRQRRRVRGRGGVRGALPRHHGRRRGGGGGGGGRRRRHAGGVPRVRRQRRRVHHRGRAGRGAVVAGAAAGPHRGGVPAHDRPRGPRRRRQGRLPRVPPDDARRRARHARVMGDRRRPVLPASCSCTWAWPWSAGHLFFCICVLDFVC

SEQ ID NO: 6047 - DNA, 923 bp, Zea mays subsp. mays
  misc_feature (1)..(923): Ceres Seq. ID no. 12403512
  misc_feature: MA Experiment ID: 108504 Result: Up-regulated in Transcription
  misc_feature: MA Experiment 108504 PARAMETER Experiment Name: Zm_Drought_P Parameter: Age (day) Value: 8
  misc_feature: MA Experiment 108504 PARAMETER Experiment Name: Zm_Drought_P Parameter: Organism Value: Zea mays
  misc_feature: MA Experiment 108504 PARAMETER Experiment Name: Zm_Drought_P Parameter: Plant Line Value: 35A19
  misc_feature: MA Experiment 108504 PARAMETER Experiment Name: Zm_Drought_P Parameter: Timepoint (hr) Value: 12
  misc_feature: MA Experiment 108504 PARAMETER Experiment Name: Zm_Drought_P Parameter: Tissue Value: Aerial
  misc_feature: MA Experiment 108504 PARAMETER Experiment Name: Zm_Drought_P Parameter: Treatment Value: Drought vs. No Drought
  misc_feature: MA Experiment ID: 108528 Result: Down-regulated in Transcription
  misc_feature: MA Experiment 108528 PARAMETER Experiment Name: Zm_Imbibed_Seeds_P Parameter: Age (day) Value: 5 vs. 2
  misc_feature: MA Experiment 108528 PARAMETER Experiment Name: Zm_Imbibed_Seeds_P Parameter: Organism Value: Zea mays
  misc_feature: MA Experiment 108528 PARAMETER Experiment Name: Zm_Imbibed_Seeds_P Parameter: Plant Line Value: 35A19
  misc_feature: MA Experiment 108528 PARAMETER Experiment Name: Zm_Imbibed_Seeds_P Parameter: Tissue Value: Aerial vs. Embryo
  misc_feature: MA Experiment ID: 108530 Result: Down-regulated in Transcription
  misc_feature: MA Experiment 108530 PARAMETER Experiment Name: Zm_Imbibed_Seeds_P Parameter: Age (day) Value: 6 vs. 2
  misc_feature: MA Experiment 108530 PARAMETER Experiment Name: Zm_Imbibed_Seeds_P Parameter: Organism Value: Zea mays
  misc_feature: MA Experiment 108530 PARAMETER Experiment Name: Zm_Imbibed_Seeds_P Parameter: Plant Line Value: 35A19
  misc_feature: MA Experiment 108530 PARAMETER Experiment Name: Zm_Imbibed_Seeds_P Parameter: Tissue Value: Aerial vs. Embryo
  misc_feature: MA Experiment ID: 108536 Result: Down-regulated in Transcription
  misc_feature: MA Experiment 108536 PARAMETER Experiment Name: Zm_Meristem_P Parameter: Age (day) Value: 8
  misc_feature: MA Experiment 108536 PARAMETER Experiment Name: Zm_Meristem_P Parameter: Organism Value: Zea mays
  misc_feature: MA Experiment 108536 PARAMETER Experiment Name: Zm_Meristem_P Parameter: Plant Line Value: 35A19
  misc_feature: MA Experiment 108536 PARAMETER Experiment Name: Zm_Meristem_P Parameter: Tissue Value: Shoot Meristem vs. Above Shoot Meristem
  misc_feature: MA Experiment ID: 108540 Result: Up-regulated in Transcription
  misc_feature: MA Experiment 108540 PARAMETER Experiment Name: Zm_20percent_PEG_P Parameter: Age (day) Value: 8
  misc_feature: MA Experiment 108540 PARAMETER Experiment Name: Zm_20percent_PEG_P Parameter: Organism Value: Zea mays
  misc_feature: MA Experiment 108540 PARAMETER Experiment Name: Zm_20percent_PEG_P Parameter: Plant Line Value: 35A19
  misc_feature: MA Experiment 108540 PARAMETER Experiment Name: Zm_20percent_PEG_P Parameter: Timepoint (hr) Value: 6
  misc_feature: MA Experiment 108540 PARAMETER Experiment Name: Zm_20percent_PEG_P Parameter: Tissue Value: Aerial
  misc_feature: MA Experiment 108540 PARAMETER Experiment Name: Zm_20percent_PEG_P Parameter: Treatment Value: 20percent PEG vs. No Treatment
  misc_feature: MA Experiment ID: 108542 Result: Up-regulated in Transcription
  misc_feature: MA Experiment 108542 PARAMETER Experiment Name: Zm_150mM_NaCl_P Parameter: Age (day) Value: 8
  misc_feature: MA Experiment 108542 PARAMETER Experiment Name: Zm_150mM_NaCl_P Parameter: Organism Value: Zea mays
  misc_feature: MA Experiment 108542 PARAMETER Experiment Name: Zm_150mM_NaCl_P Parameter: Plant Line Value: 35A19
  misc_feature: MA Experiment 108542 PARAMETER Experiment Name: Zm_150mM_NaCl_P Parameter: Timepoint (hr) Value: 6
  misc_feature: MA Experiment 108542 PARAMETER Experiment Name: Zm_150mM_NaCl_P Parameter: Tissue Value: Aerial
  misc_feature: MA Experiment 108542 PARAMETER Experiment Name: Zm_150mM_NaCl_P Parameter: Treatment Value: 150mM NaCl vs. No Treatment
  misc_feature: MA Experiment ID: 108545 Result: Down-regulated in Transcription
  misc_feature: MA Experiment 108545 PARAMETER Experiment Name: Zm_Imbibed_Seeds_P Parameter: Age (day) Value: 3 vs. 2
  misc_feature: MA Experiment 108545 PARAMETER Experiment Name: Zm_Imbibed_Seeds_P Parameter: Organism Value: Zea mays
  misc_feature: MA Experiment 108545 PARAMETER Experiment Name: Zm_Imbibed_Seeds_P Parameter: Plant Line Value: 35A19
  misc_feature: MA Experiment 108545 PARAMETER Experiment Name: Zm_Imbibed_Seeds_P Parameter: Tissue Value: Aerial vs. Embryo
  misc_feature: MA Experiment ID: 108547 Result: Down-regulated in Transcription
  misc_feature: MA Experiment 108547 PARAMETER Experiment Name: Zm_Imbibed_Seeds_P Parameter: Age (day) Value: 4 vs. 2
  misc_feature: MA Experiment 108547 PARAMETER Experiment Name: Zm_Imbibed_Seeds_P Parameter: Organism Value: Zea mays
  misc_feature: MA Experiment 108547 PARAMETER Experiment Name: Zm_Imbibed_Seeds_P Parameter: Plant Line Value: 35A19
  misc_feature: MA Experiment 108547 PARAMETER Experiment Name: Zm_Imbibed_Seeds_P Parameter: Tissue Value: Aerial vs. Embryo
  misc_feature: MA Experiment ID: 108556 Result: Up-regulated in Transcription
  misc_feature: MA Experiment 108556 PARAMETER Experiment Name: Zm_Drought_P Parameter: Age (day) Value: 9
  misc_feature: MA Experiment 108556 PARAMETER Experiment Name: Zm_Drought_P Parameter: Organism Value: Zea mays
  misc_feature: MA Experiment 108556 PARAMETER Experiment Name: Zm_Drought_P Parameter: Plant Line Value: 35A19
  misc_feature: MA Experiment 108556 PARAMETER Experiment Name: Zm_Drought_P Parameter: Timepoint (hr) Value: 24
  misc_feature: MA Experiment 108556 PARAMETER Experiment Name: Zm_Drought_P Parameter: Tissue Value: Aerial
  misc_feature: MA Experiment 108556 PARAMETER Experiment Name: Zm_Drought_P Parameter: Treatment Value: Drought vs. No Drought
  misc_feature: MA Experiment ID: 108597 Result: Up-regulated in Transcription
  misc_feature: MA Experiment 108597 PARAMETER Experiment Name: Zm_100uM_ABA_P Parameter: Age (day) Value: 9
  misc_feature: MA Experiment 108597 PARAMETER Experiment Name: Zm_100uM_ABA_P Parameter: Organism Value: Zea mays
  misc_feature: MA Experiment 108597 PARAMETER Experiment Name: Zm_100uM_ABA_P Parameter: Plant Line Value: 35A19
  misc_feature: MA Experiment 108597 PARAMETER Experiment Name: Zm_100uM_ABA_P Parameter: Timepoint (hr) Value: 24
  misc_feature: MA Experiment 108597 PARAMETER Experiment Name: Zm_100uM_ABA_P Parameter: Tissue Value: Aerial
  misc_feature: MA Experiment 108597 PARAMETER Experiment Name: Zm_100uM_ABA_P Parameter: Treatment Value: 100uM ABA vs. No Treatment
  misc_feature: MA Experiment ID: 20000478 Result: Up-regulated in Transcription
  misc_feature: MA Experiment 20000478 PARAMETER Experiment Name: Zm_5mM_SA_P Parameter: Age (day) Value: 11
  misc_feature: MA Experiment 20000478 PARAMETER Experiment Name: Zm_5mM_SA_P Parameter: Organism Value: Zea mays
  misc_feature: MA Experiment 20000478 PARAMETER Experiment Name: Zm_5mM_SA_P Parameter: Plant Line Value: 35A19
  misc_feature: MA Experiment 20000478 PARAMETER Experiment Name: Zm_5mM_SA_P Parameter: Timepoint (hr) Value: 72
  misc_feature: MA Experiment 20000478 PARAMETER Experiment Name: Zm_5mM_SA_P Parameter: Tissue Value: Aerial
  misc_feature: MA Experiment 20000478 PARAMETER Experiment Name: Zm_5mM_SA_P Parameter: Treatment Value: 5mM SA vs. No Treatment
  misc_feature: MA Experiment ID: 20000479 Result: Up-regulated in Transcription
  misc_feature: MA Experiment 20000479 PARAMETER Experiment Name: Zm_Drought_P Parameter: Age (day) Value: 10
  misc_feature: MA Experiment 20000479 PARAMETER Experiment Name: Zm_Drought_P Parameter: Organism Value: Zea mays
  misc_feature: MA Experiment 20000479 PARAMETER Experiment Name: Zm_Drought_P Parameter: Plant Line Value: 35A19
  misc_feature: MA Experiment 20000479 PARAMETER Experiment Name: Zm_Drought_P Parameter: Timepoint (hr) Value: 48
  misc_feature: MA Experiment 20000479 PARAMETER Experiment Name: Zm_Drought_P Parameter: Tissue Value: Aerial
  misc_feature: MA Experiment 20000479 PARAMETER Experiment Name: Zm_Drought_P Parameter: Treatment Value: Drought vs. No Drought
  misc_feature: MA Experiment ID: 20000480 Result: Up-regulated in Transcription
  misc_feature: MA Experiment 20000480 PARAMETER Experiment Name: Zm_Drought_P Parameter: Age (day) Value: 11
  misc_feature: MA Experiment 20000480 PARAMETER Experiment Name: Zm_Drought_P Parameter: Organism Value: Zea mays
  misc_feature: MA Experiment 20000480 PARAMETER Experiment Name: Zm_Drought_P Parameter: Plant Line Value: 35A19
  misc_feature: MA Experiment 20000480 PARAMETER Experiment Name: Zm_Drought_P Parameter: Timepoint (hr) Value: 72
  misc_feature: MA Experiment 20000480 PARAMETER Experiment Name: Zm_Drought_P Parameter: Tissue Value: Aerial
  misc_feature: MA Experiment 20000480 PARAMETER Experiment Name: Zm_Drought_P Parameter: Treatment Value: Drought vs. No Drought
  misc_feature: MA Experiment ID: 20000488 Result: Down-regulated in Transcription
  misc_feature: MA Experiment 20000488 PARAMETER Experiment Name: Zm_50mM_NH4NO3_L_to_H_P Parameter: Organism Value: Zea mays
  misc_feature: MA Experiment 20000488 PARAMETER Experiment Name: Zm_50mM_NH4NO3_L_to_H_P Parameter: Timepoint (hr) Value: 8
  misc_feature: MA Experiment 20000488 PARAMETER Experiment Name: Zm_50mM_NH4NO3_L_to_H_P Parameter: Tissue Value: Leaves
  misc_feature: MA Experiment 20000488 PARAMETER Experiment Name: Zm_50mM_NH4NO3_L_to_H_P Parameter: Treatment Value: 50mM NH4NO3 vs. 100mM Mannitol
ctttccctccccatcccgtgaggcgtgagcgccacacccacacgaaggatcccgaagccgaagagaaccctaccgaggaggcagaaaatccgtaggcgcgcctcatacgattccgagatccgtgcctcttatcggcagccatgatgctgcgcgcggcgggcaggcgactcctcggcgtaggaggcggcgatccagcgcccgcggtcgctgctgctgtggcggcgagcaggagcagaggataccacgagcgggtggtggaccactacaacaacccgcgcaacgtggggtccttggacaaggacgacacggacgtcggaacggggatcgtcggcgcgccggcgtgcggggacgtcatgaagctgcagatccgcgtcgacgaggggtccggcaggatcgtcgacgcgcgcttcaagaccttcggctgcggctccgccatcgcgtcctcctccgtcgcttccgaatgggtcaagggcaagcaagtggaggaagtggtggccatcaagaacaccgagattgcgaagcacctgtctcttccaccagtgaagctccactgcagcatgctcgctgaggacgcaatcaaggccgccgtgaaggattacgaggcaaagaaagggaagaagatggccaaggcagaggagcaggacaccccatgcccgtaagagcgacagctagtaaactgaagcgagcagagagtactgtatgtagtatgtaacggctaacgagcgaggtactcgtgtcgtgtgtgccaaaagaagcatgtatgtaatgtaaagctaggtaacaacgatgtttgggtttcatagaataagcgaacttgccgcagtgttttttttatctgctctgcacatgaataaggtctgcccattgctctttatctgtttagtcggagcatgtatgcttagtttgatcaagcaatgctgttg

SEQ ID NO: 6048 - protein, 172 aa, Zea mays subsp. mays
  peptide (1)..(172): Ceres Seq. ID no. 12403513
  misc_feature (34)..(159): Pfam Name: NifU-like N terminal domain Pfam Description: NifU-like N terminal domain
  misc_feature (2)..(167): Homolog of NCBI NO: 34912076 NR Description: putative nifU-like protein [Oryza sativa
  misc_feature (1)..(169): Homolog of NCBI NO: 15235569 NR Description: nifU-like protein; protein id: At4g22220.1, by cDNA: 8156., supported by cDNA: gi_13605506, supported by
  misc_feature (2)..(169): Homolog of NCBI NO: 21595581 NR Description: nifU-like protein [Arabidopsis thaliana]
  misc_feature (2)..(169): Homolog of NCBI NO: 15233385 NR Description: putative NifU-like metallocluster assembly
  misc_feature (19)..(164): Homolog of NCBI NO: 16798388 NR Description: iron-sulfur cluster assembly protein IscU
  misc_feature (19)..(167): Homolog of NCBI NO: 11545707 NR Description: ISCU2 [Homo sapiens]
  misc_feature (19)..(167): Homolog of NCBI NO: 20381021 NR Description: RIKEN cDNA 2310020H20 gene [Mus musculus]
  misc_feature (19)..(167): Homolog of NCBI NO: 21313484 NR Description: RIKEN cDNA 2310020H20 [Mus musculus] unnamed protein product [Mus musculus] unnamed protein product [Mus musculus]
  misc_feature (19)..(167): Homolog of NCBI NO: 27666566 NR Description: similar to RIKEN cDNA 2310020H20 gene [Mus
  misc_feature (1)..(157): Homolog of NCBI NO: 19113879 NR Description: similarity to iron-sulpher cluster proteins; like protein; iron metabolism; mitochondrial [Schizosaccharomyces
MMLRAAGRRLLGVGGGDPAPAVAAAVAASRSRGYHERVVDHYNNPRNVGSLDKDDTDVGTGIVGAPACGDVMKLQIRVDEGSGRIVDARFKTFGCGSAIASSSVASEWVKGKQVEEVVAIKNTEIAKHLSLPPVKLHCSMLAEDAIKAAVKDYEAKKGKKMAKAEEQDTPCP

SEQ ID NO: 6049 - protein, 171 aa, Zea mays subsp. mays
  peptide (1)..(171): Ceres Seq. ID no. 12403514
  misc_feature (33)..(158): Pfam Name: NifU-like N terminal domain Pfam Description: NifU-like N terminal domain
  misc_feature (1)..(166): Homolog of NCBI NO: 34912076 NR Description: putative nifU-like protein [Oryza sativa
  misc_feature (1)..(168): Homolog of NCBI NO: 15235569 NR Description: nifU-like protein; protein id: At4g22220.1, by cDNA: 8156., supported by cDNA: gi_13605506, supported by
  misc_feature (1)..(168): Homolog of NCBI NO: 21595581 NR Description: nifU-like protein [Arabidopsis thaliana]
  misc_feature (1)..(168): Homolog of NCBI NO: 15233385 NR Description: putative NifU-like metallocluster assembly
  misc_feature (18)..(163): Homolog of NCBI NO: 16798388 NR Description: iron-sulfur cluster assembly protein IscU
  misc_feature (18)..(166): Homolog of NCBI NO: 11545707 NR Description: ISCU2 [Homo sapiens]
  misc_feature (18)..(166): Homolog of NCBI NO: 20381021 NR Description: RIKEN cDNA 2310020H20 gene [Mus musculus]
  misc_feature (18)..(166): Homolog of NCBI NO: 21313484 NR Description: RIKEN cDNA 2310020H20 [Mus musculus] unnamed protein product [Mus musculus] unnamed protein product [Mus musculus]
  misc_feature (18)..(166): Homolog of NCBI NO: 27666566 NR Description: similar to RIKEN cDNA 2310020H20 gene [Mus
  misc_feature (1)..(156): Homolog of NCBI NO: 19113879 NR Description: similarity to iron-sulpher cluster proteins; like protein; iron metabolism; mitochondrial [Schizosaccharomyces
MLRAAGRRLLGVGGGDPAPAVAAAVAASRSRGYHERVVDHYNNPRNVGSLDKDDTDVGTGIVGAPACGDVMKLQIRVDEGSGRIVDARFKTFGCGSAIASSSVASEWVKGKQVEEVVAIKNTEIAKHLSLPPVKLHCSMLAEDAIKAAVKDYEAKKGKKMAKAEEQDTPCP

SEQ ID NO: 6050 - protein, 101 aa, Zea mays subsp. mays
  peptide (1)..(101): Ceres Seq. ID no. 12403515
  misc_feature (1)..(88): Pfam Name: NifU-like N terminal domain Pfam Description: NifU-like N terminal domain
  misc_feature (1)..(96): Homolog of NCBI NO: 34912076 NR Description: putative nifU-like protein [Oryza sativa
  misc_feature (1)..(98): Homolog of NCBI NO: 15235569 NR Description: nifU-like protein; protein id: At4g22220.1, by cDNA: 8156., supported by cDNA: gi_13605506, supported by
  misc_feature (1)..(98): Homolog of NCBI NO: 21595581 NR Description: nifU-like protein [Arabidopsis thaliana]
  misc_feature (1)..(98): Homolog of NCBI NO: 15233385 NR Description: putative NifU-like metallocluster assembly
  misc_feature (1)..(93): Homolog of NCBI NO: 16798388 NR Description: iron-sulfur cluster assembly protein IscU
  misc_feature (1)..(96): Homolog of NCBI NO: 11545707 NR Description: ISCU2 [Homo sapiens]
  misc_feature (1)..(96): Homolog of NCBI NO: 20381021 NR Description: RIKEN cDNA 2310020H20 gene [Mus musculus]
  misc_feature (1)..(96): Homolog of NCBI NO: 21313484 NR Description: RIKEN cDNA 2310020H20 [Mus musculus] unnamed protein product [Mus musculus] unnamed protein product [Mus musculus]
  misc_feature (1)..(96): Homolog of NCBI NO: 27666566 NR Description: similar to RIKEN cDNA 2310020H20 gene [Mus
  misc_feature (1)..(86): Homolog of NCBI NO: 19113879 NR Description: similarity to iron-sulpher cluster proteins; like protein; iron metabolism; mitochondrial [Schizosaccharomyces
MKLQIRVDEGSGRIVDARFKTFGCGSAIASSSVASEWVKGKQVEEVVAIKNTEIAKHLSLPPVKLHCSMLAEDAIKAAVKDYEAKKGKKMAKAEEQDTPCP

SEQ ID NO: 6051 - DNA, 1254 bp, Zea mays subsp. mays
  misc_feature (1)..(1254): Ceres Seq. ID no. 12356329
  misc_feature: MA Experiment ID: 108527 Result: Up-regulated in Transcription
  misc_feature: MA Experiment 108527 PARAMETER Experiment Name: Zm_5mM_NO_P Parameter: Age (day) Value: 8
  misc_feature: MA Experiment 108527 PARAMETER Experiment Name: Zm_5mM_NO_P Parameter: Organism Value: Zea mays
  misc_feature: MA Experiment 108527 PARAMETER Experiment Name: Zm_5mM_NO_P Parameter: Plant Line Value: 35A19
  misc_feature: MA Experiment 108527 PARAMETER Experiment Name: Zm_5mM_NO_P Parameter: Timepoint (hr) Value: 6
  misc_feature: MA Experiment 108527 PARAMETER Experiment Name: Zm_5mM_NO_P Parameter: Tissue Value: Aerial
  misc_feature: MA Experiment 108527 PARAMETER Experiment Name: Zm_5mM_NO_P Parameter: Treatment Value: 5mM NO vs. No Treatment
  misc_feature: MA Experiment ID: 108528 Result: Up-regulated in Transcription
  misc_feature: MA Experiment 108528 PARAMETER Experiment Name: Zm_Imbibed_Seeds_P Parameter: Age (day) Value: 5 vs. 2
  misc_feature: MA Experiment 108528 PARAMETER Experiment Name: Zm_Imbibed_Seeds_P Parameter: Organism Value: Zea mays
  misc_feature: MA Experiment 108528 PARAMETER Experiment Name: Zm_Imbibed_Seeds_P Parameter: Plant Line Value: 35A19
  misc_feature: MA Experiment 108528 PARAMETER Experiment Name: Zm_Imbibed_Seeds_P Parameter: Tissue Value: Aerial vs. Embryo
  misc_feature: MA Experiment ID: 108529 Result: Up-regulated in Transcription
  misc_feature: MA Experiment 108529 PARAMETER Experiment Name: Zm_Imbibed_Seeds_P Parameter: Age (day) Value: 5 vs. 2
  misc_feature: MA Experiment 108529 PARAMETER Experiment Name: Zm_Imbibed_Seeds_P Parameter: Organism Value: Zea mays
  misc_feature: MA Experiment 108529 PARAMETER Experiment Name: Zm_Imbibed_Seeds_P Parameter: Plant Line Value: 35A19
  misc_feature: MA Experiment 108529 PARAMETER Experiment Name: Zm_Imbibed_Seeds_P Parameter: Tissue Value: Roots vs. Embryo
  misc_feature: MA Experiment ID: 108530 Result: Up-regulated in Transcription
  misc_feature: MA Experiment 108530 PARAMETER Experiment Name: Zm_Imbibed_Seeds_P Parameter: Age (day) Value: 6 vs. 2
  misc_feature: MA Experiment 108530 PARAMETER Experiment Name: Zm_Imbibed_Seeds_P Parameter: Organism Value: Zea mays
  misc_feature: MA Experiment 108530 PARAMETER Experiment Name: Zm_Imbibed_Seeds_P Parameter: Plant Line Value: 35A19
  misc_feature: MA Experiment 108530 PARAMETER Experiment Name: Zm_Imbibed_Seeds_P Parameter: Tissue Value: Aerial vs. Embryo
  misc_feature: MA Experiment ID: 108535 Result: Down-regulated in Transcription
  misc_feature: MA Experiment 108535 PARAMETER Experiment Name: Zm_Meristem_P Parameter: Age (day) Value: 8
  misc_feature: MA Experiment 108535 PARAMETER Experiment Name: Zm_Meristem_P Parameter: Organism Value: Zea mays
  misc_feature: MA Experiment 108535 PARAMETER Experiment Name: Zm_Meristem_P Parameter: Plant Line Value: 35A19
  misc_feature: MA Experiment 108535 PARAMETER Experiment Name: Zm_Meristem_P Parameter: Tissue Value: Root Meristem vs. Above Root Meristem
  misc_feature: MA Experiment ID: 108543 Result: Up-regulated in Transcription
  misc_feature: MA Experiment ID: 108546 Result: Up-regulated in Transcription
  misc_feature: MA Experiment 108546 PARAMETER Experiment Name: Zm_Imbibed_Seeds_P Parameter: Age (day) Value: 3 vs. 2
  misc_feature: MA Experiment 108546 PARAMETER Experiment Name: Zm_Imbibed_Seeds_P Parameter: Organism Value: Zea mays
  misc_feature: MA Experiment 108546 PARAMETER Experiment Name: Zm_Imbibed_Seeds_P Parameter: Plant Line Value: 35A19
  misc_feature: MA Experiment 108546 PARAMETER Experiment Name: Zm_Imbibed_Seeds_P Parameter: Tissue Value: Roots vs. Embryo
  misc_feature: MA Experiment ID: 108547 Result: Up-regulated in Transcription
  misc_feature: MA Experiment 108547 PARAMETER Experiment Name: Zm_Imbibed_Seeds_P Parameter: Age (day) Value: 4 vs. 2
  misc_feature: MA Experiment 108547 PARAMETER Experiment Name: Zm_Imbibed_Seeds_P Parameter: Organism Value: Zea mays
  misc_feature: MA Experiment 108547 PARAMETER Experiment Name: Zm_Imbibed_Seeds_P Parameter: Plant Line Value: 35A19
  misc_feature: MA Experiment 108547 PARAMETER Experiment Name: Zm_Imbibed_Seeds_P Parameter: Tissue Value: Aerial vs. Embryo
  misc_feature: MA Experiment ID: 108556 Result: Down-regulated in Transcription
  misc_feature: MA Experiment 108556 PARAMETER Experiment Name: Zm_Drought_P Parameter: Age (day) Value: 9
  misc_feature: MA Experiment 108556 PARAMETER Experiment Name: Zm_Drought_P Parameter: Organism Value: Zea mays
  misc_feature: MA Experiment 108556 PARAMETER Experiment Name: Zm_Drought_P Parameter: Plant Line Value: 35A19
  misc_feature: MA Experiment 108556 PARAMETER Experiment Name: Zm_Drought_P Parameter: Timepoint (hr) Value: 24
  misc_feature: MA Experiment 108556 PARAMETER Experiment Name: Zm_Drought_P Parameter: Tissue Value: Aerial
  misc_feature: MA Experiment 108556 PARAMETER Experiment Name: Zm_Drought_P Parameter: Treatment Value: Drought vs. No Drought
  misc_feature: MA Experiment ID: 108688 Result: Down-regulated in Transcription
  misc_feature: MA Experiment 108688 PARAMETER Experiment Name: Zm_Embryos-Flowers__P Parameter: Tissue Value: Immature Flowers vs. Aerial+
  misc_feature: MA Experiment ID: 108689 Result: Down-regulated in Transcription
  misc_feature: MA Experiment 108689 PARAMETER Experiment Name: Zm_Drought_Roots_P Parameter: Age (day) Value: 9
  misc_feature: MA Experiment 108689 PARAMETER Experiment Name: Zm_Drought_Roots_P Parameter: Organism Value: Zea mays
  misc_feature: MA Experiment 108689 PARAMETER Experiment Name: Zm_Drought_Roots_P Parameter: Plant Line Value: 35A19
  misc_feature: MA Experiment 108689 PARAMETER Experiment Name: Zm_Drought_Roots_P Parameter: Timepoint (hr) Value: 24
  misc_feature: MA Experiment 108689 PARAMETER Experiment Name: Zm_Drought_Roots_P Parameter: Tissue Value: Roots
  misc_feature: MA Experiment 108689 PARAMETER Experiment Name: Zm_Drought_Roots_P Parameter: Treatment Value: Drought vs. No Drought
  misc_feature: MA Experiment ID: 20000488 Result: Down-regulated in Transcription
  misc_feature: MA Experiment 20000488 PARAMETER Experiment Name: Zm_50mM_NH4NO3_L_to_H_P Parameter: Organism Value: Zea mays
  misc_feature: MA Experiment 20000488 PARAMETER Experiment Name: Zm_50mM_NH4NO3_L_to_H_P Parameter: Timepoint (hr) Value: 8
  misc_feature: MA Experiment 20000488 PARAMETER Experiment Name: Zm_50mM_NH4NO3_L_to_H_P Parameter: Tissue Value: Leaves
  misc_feature: MA Experiment 20000488 PARAMETER Experiment Name: Zm_50mM_NH4NO3_L_to_H_P Parameter: Treatment Value: 50mM NH4NO3 vs. 100mM Mannitol
  misc_feature: MA Experiment ID: 20000492 Result: Down-regulated in Transcription
  misc_feature: MA Experiment 20000492 PARAMETER Experiment Name: Zm_Hybrid_Seed_Dev_P Parameter: DAP Value: 12
  misc_feature: MA Experiment 20000492 PARAMETER Experiment Name: Zm_Hybrid_Seed_Dev_P Parameter: Organism Value: Zea mays
  misc_feature: MA Experiment 20000492 PARAMETER Experiment Name: Zm_Hybrid_Seed_Dev_P Parameter: Plant Line Value: 35A19
  misc_feature: MA Experiment 20000492 PARAMETER Experiment Name: Zm_Hybrid_Seed_Dev_P Parameter: Tissue Value: Fert Kernel vs. Unfert Floret
  misc_feature: MA Experiment ID: 20000535 Result: Down-regulated in Transcription
  misc_feature: MA Experiment 20000535 PARAMETER Experiment Name: Zm_Hybrid_Seed_Dev_P Parameter: DAP Value: 30 vs. 12
  misc_feature: MA Experiment 20000535 PARAMETER Experiment Name: Zm_Hybrid_Seed_Dev_P Parameter: Organism Value: Zea mays
  misc_feature: MA Experiment 20000535 PARAMETER Experiment Name: Zm_Hybrid_Seed_Dev_P Parameter: Plant Line Value: 35A19
  misc_feature: MA Experiment 20000535 PARAMETER Experiment Name: Zm_Hybrid_Seed_Dev_P Parameter: Tissue Value: Embryo vs. Unfert Floret
aatttacgacaccagctagttgttgttttcttcgaagcttcttacaggtggcgactggcgagtgccgacctcgaccgattcttcttcgaaatcctccactagaggatcgcagcttctcttttgagcgaacaataaagcaccagctgctctcacgcttccgcgtttagccaggccggccccggccacgagcccacgacaatgaagccgcccgcgtcgtccaccgccacctcctacctcctcctggccccgctcgcgatcctcctgctcgtcttcgtgctaccgtcgctccgcccttggtcccgcgtaggctccgactccgacggcctcggcatcctctgcgcccgccgcaccggcggcttcgtcgacgtcgccgctcgacgcgccggcgccgccaccgggccagacgacacgggcggcggagttcagcctactggtgggcgtgctgaccgtgccgggccggcgggagcggcgcgacatcgtgcgcacggcgtacgcgctgcagccggccgcggagggcgcgcgcgtggacgtgcgcttcgtgttctgccgcgtgacggaccccgtggacgcggcgctgctggcggtggaggcgaggcggcacggggacgtcctggtgctggacggctgcgccgagaacatgaacgacggcaagacgtacgcgtacctgtcgtcggtgccgcgcctcttcgcggcggagccgtacgactacgtgatgaaggccgacgacgacacgtacctgcgcgtggcggcgctggcgggcgagctgcggggcaagccccgccacgacgtgtacctgggctacggctacgccatgggcgggcagccgatgccgttcatgcacggcatggggtacgtggtgtcgtgggacgtggcggcctgggtggccggcgcgcgggagatcctggagcgcaacgacaccctgggccccgaggacctcatggtcggcaagtggctcaacctcgccggcaggggcaggaaccgctacgacctcaagccccggatgtacgacctcagctgggacatggacaacttcaggcccgacaccgtcgccgtgcacacgctcaagacgaaccgccggtgggcggcggcgttcaggtacttcaacgtcgtcactgcggggatcacgccgtcgtccgaactgtaccacctgccgtgatcgtctcatcgatcgaccaacactttttttttttgtaattgtctgcgacccttgccaattgtataacaattatctggcaatacatgaatggatcgtgg

SEQ ID NO: 6052 - protein, 331 aa, Zea mays subsp. mays
  peptide (1)..(331): Ceres Seq. ID no. 12356330
  misc_feature (38)..(168): Pfam Name: Protein of unknown function (DUF390) Pfam Description: Protein of unknown function (DUF390)
  misc_feature (46)..(255): Homolog of NCBI NO: 29830954 NR Description: putative GntR-family transcriptional regulator
  misc_feature (26)..(254): Homolog of NCBI NO: 25989121 NR Description: putative PHA synthase [Streptomyces aureofaciens]
  misc_feature (52)..(267): Homolog of NCBI NO: 9625624 NR Description: nuclear antigen EBNA1 [Human herpesvirus 4]
  misc_feature (49)..(290): Homolog of NCBI NO: 34900164 NR Description: hypothetical protein~predicted by GENSCAN etc.
  misc_feature (60)..(258): Homolog of NCBI NO: 22960558 NR Description: hypothetical protein [Rhodobacter sphaeroides]
  misc_feature (52)..(264): Homolog of NCBI NO: 7106228 NR Description: flagelliform silk protein [Nephila
  misc_feature (37)..(245): Homolog of NCBI NO: 9625624 NR Description: nuclear antigen EBNA1 [Human herpesvirus 4]
  misc_feature (61)..(207): Homolog of NCBI NO: 32141270 NR Description: probable translational initiation factor coelicolor A3(2)] >gi|24413891|emb|CAD55362.1| probable
  misc_feature (74)..(304): Homolog of NCBI NO: 22959992 NR Description: hypothetical protein [Rhodobacter sphaeroides]
MKPPASSTATSYLLLAPLAILLLVFVLPSLRPWSRVGSDSDGLGILCARRTGGFVDVAARRAGAATGPDDTGGGVQPTGGRADRAGPAGAARHRAHGVRAAAGRGGRARGRALRVLPRDGPRGRGAAGGGGEAARGRPGAGRLRREHERRQDVRVPVVGAAPLRGGAVRLRDEGRRRHVPARGGAGGRAAGQAPPRRVPGLRLRHGRAADAVHARHGVRGVVGRGGLGGRRAGDPGAQRHPGPRGPHGRQVAQPRRQGQEPLRPQAPDVRPQLGHGQLQARHRRRAHAQDEPPVGGGVQVLQRRHCGDHAVVRTVPPAVIVSSIDQHFFFL

SEQ ID NO: 6053 - protein, 172 aa, Zea mays subsp. mays
  peptide (1)..(172): Ceres Seq. ID no. 12356331
  misc_feature (1)..(115): Pfam Name: Galactosyltransferase Pfam Description: Galactosyltransferase
  misc_feature (1)..(170): Homolog of NCBI NO: 18092341 NR Description: hypothetical protein [Zea mays]
  misc_feature (1)..(172): Homolog of NCBI NO: 15242148 NR Description: putative protein; protein id: At5g57500.1, by cDNA: 118484. [Arabidopsis thaliana] gb|AAF08572.1~gene_id:MUA2.7~similar to unknown protein
  misc_feature (1)..(172): Homolog of NCBI NO: 21537037 NR Description: unknown [Arabidopsis thaliana]
  misc_feature (1)..(170): Homolog of NCBI NO: 14719291 NR Description: unknown [Zea mays]
MNDGKTYAYLSSVPRLFAAEPYDYVMKADDDTYLRVAALAGELRGKPRHDVYLGYGYAMGGQPMPFMHGMGYVVSWDVAAWVAGAREILERNDTLGPEDLMVGKWLNLAGRGRNRYDLKPRMYDLSWDMDNFRPDTVAVHTLKTNRRWAAAFRYFNVVTAGITPSSELYHLP

SEQ ID NO: 6054 - DNA, 754 bp, Zea mays subsp. mays
  misc_feature (1)..(754): Ceres Seq. ID no. 12405554
  misc_feature: MA Experiment ID: 20000479 Result: Down-regulated in Transcription
  misc_feature: MA Experiment 20000479 PARAMETER Experiment Name: Zm_Drought_P Parameter: Age (day) Value: 10
  misc_feature: MA Experiment 20000479 PARAMETER Experiment Name: Zm_Drought_P Parameter: Organism Value: Zea mays
  misc_feature: MA Experiment 20000479 PARAMETER Experiment Name: Zm_Drought_P Parameter: Plant Line Value: 35A19
  misc_feature: MA Experiment 20000479 PARAMETER Experiment Name: Zm_Drought_P Parameter: Timepoint (hr) Value: 48
  misc_feature: MA Experiment 20000479 PARAMETER Experiment Name: Zm_Drought_P Parameter: Tissue Value: Aerial
  misc_feature: MA Experiment 20000479 PARAMETER Experiment Name: Zm_Drought_P Parameter: Treatment Value: Drought vs. No Drought
  misc_feature: MA Experiment ID: 20000480 Result: Down-regulated in Transcription
  misc_feature: MA Experiment 20000480 PARAMETER Experiment Name: Zm_Drought_P Parameter: Age (day) Value: 11
  misc_feature: MA Experiment 20000480 PARAMETER Experiment Name: Zm_Drought_P Parameter: Organism Value: Zea mays
  misc_feature: MA Experiment 20000480 PARAMETER Experiment Name: Zm_Drought_P Parameter: Plant Line Value: 35A19
  misc_feature: MA Experiment 20000480 PARAMETER Experiment Name: Zm_Drought_P Parameter: Timepoint (hr) Value: 72
  misc_feature: MA Experiment 20000480 PARAMETER Experiment Name: Zm_Drought_P Parameter: Tissue Value: Aerial
  misc_feature: MA Experiment 20000480 PARAMETER Experiment Name: Zm_Drought_P Parameter: Treatment Value: Drought vs. No Drought
aaatgacgccatgccggcgccaccgagggcgaaagctgtccagatcgtgtgattttgcatcccatccgcgagcgcgacacgcgctgacctactcgacggcctccacctccgtcttgaggcgaagcgtagtgcgaaggaccaactctttcgaagggaaattatatctcaggtgcttaggagtctgccatggccagcgagaataaggtatttaggttcgaggaagtcgccaagcacaacgtcaccaaggactgctggatcatcatcgccggcaaggtgtatgatgtcactccttttatggatgagcatcctggtggagatgaggttttgctagctgtaactgggaaagatgctacagctgattttgaagatattggccacagtgattccgcaagggacatgatggagaagtaccacatcgggcagatagatgcttcaacaatcccagcaaagcgaacttatgtgcacccccagcaagcgcccagccactcagacaagaataatgatctcctcatcaagatcctgcagttccttgtgcccattatgatcctgggccttgcatttggtatacgtcagtacagcaaatcagagtagtactgttcttgaagacttgcctttggagtctgttttatggtaatggtttggatgagaacagttcagtaattgcttagtgtatttgtcaggtggatgttatctcattggtcatatactatgtattatggacatccatgtgttgccgaaatgtgctcttttcccc

SEQ ID NO: 6055 - protein, 134 aa, Zea mays subsp. mays
  peptide (1)..(134): Ceres Seq. ID no. 12405555
  misc_feature (7)..(81): Pfam Name: Cytochrome b5-like Heme/Steroid binding domain Pfam Description: Cytochrome b5-like Heme/Steroid binding domain
  misc_feature (1)..(134): Homolog of NCBI NO: 37536104 NR Description: putative cytochrome [Oryza sativa (japonica >gi|13786468|gb|AAK39593.1| putative cytochrome [Oryza sativa]
  misc_feature (1)..(132): Homolog of NCBI NO: 25044825 NR Description: cytochrome b5 [Ananas comosus]
  misc_feature (1)..(134): Homolog of NCBI NO: 729252 NR Description: Cytochrome B5 >gi|7430587|pir||T14454 cytochrome
  misc_feature (1)..(134): Homolog of NCBI NO: 2695711 NR Description: cytochome b5 [Olea europaea]
  misc_feature (1)..(134): Homolog of NCBI NO: 15238776 NR Description: cytochrome b5 (dbj|BAA74839.1); protein id: supported by cDNA: 31303., supported by cDNA: gi_19423893, by cDNA: gi_21281007, supported by cDNA: gi_4240119 b5 isoform 1
  misc_feature (1)..(132): Homolog of NCBI NO: 1076621 NR Description: cytochrome b5 - common tobacco
  misc_feature (1)..(132): Homolog of NCBI NO: 1345882 NR Description: CYTOCHROME B5
  misc_feature (1)..(133): Homolog of NCBI NO: 15225731 NR Description: putative cytochrome b5; protein id: At2g32720.1 thaliana] >gi|12229741|sp|O48845|CY52_ARATH Probable cytochrome isoform 2 >gi|7430590|pir||T00796 cytochrome b5 At2g32720
  misc_feature (1)..(134): Homolog of NCBI NO: 14719320 NR Description: cytochrome B5 [Oryza sativa]
  misc_feature (1)..(134): Homolog of NCBI NO: 1345881 NR Description: Cytochrome b5 >gi|1076743|pir||S46307 cytochrome
MASENKVFRFEEVAKHNVTKDCWIIIAGKVYDVTPFMDEHPGGDEVLLAVTGKDATADFEDIGHSDSARDMMEKYHIGQIDASTIPAKRTYVHPQQAPSHSDKNNDLLIKILQFLVPIMILGLAFGIRQYSKSE

SEQ ID NO: 6056 - protein, 98 aa, Zea mays subsp. mays
  peptide (1)..(98): Ceres Seq. ID no. 12405556
  misc_feature (1)..(98): Homolog of NCBI NO: 37536104 NR Description: putative cytochrome [Oryza sativa (japonica >gi|13786468|gb|AAK39593.1| putative cytochrome [Oryza sativa]
  misc_feature (1)..(96): Homolog of NCBI NO: 25044825 NR Description: cytochrome b5 [Ananas comosus]
  misc_feature (1)..(98): Homolog of NCBI NO: 729252 NR Description: Cytochrome B5 >gi|7430587|pir||T14454 cytochrome
  misc_feature (1)..(98): Homolog of NCBI NO: 2695711 NR Description: cytochome b5 [Olea europaea]
  misc_feature (1)..(98): Homolog of NCBI NO: 15238776 NR Description: cytochrome b5 (dbj|BAA74839.1); protein id: supported by cDNA: 31303., supported by cDNA: gi_19423893, by cDNA: gi_21281007, supported by cDNA: gi_4240119 b5 isoform 1
  misc_feature (1)..(96): Homolog of NCBI NO: 1076621 NR Description: cytochrome b5 - common tobacco
  misc_feature (1)..(96): Homolog of NCBI NO: 1345882 NR Description: CYTOCHROME B5
  misc_feature (1)..(97): Homolog of NCBI NO: 15225731 NR Description: putative cytochrome b5; protein id: At2g32720.1 thaliana] >gi|12229741|sp|O48845|CY52_ARATH Probable cytochrome isoform 2 >gi|7430590|pir||T00796 cytochrome b5 At2g32720
  misc_feature (1)..(98): Homolog of NCBI NO: 14719320 NR Description: cytochrome B5 [Oryza sativa]
  misc_feature (1)..(98): Homolog of NCBI NO: 1345881 NR Description: Cytochrome b5 >gi|1076743|pir||S46307 cytochrome
MDEHPGGDEVLLAVTGKDATADFEDIGHSDSARDMMEKYHIGQIDASTIPAKRTYVHPQQAPSHSDKNNDLLIKILQFLVPIMILGLAFGIRQYSKSE

SEQ ID NO: 6057 - DNA, 1600 bp, Zea mays subsp. mays
  misc_feature (1)..(1600): Ceres Seq. ID no. 12344156
  misc_feature: MA Experiment ID: 108527 Result: Up-regulated in Transcription
  misc_feature: MA Experiment 108527 PARAMETER Experiment Name: Zm_5mM_NO_P Parameter: Age (day) Value: 8
  misc_feature: MA Experiment 108527 PARAMETER Experiment Name: Zm_5mM_NO_P Parameter: Organism Value: Zea mays
  misc_feature: MA Experiment 108527 PARAMETER Experiment Name: Zm_5mM_NO_P Parameter: Plant Line Value: 35A19
  misc_feature: MA Experiment 108527 PARAMETER Experiment Name: Zm_5mM_NO_P Parameter: Timepoint (hr) Value: 6
  misc_feature: MA Experiment 108527 PARAMETER Experiment Name: Zm_5mM_NO_P Parameter: Tissue Value: Aerial
  misc_feature: MA Experiment 108527 PARAMETER Experiment Name: Zm_5mM_NO_P Parameter: Treatment Value: 5mM NO vs. No Treatment
  misc_feature: MA Experiment ID: 108530 Result: Down-regulated in Transcription
  misc_feature: MA Experiment 108530 PARAMETER Experiment Name: Zm_Imbibed_Seeds_P Parameter: Age (day) Value: 6 vs. 2
  misc_feature: MA Experiment 108530 PARAMETER Experiment Name: Zm_Imbibed_Seeds_P Parameter: Organism Value: Zea mays
  misc_feature: MA Experiment 108530 PARAMETER Experiment Name: Zm_Imbibed_Seeds_P Parameter: Plant Line Value: 35A19
  misc_feature: MA Experiment 108530 PARAMETER Experiment Name: Zm_Imbibed_Seeds_P Parameter: Tissue Value: Aerial vs. Embryo
  misc_feature: MA Experiment ID: 108559 Result: Up-regulated in Transcription
  misc_feature: MA Experiment 108559 PARAMETER Experiment Name: Zm_5mM_NO_P Parameter: Age (day) Value: 8
  misc_feature: MA Experiment 108559 PARAMETER Experiment Name: Zm_5mM_NO_P Parameter: Organism Value: Zea mays
  misc_feature: MA Experiment 108559 PARAMETER Experiment Name: Zm_5mM_NO_P Parameter: Plant Line Value: 35A19
  misc_feature: MA Experiment 108559 PARAMETER Experiment Name: Zm_5mM_NO_P Parameter: Timepoint (hr) Value: 12
  misc_feature: MA Experiment 108559 PARAMETER Experiment Name: Zm_5mM_NO_P Parameter: Tissue Value: Aerial
  misc_feature: MA Experiment 108559 PARAMETER Experiment Name: Zm_5mM_NO_P Parameter: Treatment Value: 5mM NO vs. No Treatment
  misc_feature: MA Experiment ID: 20000487 Result: Up-regulated in Transcription
  misc_feature: MA Experiment 20000487 PARAMETER Experiment Name: Zm_50mM_NH4NO3_L_to_H_P Parameter: Organism Value: Zea mays
  misc_feature: MA Experiment 20000487 PARAMETER Experiment Name: Zm_50mM_NH4NO3_L_to_H_P Parameter: Timepoint (hr) Value: 4
  misc_feature: MA Experiment 20000487 PARAMETER Experiment Name: Zm_50mM_NH4NO3_L_to_H_P Parameter: Tissue Value: Leaves
  misc_feature: MA Experiment 20000487 PARAMETER Experiment Name: Zm_50mM_NH4NO3_L_to_H_P Parameter: Treatment Value: 50mM NH4NO3 vs. 100mM Mannitol
  misc_feature: MA Experiment ID: 20000488 Result: Up-regulated in Transcription
  misc_feature: MA Experiment 20000488 PARAMETER Experiment Name: Zm_50mM_NH4NO3_L_to_H_P Parameter: Organism Value: Zea mays
  misc_feature: MA Experiment 20000488 PARAMETER Experiment Name: Zm_50mM_NH4NO3_L_to_H_P Parameter: Timepoint (hr) Value: 8
  misc_feature: MA Experiment 20000488 PARAMETER Experiment Name: Zm_50mM_NH4NO3_L_to_H_P Parameter: Tissue Value: Leaves
  misc_feature: MA Experiment 20000488 PARAMETER Experiment Name: Zm_50mM_NH4NO3_L_to_H_P Parameter: Treatment Value: 50mM NH4NO3 vs. 100mM Mannitol
  misc_feature: MA Experiment ID: 20000492 Result: Up-regulated in Transcription
  misc_feature: MA Experiment 20000492 PARAMETER Experiment Name: Zm_Hybrid_Seed_Dev_P Parameter: DAP Value: 12
  misc_feature: MA Experiment 20000492 PARAMETER Experiment Name: Zm_Hybrid_Seed_Dev_P Parameter: Organism Value: Zea mays
  misc_feature: MA Experiment 20000492 PARAMETER Experiment Name: Zm_Hybrid_Seed_Dev_P Parameter: Plant Line Value: 35A19
  misc_feature: MA Experiment 20000492 PARAMETER Experiment Name: Zm_Hybrid_Seed_Dev_P Parameter: Tissue Value: Fert Kernel vs. Unfert Floret
  misc_feature: MA Experiment ID: 20000534 Result: Down-regulated in Transcription
  misc_feature: MA Experiment 20000534 PARAMETER Experiment Name: Zm_Hybrid_Pollen_P Parameter: Age (day) Value: 8
  misc_feature: MA Experiment 20000534 PARAMETER Experiment Name: Zm_Hybrid_Pollen_P Parameter: Organism Value: Zea mays
  misc_feature: MA Experiment 20000534 PARAMETER Experiment Name: Zm_Hybrid_Pollen_P Parameter: Plant Line Value: 35A19
  misc_feature: MA Experiment 20000534 PARAMETER Experiment Name: Zm_Hybrid_Pollen_P Parameter: Tissue Value: Pollen vs. Aerial
  misc_feature: MA Experiment ID: 20000535 Result: Up-regulated in Transcription
  misc_feature: MA Experiment 20000535 PARAMETER Experiment Name: Zm_Hybrid_Seed_Dev_P Parameter: DAP Value: 30 vs. 12
  misc_feature: MA Experiment 20000535 PARAMETER Experiment Name: Zm_Hybrid_Seed_Dev_P Parameter: Organism Value: Zea mays
  misc_feature: MA Experiment 20000535 PARAMETER Experiment Name: Zm_Hybrid_Seed_Dev_P Parameter: Plant Line Value: 35A19
  misc_feature: MA Experiment 20000535 PARAMETER Experiment Name: Zm_Hybrid_Seed_Dev_P Parameter: Tissue Value: Embryo vs. Unfert Floret
  misc_feature: MA Experiment ID: 20001608 Result: Up-regulated in Transcription
  misc_feature: MA Experiment 20001608 PARAMETER Experiment Name: Zm_50ppm_KNO3_L-to-H_P Parameter: Age (day) Value: 21
  misc_feature: MA Experiment 20001608 PARAMETER Experiment Name: Zm_50ppm_KNO3_L-to-H_P Parameter: Organism Value: Zea mays
  misc_feature: MA Experiment 20001608 PARAMETER Experiment Name: Zm_50ppm_KNO3_L-to-H_P Parameter: Plant Line Value: 35A19
  misc_feature: MA Experiment 20001608 PARAMETER Experiment Name: Zm_50ppm_KNO3_L-to-H_P Parameter: Timepoint (hr) Value: 48
  misc_feature: MA Experiment 20001608 PARAMETER Experiment Name: Zm_50ppm_KNO3_L-to-H_P Parameter: Tissue Value: Shoots
  misc_feature: MA Experiment 20001608 PARAMETER Experiment Name: Zm_50ppm_KNO3_L-to-H_P Parameter: Treatment Value: 50ppm KNO3 vs. 50ppm KCl
  misc_feature: MA Experiment ID: 20001612 Result: Up-regulated in Transcription
  misc_feature: MA Experiment 20001612 PARAMETER Experiment Name: Zm_50ppm_KNO3_L-to-H_P Parameter: Age (day) Value: 19
  misc_feature: MA Experiment 20001612 PARAMETER Experiment Name: Zm_50ppm_KNO3_L-to-H_P Parameter: Organism Value: Zea mays
  misc_feature: MA Experiment 20001612 PARAMETER Experiment Name: Zm_50ppm_KNO3_L-to-H_P Parameter: Plant Line Value: 35A19
  misc_feature: MA Experiment 20001612 PARAMETER Experiment Name: Zm_50ppm_KNO3_L-to-H_P Parameter: Timepoint (hr) Value: 8
  misc_feature: MA Experiment 20001612 PARAMETER Experiment Name: Zm_50ppm_KNO3_L-to-H_P Parameter: Tissue Value: Roots
  misc_feature: MA Experiment 20001612 PARAMETER Experiment Name: Zm_50ppm_KNO3_L-to-H_P Parameter: Treatment Value: 50ppm KNO3 vs. 50ppm KCl
acacgacccacctaccccgccgccgccgccgccgcatccccctcgattccgtctggcgatcgagggctcccagacacatcacagatacaccacgccaagccaaatcgagcaacgtctatcatcatattataatttcccctcattcatctcacagtccctcccaggcctcccctccctcctcccccgtcgccaaccaacctccaacccccagccgatcgcgtcggagatgctgggcgtcgcgcggaggcggctcggatctggatgcgtgctcgcccagctggcgcaggccctccgccccgccgccgctcccgccaggacctactccgccgcggccaaggagataactgtacgggaagcattgaataccgcattagatgaagaaatgtcggcagacccttctgttttcttgatgggagaagaggttggcgagtaccaaggtccatacaagatatccaagggtttgcttgacaagtatggccccgatagggttctcgatactccgatcactgaggcgggcttcactggcattggtgttggtgccgcttaccatggtcttcgacctattgtagagttcatgacatttaacttttcgatgcaggcaattgatcacataattaattcagctgccaagtcgaactacatgtctgctgggcagatatctgttcctattgtctttaggggtccaaatggtgctgctgctggagttggtgcccaacactcacagtgctatgcagcttggtatgcacatgttcccggattgaaagttctagctccatattctgcagaagatgctcgaggtttgctgaaagcagcaatcagggatccagatcctgttgtgttccttgaaaatgaacttctttatggtgaatcatttcctgtatctgctgaggtacttgattctagcttctgccttccgattggaaaggctaagatagagcgacaagggaaagatgtcactatcactgcattctccaaaatggtgggatatgcccttcaggccgctgatatactggccaaggaaggtatcagtgccgaggtaatcaatcttcgctcaattagaccgctggatagagctactattaatgcatctgtgaggaaaaccaatagattggtaaccgtagaagaaggcttccctcaacatgggattggtgcggaaatatgcatgtctgttgtagaggacagctttgagtatcttgatgcaccagtcgagaggattgctggagctgatgtgcccatgccgtacgctgccaaccttgagaggatggctgttccacaggtcgatgacatcgtccgggcagccaagcgtgcttgctacagggcagcagtaccgatggcagcaaccgcctagtccagcagaaccctgcatgttgcatttctttgtctaattttaatgtccgtgctgcagaaagacgtgtcacataatggtgtgacgagtacccactgccgctgcaactcaactatagcatgagctgagtttttgtagagccaccgagaggtgttcagtactccagttccagttccgcttatcttcgccgccgcagccgaaggctgcgcatgactctgcgtctgttttatggttcacgaatgattgcagatttgc

SEQ ID NO: 6058 - protein, 448 aa, Zea mays subsp. mays
  peptide (1)..(448): Ceres Seq. ID no. 12344157
  misc_feature (307)..(429): Pfam Name: Transketolase, C-terminal domain Pfam Description: Transketolase, C-terminal domain
  misc_feature (76)..(448): Homolog of NCBI NO: 3850999 NR Description: pyruvate dehydrogenase E1 beta subunit isoform 1
  misc_feature (76)..(448): Homolog of NCBI NO: 38175533 NR Description: putative pyruvate dehydrogenase E1 beta subunit
  misc_feature (76)..(448): Homolog of NCBI NO: 3851001 NR Description: pyruvate dehydrogenase E1 beta subunit isoform 2
  misc_feature (76)..(448): Homolog of NCBI NO: 3851003 NR Description: pyruvate dehydrogenase E1 beta subunit isoform 3
  misc_feature (76)..(440): Homolog of NCBI NO: 15241286 NR Description: pyruvate dehydrogenase E1 component beta subunit,
  misc_feature (76)..(440): Homolog of NCBI NO: 520478 NR Description: pyruvate dehydrogenase E1 beta subunit
  misc_feature (95)..(448): Homolog of NCBI NO: 1709454 NR Description: Pyruvate dehydrogenase E1 component beta subunit,
  misc_feature (114)..(440): Homolog of NCBI NO: 22968973 NR Description: hypothetical protein [Rhodospirillum rubrum]
  misc_feature (90)..(432): Homolog of NCBI NO: 21358145 NR Description: CG11876-PD [Drosophila melanogaster]
  misc_feature (90)..(432): Homolog of NCBI NO: 25012844 NR Description: RH05604p [Drosophila melanogaster]
HDPPTPPPPPPHPPRFRLAIEGSQTHHRYTTPSQIEQRLSSYYNFPSFISQSLPGLPSLLPRRQPTSNPQPIASEMLGVARRRLGSGCVLAQLAQALRPAAAPARTYSAAAKEITVREALNTALDEEMSADPSVFLMGEEVGEYQGPYKISKGLLDKYGPDRVLDTPITEAGFTGIGVGAAYHGLRPIVEFMTFNFSMQAIDHIINSAAKSNYMSAGQISVPIVFRGPNGAAAGVGAQHSQCYAAWYAHVPGLKVLAPYSAEDARGLLKAAIRDPDPVVFLENELLYGESFPVSAEVLDSSFCLPIGKAKIERQGKDVTITAFSKMVGYALQAADILAKEGISAEVINLRSIRPLDRATINASVRKTNRLVTVEEGFPQHGIGAEICMSVVEDSFEYLDAPVERIAGADVPMPYAANLERMAVPQVDDIVRAAKRACYRAAVPMAATA

SEQ ID NO: 6059 - protein, 373 aa, Zea mays subsp. mays
  peptide (1)..(373): Ceres Seq. ID no. 12344158
  misc_feature (232)..(354): Pfam Name: Transketolase, C-terminal domain Pfam Description: Transketolase, C-terminal domain
  misc_feature (39)..(365): Homolog of NCBI NO: 22968973 NR Description: hypothetical protein [Rhodospirillum rubrum]
  misc_feature (15)..(357): Homolog of NCBI NO: 21358145 NR Description: CG11876-PD [Drosophila melanogaster]
  misc_feature (1)..(373): Homolog of NCBI NO: 38175533 NR Description: putative pyruvate dehydrogenase E1 beta subunit
  misc_feature (1)..(373): Homolog of NCBI NO: 3851003 NR Description: pyruvate dehydrogenase E1 beta subunit isoform 3
  misc_feature (1)..(365): Homolog of NCBI NO: 520478 NR Description: pyruvate dehydrogenase E1 beta subunit
  misc_feature (20)..(373): Homolog of NCBI NO: 1709454 NR Description: Pyruvate dehydrogenase E1 component beta subunit,
  misc_feature (1)..(365): Homolog of NCBI NO: 15241286 NR Description: pyruvate dehydrogenase E1 component beta subunit,
  misc_feature (1)..(373): Homolog of NCBI NO: 3851001 NR Description: pyruvate dehydrogenase E1 beta subunit isoform 2
  misc_feature (1)..(373): Homolog of NCBI NO: 3850999 NR Description: pyruvate dehydrogenase E1 beta subunit isoform 1
  misc_feature (15)..(357): Homolog of NCBI NO: 25012844 NR Description: RH05604p [Drosophila melanogaster]
MLGVARRRLGSGCVLAQLAQALRPAAAPARTYSAAAKEITVREALNTALDEEMSADPSVFLMGEEVGEYQGPYKISKGLLDKYGPDRVLDTPITEAGFTGIGVGAAYHGLRPIVEFMTFNFSMQAIDHIINSAAKSNYMSAGQISVPIVFRGPNGAAAGVGAQHSQCYAAWYAHVPGLKVLAPYSAEDARGLLKAAIRDPDPVVFLENELLYGESFPVSAEVLDSSFCLPIGKAKIERQGKDVTITAFSKMVGYALQAADILAKEGISAEVINLRSIRPLDRATINASVRKTNRLVTVEEGFPQHGIGAEICMSVVEDSFEYLDAPVERIAGADVPMPYAANLERMAVPQVDDIVRAAKRACYRAAVPMAATA

SEQ ID NO: 6060 - protein, 321 aa, Zea mays subsp. mays
  peptide (1)..(321): Ceres Seq. ID no. 12344159
  misc_feature (180)..(302): Pfam Name: Transketolase, C-terminal domain Pfam Description: Transketolase, C-terminal domain
  misc_feature (1)..(321): Homolog of NCBI NO: 3850999 NR Description: pyruvate dehydrogenase E1 beta subunit isoform 1
  misc_feature (1)..(321): Homolog of NCBI NO: 38175533 NR Description: putative pyruvate dehydrogenase E1 beta subunit
  misc_feature (1)..(321): Homolog of NCBI NO: 3851001 NR Description: pyruvate dehydrogenase E1 beta subunit isoform 2
  misc_feature (1)..(321): Homolog of NCBI NO: 3851003 NR Description: pyruvate dehydrogenase E1 beta subunit isoform 3
  misc_feature (1)..(313): Homolog of NCBI NO: 15241286 NR Description: pyruvate dehydrogenase E1 component beta subunit,
  misc_feature (1)..(313): Homolog of NCBI NO: 520478 NR Description: pyruvate dehydrogenase E1 beta subunit
  misc_feature (1)..(321): Homolog of NCBI NO: 1709454 NR Description: Pyruvate dehydrogenase E1 component beta subunit,
  misc_feature (1)..(313): Homolog of NCBI NO: 22968973 NR Description: hypothetical protein [Rhodospirillum rubrum]
  misc_feature (1)..(305): Homolog of NCBI NO: 21358145 NR Description: CG11876-PD [Drosophila melanogaster]
  misc_feature (1)..(305): Homolog of NCBI NO: 25012844 NR Description: RH05604p [Drosophila melanogaster]
MSADPSVFLMGEEVGEYQGPYKISKGLLDKYGPDRVLDTPITEAGFTGIGVGAAYHGLRPIVEFMTFNFSMQAIDHIINSAAKSNYMSAGQISVPIVFRGPNGAAAGVGAQHSQCYAAWYAHVPGLKVLAPYSAEDARGLLKAAIRDPDPVVFLENELLYGESFPVSAEVLDSSFCLPIGKAKIERQGKDVTITAFSKMVGYALQAADILAKEGISAEVINLRSIRPLDRATINASVRKTNRLVTVEEGFPQHGIGAEICMSVVEDSFEYLDAPVERIAGADVPMPYAANLERMAVPQVDDIVRAAKRACYRAAVPMAATA

SEQ ID NO: 6061 - DNA, 1253 bp, Zea mays subsp. mays
  misc_feature (1)..(1253): Ceres Seq. ID no. 12409239
  misc_feature: MA Experiment ID: 108522 Result: Down-regulated in Transcription
  misc_feature: MA Experiment 108522 PARAMETER Experiment Name: Zm_42deg_Heat_P Parameter: Age (day) Value: 8
  misc_feature: MA Experiment 108522 PARAMETER Experiment Name: Zm_42deg_Heat_P Parameter: Organism Value: Zea mays
  misc_feature: MA Experiment 108522 PARAMETER Experiment Name: Zm_42deg_Heat_P Parameter: Plant Line Value: 35A19
  misc_feature: MA Experiment 108522 PARAMETER Experiment Name: Zm_42deg_Heat_P Parameter: Temperature (deg C) Value: 42 vs. 22
  misc_feature: MA Experiment 108522 PARAMETER Experiment Name: Zm_42deg_Heat_P Parameter: Timepoint (hr) Value: 1
  misc_feature: MA Experiment 108522 PARAMETER Experiment Name: Zm_42deg_Heat_P Parameter: Tissue Value: Aerial
  misc_feature: MA Experiment ID: 20000492 Result: Up-regulated in Transcription
  misc_feature: MA Experiment 20000492 PARAMETER Experiment Name: Zm_Hybrid_Seed_Dev_P Parameter: DAP Value: 12
  misc_feature: MA Experiment 20000492 PARAMETER Experiment Name: Zm_Hybrid_Seed_Dev_P Parameter: Organism Value: Zea mays
  misc_feature: MA Experiment 20000492 PARAMETER Experiment Name: Zm_Hybrid_Seed_Dev_P Parameter: Plant Line Value: 35A19
  misc_feature: MA Experiment 20000492 PARAMETER Experiment Name: Zm_Hybrid_Seed_Dev_P Parameter: Tissue Value: Fert Kernel vs. Unfert Floret
ataaacgagaacccagccgctgagtagacttgtgttttcgcttccccttccccatcccctctcctcccctcgccggcttgtcggtctcgccgcgccactggccatacatccaagacgctaatccgtgtgggggaaaagcccccctctctctgaaactattcaaatggcgtggggcgtatccccgcggcggcagccgtcgttcccggtgcaggccctctacgagctctgcaagcgctccttcccctccccttccgccgcctcatcgtctcccccgcccgctgatgtcgtccgcagcatctcctcgctcatggatacaatcactcctgcggatgttgggctcagagattataatcttgaggacgacagggggcatggattttttgactccaacctcctcaagggttcaggaaggcttcctcggtgggcgcggcccatcaagtaccttcatatctacagctgtgatgcattctctattggaatattctgcttgccaacttcatcagtcattcctcttcatgatcatccaggaatgactgtactgagcaaaatcctttatggttccatgcatgtgaaatcatatgattggatagagcctactgtcctagcaagtagccagccagcaaggttggccaaattacatacagatgatgttcgtactgctccatgtccaacctccattttgtatccccaaagtggtgggaacctgcactgcttcacttcagtatcttcttgtgctgttcttgatgtccttgccccaccatataacgatgacgctggtcggatttgcacttattttcatgactatccattttcaagtctctcagcagctggacgcacgaaggtagctggtaacccagataattatgcatggctggaggccataaacactccagtgaatatcaacatgcacactggcatgtataccggtccaactgtacaggaacttcagacatgatgtaaagatgaaccggagcatcaagcagcagctgggtgcctcttcactgatagtagagctctaatatagtgatgtatgttctatactttgaggttagcttttcccctctggccccctttgttggagaaactgttgtacttcagttaagagataagttttcagagtaatttctcctaatcagtttagtagaggtttcaggttcactaacctgagcagtgatcaggcttttagcttatttatttatgtttgtgcaacgctggaatggttttgaatgcaaaattgtcactgatgttgccgc

SEQ ID NO: 6062 - protein, 263 aa, Zea mays subsp. mays
  peptide (1)..(263): Ceres Seq. ID no. 12409240
  misc_feature (5)..(259): Homolog of NCBI NO: 18394617 NR Description: expressed protein; protein id: At1g18490.1,
  misc_feature (5)..(259): Homolog of NCBI NO: 21618020 NR Description: unknown [Arabidopsis thaliana]
  misc_feature (5)..(259): Homolog of NCBI NO: 25402861 NR Description: protein F15H18.4 [imported] - Arabidopsis >gi|6714305|gb|AAF26001.1|AC013354_20 F15H18.4 [Arabidopsis
  misc_feature (42)..(259): Homolog of NCBI NO: 15451150 NR Description: Unknown protein [Arabidopsis thaliana]
  misc_feature (4)..(258): Homolog of NCBI NO: 34906308 NR Description: unnamed protein product [Oryza sativa (japonica group)] >gi|9558428|dbj|BAB03364.1| unnamed protein product
  misc_feature (33)..(260): Homolog of NCBI NO: 10176982 NR Description: contains similarity to unknown
  misc_feature (33)..(260): Homolog of NCBI NO: 15242505 NR Description: putative protein; protein id: At5g39890.1, by cDNA: 100590. [Arabidopsis thaliana] unknown [Arabidopsis thaliana] >gi|27808558|gb|AAO24559.1|
  misc_feature (11)..(259): Homolog of NCBI NO: 18406030 NR Description: expressed protein; protein id: At2g42670.1, by cDNA: 113423. [Arabidopsis thaliana] expressed protein [Arabidopsis thaliana]
  misc_feature (11)..(259): Homolog of NCBI NO: 25370572 NR Description: hypothetical protein At2g42670 [imported] -
  misc_feature (1)..(260): Homolog of NCBI NO: 15242218 NR Description: putative protein; protein id: At5g15120.1
MAWGVSPRRQPSFPVQALYELCKRSFPSPSAASSSPPPADVVRSISSLMDTITPADVGLRDYNLEDDRGHGFFDSNLLKGSGRLPRWARPIKYLHIYSCDAFSIGIFCLPTSSVIPLHDHPGMTVLSKILYGSMHVKSYDWIEPTVLASSQPARLAKLHTDDVRTAPCPTSILYPQSGGNLHCFTSVSSCAVLDVLAPPYNDDAGRICTYFHDYPFSSLSAAGRTKVAGNPDNYAWLEAINTPVNINMHTGMYTGPTVQELQT

SEQ ID NO: 6063 - protein, 215 aa, Zea mays subsp. mays
  peptide (1)..(215): Ceres Seq. ID no. 12409241
  misc_feature (1)..(211): Homolog of NCBI NO: 18394617 NR Description: expressed protein; protein id: At1g18490.1,
  misc_feature (1)..(211): Homolog of NCBI NO: 21618020 NR Description: unknown [Arabidopsis thaliana]
  misc_feature (1)..(211): Homolog of NCBI NO: 25402861 NR Description: protein F15H18.4 [imported] - Arabidopsis >gi|6714305|gb|AAF26001.1|AC013354_20 F15H18.4 [Arabidopsis
  misc_feature (1)..(211): Homolog of NCBI NO: 15451150 NR Description: Unknown protein [Arabidopsis thaliana]
  misc_feature (1)..(210): Homolog of NCBI NO: 34906308 NR Description: unnamed protein product [Oryza sativa (japonica group)] >gi|9558428|dbj|BAB03364.1| unnamed protein product
  misc_feature (1)..(212): Homolog of NCBI NO: 10176982 NR Description: contains similarity to unknown
  misc_feature (1)..(212): Homolog of NCBI NO: 15242505 NR Description: putative protein; protein id: At5g39890.1, by cDNA: 100590. [Arabidopsis thaliana] unknown [Arabidopsis thaliana] >gi|27808558|gb|AAO24559.1|
  misc_feature (1)..(211): Homolog of NCBI NO: 18406030 NR Description: expressed protein; protein id: At2g42670.1, by cDNA: 113423. [Arabidopsis thaliana] expressed protein [Arabidopsis thaliana]
  misc_feature (1)..(211): Homolog of NCBI NO: 25370572 NR Description: hypothetical protein At2g42670 [imported] -
  misc_feature (1)..(212): Homolog of NCBI NO: 15242218 NR Description: putative protein; protein id: At5g15120.1
MDTITPADVGLRDYNLEDDRGHGFFDSNLLKGSGRLPRWARPIKYLHIYSCDAFSIGIFCLPTSSVIPLHDHPGMTVLSKILYGSMHVKSYDWIEPTVLASSQPARLAKLHTDDVRTAPCPTSILYPQSGGNLHCFTSVSSCAVLDVLAPPYNDDAGRICTYFHDYPFSSLSAAGRTKVAGNPDNYAWLEAINTPVNINMHTGMYTGPTVQELQT

SEQ ID NO: 6064 - protein, 141 aa, Zea mays subsp. mays
  peptide (1)..(141): Ceres Seq. ID no. 12409242
  misc_feature (1)..(137): Homolog of NCBI NO: 18394617 NR Description: expressed protein; protein id: At1g18490.1,
  misc_feature (1)..(137): Homolog of NCBI NO: 21618020 NR Description: unknown [Arabidopsis thaliana]
  misc_feature (1)..(137): Homolog of NCBI NO: 25402861 NR Description: protein F15H18.4 [imported] - Arabidopsis >gi|6714305|gb|AAF26001.1|AC013354_20 F15H18.4 [Arabidopsis
  misc_feature (1)..(137): Homolog of NCBI NO: 15451150 NR Description: Unknown protein [Arabidopsis thaliana]
  misc_feature (1)..(136): Homolog of NCBI NO: 34906308 NR Description: unnamed protein product [Oryza sativa (japonica group)] >gi|9558428|dbj|BAB03364.1| unnamed protein product
  misc_feature (1)..(138): Homolog of NCBI NO: 10176982 NR Description: contains similarity to unknown
  misc_feature (1)..(138): Homolog of NCBI NO: 15242505 NR Description: putative protein; protein id: At5g39890.1, by cDNA: 100590. [Arabidopsis thaliana] unknown [Arabidopsis thaliana] >gi|27808558|gb|AAO24559.1|
  misc_feature (1)..(137): Homolog of NCBI NO: 18406030 NR Description: expressed protein; protein id: At2g42670.1, by cDNA: 113423. [Arabidopsis thaliana] expressed protein [Arabidopsis thaliana]
  misc_feature (1)..(137): Homolog of NCBI NO: 25370572 NR Description: hypothetical protein At2g42670 [imported] -
  misc_feature (1)..(138): Homolog of NCBI NO: 15242218 NR Description: putative protein; protein id: At5g15120.1
MTVLSKILYGSMHVKSYDWIEPTVLASSQPARLAKLHTDDVRTAPCPTSILYPQSGGNLHCFTSVSSCAVLDVLAPPYNDDAGRICTYFHDYPFSSLSAAGRTKVAGNPDNYAWLEAINTPVNINMHTGMYTGPTVQELQT

SEQ ID NO: 6065 - DNA, 2015 bp, Zea mays subsp. mays
  misc_feature (1)..(2015): Ceres Seq. ID no. 12594596
  misc_feature: MA Experiment ID: 108535 Result: Up-regulated in Transcription
  misc_feature: MA Experiment 108535 PARAMETER Experiment Name: Zm_Meristem_P Parameter: Age (day) Value: 8
  misc_feature: MA Experiment 108535 PARAMETER Experiment Name: Zm_Meristem_P Parameter: Organism Value: Zea mays
  misc_feature: MA Experiment 108535 PARAMETER Experiment Name: Zm_Meristem_P Parameter: Plant Line Value: 35A19
  misc_feature: MA Experiment 108535 PARAMETER Experiment Name: Zm_Meristem_P Parameter: Tissue Value: Root Meristem vs. Above Root Meristem
  misc_feature: MA Experiment ID: 108544 Result: Down-regulated in Transcription
  misc_feature: MA Experiment ID: 20000108 Result: Up-regulated in Transcription
  misc_feature: MA Experiment 20000108 PARAMETER Experiment Name: Zm_Root-Tips_P Parameter: Age (day) Value: 12
  misc_feature: MA Experiment 20000108 PARAMETER Experiment Name: Zm_Root-Tips_P Parameter: Organism Value: Zea mays
  misc_feature: MA Experiment 20000108 PARAMETER Experiment Name: Zm_Root-Tips_P Parameter: Tissue Value: Root tips vs. Root mid region    35
  misc_feature: MA Experiment 20000108 PARAMETER Experiment Name: Zm_Root-Tips_P Parameter: Tissue Value: Root tips vs. Root mid region   Sequence Listing-Misc Features (4)
aacaagtcatatgcacaaaatctcatttgagcgtgcaagctccttcgcctcgaaccctctcgcgcttggctttctttcactctccagggctccactcccatctcgccgccgcagccatggcgatcacagcgccaactcccgacatcctcggcgagcgccaatccggccaggacgtccgcacgcagaacgtgatggcttgcggggcggtggccaacatcgtcaaatcctcgctcggccccgtcggtctcgacaagatgctagtggacgatattggtgatgttacaatcacaaatgatggagcaaccatacttaagatgttggaagttgagcatccagccgccaaggttcttgttgagttggctgagctccaagaccgtgaggtaggagatggaactacttccgttgtcatcatagcggcagagttactcaagagaggcaatgatcttgtgaagaataagatccatccaacctctataatcagtggctacaggcttgctatgcgtgaagcctgcaaatatgttgaggaaaagttagcagtcaaggttgacaaacttggaaaagaatcccttatcaactctgcaaaaactagcatgtcttcgaaattgattaatagtgacagtgatttctttgcaactttggttgttgaggcagttcaagccgtgaagactacaaatgccaagggagacgtgaaatatccaatcaagagcatcaatattttgaaagctcatggtaaaagcgccaaggatagttatctgttgaatggctatgcactaaacacaggccgtgcagctcaaggaatgcctacgagagtaactcctgctagaattgcttgtcttgattttaaccttcagaagacaaaaatgcaacttggtgtccaagttcttgtaactgatccaagggaacttgagaagattcgtcagagagaatctgacataacaaaggagcgaattgagaaaattctcaaggctggagctaatgttgtgttgaccaccaagggaattgacgatatgtccttgaagtactttgttgaggctggtgcgattgcagtaaggcgtgtgcgcaaggaagatctgcgacatgttgccaaagccactggtgcaactatggtgtctacttttgcggacatggaaggtgaagaaacattcgattcatcattccttggccatgctgatgaagttgtggaggaaagaattgctgacgatgatgttattctggtgaaaggcacaaagaacaccagcgcggtctctataatacttaggggcgcaaatgactacatgcttgatgagattgaacggtccttgcatgatgccctgtgcattgtgaagagaaccctggaatcaaatatggttgttgctgggggtggtgcagttgaagctgcgttgtcagtttatctggagaaccttgcaacaaccctgggttctcgggaacaattggcaattgctgaatttgctgagtctttgttaatcataccaaaggtactatctgttaatgctgcaaaagatgcaactgagcttgtagcaaagcttagggcatatcatcatactgctcaaacaaaggccgacaagcaacattattcaagtatgggccttgacctctctaagggtatcattcgcaacaaccttgagtatggcgtgatagagccatcgatgagcaaagtaaagatcattcagtttgccacggaggctgccattactatcctgaggattgacgacatgatcaagcttaccaaggaagaagagggtaacgaagagtaagcagcccaccagtagtgggctagtggactcccatgggatggttgccatagcatgtagcacttgttttttcacttatcgtttacttttgcttgctgtgagcattcgtttgtaggaaaagtgagaacggatgtgtatcaatccgtgctgggtgacgatgactcacggatggatcaaatctttgcgtatattggggccaaaacagttctatctgacggatttaagttggaaaatgaaatggtttcgtgtagtgattatttgatt

SEQ ID NO: 6066 - protein, 583 aa, Zea mays subsp. mays
  peptide (1)..(583): Ceres Seq. ID no. 12594597
  misc_feature (69)..(576): Pfam Name: TCP-1/cpn60 chaperonin family Pfam Description: TCP-1/cpn60 chaperonin family
  misc_feature (39)..(583): Homolog of NCBI NO: 24371053 NR Description: t-complex polypeptide 1 [Bruguiera sexangula]
  misc_feature (39)..(583): Homolog of NCBI NO: 25083339 NR Description: t-complex polypeptide 1 homologue [Arabidopsis
  misc_feature (39)..(583): Homolog of NCBI NO: 15231024 NR Description: t-complex polypeptide 1 homologue; protein id:
  misc_feature (39)..(583): Homolog of NCBI NO: 9293959 NR Description: chaperonin, t-complex protein alpha subunit
  misc_feature (40)..(580): Homolog of NCBI NO: 13959582 NR Description: T-complex protein 1, alpha subunit (TCP-1-alpha)
  misc_feature (48)..(582): Homolog of NCBI NO: 13959583 NR Description: T-complex protein 1, alpha subunit (TCP-1-alpha)
  misc_feature (48)..(583): Homolog of NCBI NO: 135536 NR Description: T-COMPLEX PROTEIN 1, ALPHA SUBUNIT (TCP-1-ALPHA)
  misc_feature (48)..(583): Homolog of NCBI NO: 135538 NR Description: T-complex protein 1, alpha subunit (TCP-1-alpha)
  misc_feature (48)..(583): Homolog of NCBI NO: 13540473 NR Description: t-complex 1; T-complex locus TCP-1; t-complex 1
  misc_feature (34)..(578): Homolog of NCBI NO: 17532601 NR Description: Chaperonin Containing TCP-1 CCT-1 (58.8 kD)
QVICTKSHLSVQAPSPRTLSRLAFFHSPGLHSHLAAAAMAITAPTPDILGERQSGQDVRTQNVMACGAVANIVKSSLGPVGLDKMLVDDIGDVTITNDGATILKMLEVEHPAAKVLVELAELQDREVGDGTTSVVIIAAELLKRGNDLVKNKIHPTSIISGYRLAMREACKYVEEKLAVKVDKLGKESLINSAKTSMSSKLINSDSDFFATLVVEAVQAVKTTNAKGDVKYPIKSINILKAHGKSAKDSYLLNGYALNTGRAAQGMPTRVTPARIACLDFNLQKTKMQLGVQVLVTDPRELEKIRQRESDITKERIEKILKAGANVVLTTKGIDDMSLKYFVEAGAIAVRRVRKEDLRHVAKATGATMVSTFADMEGEETFDSSFLGHADEVVEERIADDDVILVKGTKNTSAVSIILRGANDYMLDEIERSLHDALCIVKRTLESNMVVAGGGAVEAALSVYLENLATTLGSREQLAIAEFAESLLIIPKVLSVNAAKDATELVAKLRAYHHTAQTKADKQHYSSMGLDLSKGIIRNNLEYGVIEPSMSKVKIIQFATEAAITILRIDDMIKLTKEEEGNEE

SEQ ID NO: 6067 - protein, 545 aa, Zea mays subsp. mays
  peptide (1)..(545): Ceres Seq. ID no. 12594598
  misc_feature (31)..(538): Pfam Name: TCP-1/cpn60 chaperonin family Pfam Description: TCP-1/cpn60 chaperonin family
  misc_feature (1)..(545): Homolog of NCBI NO: 24371053 NR Description: t-complex polypeptide 1 [Bruguiera sexangula]
  misc_feature (1)..(545): Homolog of NCBI NO: 25083339 NR Description: t-complex polypeptide 1 homologue [Arabidopsis
  misc_feature (1)..(545): Homolog of NCBI NO: 15231024 NR Description: t-complex polypeptide 1 homologue; protein id:
  misc_feature (1)..(545): Homolog of NCBI NO: 9293959 NR Description: chaperonin, t-complex protein alpha subunit
  misc_feature (2)..(542): Homolog of NCBI NO: 13959582 NR Description: T-complex protein 1, alpha subunit (TCP-1-alpha)
  misc_feature (10)..(544): Homolog of NCBI NO: 13959583 NR Description: T-complex protein 1, alpha subunit (TCP-1-alpha)
  misc_feature (10)..(545): Homolog of NCBI NO: 135536 NR Description: T-COMPLEX PROTEIN 1, ALPHA SUBUNIT (TCP-1-ALPHA)
  misc_feature (10)..(545): Homolog of NCBI NO: 135538 NR Description: T-complex protein 1, alpha subunit (TCP-1-alpha)
  misc_feature (10)..(545): Homolog of NCBI NO: 13540473 NR Description: t-complex 1; T-complex locus TCP-1; t-complex 1
  misc_feature (1)..(540): Homolog of NCBI NO: 17532601 NR Description: Chaperonin Containing TCP-1 CCT-1 (58.8 kD)
MAITAPTPDILGERQSGQDVRTQNVMACGAVANIVKSSLGPVGLDKMLVDDIGDVTITNDGATILKMLEVEHPAAKVLVELAELQDREVGDGTTSVVIIAAELLKRGNDLVKNKIHPTSIISGYRLAMREACKYVEEKLAVKVDKLGKESLINSAKTSMSSKLINSDSDFFATLVVEAVQAVKTTNAKGDVKYPIKSINILKAHGKSAKDSYLLNGYALNTGRAAQGMPTRVTPARIACLDFNLQKTKMQLGVQVLVTDPRELEKIRQRESDITKERIEKILKAGANVVLTTKGIDDMSLKYFVEAGAIAVRRVRKEDLRHVAKATGATMVSTFADMEGEETFDSSFLGHADEVVEERIADDDVILVKGTKNTSAVSIILRGANDYMLDEIERSLHDALCIVKRTLESNMVVAGGGAVEAALSVYLENLATTLGSREQLAIAEFAESLLIIPKVLSVNAAKDATELVAKLRAYHHTAQTKADKQHYSSMGLDLSKGIIRNNLEYGVIEPSMSKVKIIQFATEAAITILRIDDMIKLTKEEEGNEE

SEQ ID NO: 6068 - protein, 520 aa, Zea mays subsp. mays
  peptide (1)..(520): Ceres Seq. ID no. 12594599
  misc_feature (6)..(513): Pfam Name: TCP-1/cpn60 chaperonin family Pfam Description: TCP-1/cpn60 chaperonin family
  misc_feature (1)..(520): Homolog of NCBI NO: 24371053 NR Description: t-complex polypeptide 1 [Bruguiera sexangula]
  misc_feature (1)..(520): Homolog of NCBI NO: 25083339 NR Description: t-complex polypeptide 1 homologue [Arabidopsis
  misc_feature (1)..(520): Homolog of NCBI NO: 15231024 NR Description: t-complex polypeptide 1 homologue; protein id:
  misc_feature (1)..(520): Homolog of NCBI NO: 9293959 NR Description: chaperonin, t-complex protein alpha subunit
  misc_feature (1)..(517): Homolog of NCBI NO: 13959582 NR Description: T-complex protein 1, alpha subunit (TCP-1-alpha)
  misc_feature (1)..(519): Homolog of NCBI NO: 13959583 NR Description: T-complex protein 1, alpha subunit (TCP-1-alpha)
  misc_feature (1)..(520): Homolog of NCBI NO: 135536 NR Description: T-COMPLEX PROTEIN 1, ALPHA SUBUNIT (TCP-1-ALPHA)
  misc_feature (1)..(520): Homolog of NCBI NO: 135538 NR Description: T-complex protein 1, alpha subunit (TCP-1-alpha)
  misc_feature (1)..(520): Homolog of NCBI NO: 13540473 NR Description: t-complex 1; T-complex locus TCP-1; t-complex 1
  misc_feature (1)..(515): Homolog of NCBI NO: 17532601 NR Description: Chaperonin Containing TCP-1 CCT-1 (58.8 kD)
MACGAVANIVKSSLGPVGLDKMLVDDIGDVTITNDGATILKMLEVEHPAAKVLVELAELQDREVGDGTTSVVIIAAELLKRGNDLVKNKIHPTSIISGYRLAMREACKYVEEKLAVKVDKLGKESLINSAKTSMSSKLINSDSDFFATLVVEAVQAVKTTNAKGDVKYPIKSINILKAHGKSAKDSYLLNGYALNTGRAAQGMPTRVTPARIACLDFNLQKTKMQLGVQVLVTDPRELEKIRQRESDITKERIEKILKAGANVVLTTKGIDDMSLKYFVEAGAIAVRRVRKEDLRHVAKATGATMVSTFADMEGEETFDSSFLGHADEVVEERIADDDVILVKGTKNTSAVSIILRGANDYMLDEIERSLHDALCIVKRTLESNMVVAGGGAVEAALSVYLENLATTLGSREQLAIAEFAESLLIIPKVLSVNAAKDATELVAKLRAYHHTAQTKADKQHYSSMGLDLSKGIIRNNLEYGVIEPSMSKVKIIQFATEAAITILRIDDMIKLTKEEEGNEE

SEQ ID NO: 6069 - DNA, 1550 bp, Zea mays subsp. mays
  misc_feature (1)..(1550): Ceres Seq. ID no. 12406892
  misc_feature: MA Experiment ID: 108535 Result: Down-regulated in Transcription
  misc_feature: MA Experiment 108535 PARAMETER Experiment Name: Zm_Meristem_P Parameter: Age (day) Value: 8
  misc_feature: MA Experiment 108535 PARAMETER Experiment Name: Zm_Meristem_P Parameter: Organism Value: Zea mays
  misc_feature: MA Experiment 108535 PARAMETER Experiment Name: Zm_Meristem_P Parameter: Plant Line Value: 35A19
  misc_feature: MA Experiment 108535 PARAMETER Experiment Name: Zm_Meristem_P Parameter: Tissue Value: Root Meristem vs. Above Root Meristem
  misc_feature: MA Experiment ID: 108544 Result: Up-regulated in Transcription
  misc_feature: MA Experiment ID: 20000478 Result: Up-regulated in Transcription
  misc_feature: MA Experiment 20000478 PARAMETER Experiment Name: Zm_5mM_SA_P Parameter: Age (day) Value: 11
  misc_feature: MA Experiment 20000478 PARAMETER Experiment Name: Zm_5mM_SA_P Parameter: Organism Value: Zea mays
  misc_feature: MA Experiment 20000478 PARAMETER Experiment Name: Zm_5mM_SA_P Parameter: Plant Line Value: 35A19
  misc_feature: MA Experiment 20000478 PARAMETER Experiment Name: Zm_5mM_SA_P Parameter: Timepoint (hr) Value: 72
  misc_feature: MA Experiment 20000478 PARAMETER Experiment Name: Zm_5mM_SA_P Parameter: Tissue Value: Aerial
  misc_feature: MA Experiment 20000478 PARAMETER Experiment Name: Zm_5mM_SA_P Parameter: Treatment Value: 5mM SA vs. No Treatment
  misc_feature: MA Experiment ID: 20000479 Result: Up-regulated in Transcription
  misc_feature: MA Experiment 20000479 PARAMETER Experiment Name: Zm_Drought_P Parameter: Age (day) Value: 10
  misc_feature: MA Experiment 20000479 PARAMETER Experiment Name: Zm_Drought_P Parameter: Organism Value: Zea mays
  misc_feature: MA Experiment 20000479 PARAMETER Experiment Name: Zm_Drought_P Parameter: Plant Line Value: 35A19
  misc_feature: MA Experiment 20000479 PARAMETER Experiment Name: Zm_Drought_P Parameter: Timepoint (hr) Value: 48
  misc_feature: MA Experiment 20000479 PARAMETER Experiment Name: Zm_Drought_P Parameter: Tissue Value: Aerial
  misc_feature: MA Experiment 20000479 PARAMETER Experiment Name: Zm_Drought_P Parameter: Treatment Value: Drought vs. No Drought
  misc_feature: MA Experiment ID: 20000492 Result: Up-regulated in Transcription
  misc_feature: MA Experiment 20000492 PARAMETER Experiment Name: Zm_Hybrid_Seed_Dev_P Parameter: DAP Value: 12
  misc_feature: MA Experiment 20000492 PARAMETER Experiment Name: Zm_Hybrid_Seed_Dev_P Parameter: Organism Value: Zea mays
  misc_feature: MA Experiment 20000492 PARAMETER Experiment Name: Zm_Hybrid_Seed_Dev_P Parameter: Plant Line Value: 35A19
  misc_feature: MA Experiment 20000492 PARAMETER Experiment Name: Zm_Hybrid_Seed_Dev_P Parameter: Tissue Value: Fert Kernel vs. Unfert Floret
aaaaaaacaaacccggctctctcacttgcttcaaggccgacgggctatctcactgatagtgataggaacagaacccgtgcatatttcagtcgtcgctcgcggagccgtggcgcatcgcgactcaggcactcaccgaccgcggatatggccccgccgccatggcctctccttgcgacttccctcctcctcatcctattccaccactcgcctcgcgccgcggtggcgtttccgccgtctctgggcgacggcctcctgggcgccgcccgcgcgccgggtttcgcggcttggctgcgcggctttcggcgccgcatccacgagcgccccgagctcgccttccaggaataccgcacgagcgagctcgtccgcgacgagctcgacgcgatcggggtgccgtacgtgtggcccgtcgcgcagacgggcgtcgtggcgaccatcgccggcggcagcgatggccccgtcgtcgcgctccgagccgacatggacgcgctacccttgcaggaattggtagactgggaacacaagagcaaggagaatggaaagatgcatgcttgtggacatgatgctcacacaacgatgcttcttggggcagctaaattgcttcatgctcggaaggatgatctgaagggtaccgtgaagcttgtcttccagccaggcgaagaaggctacggcggcgcttaccatgttctcagagaaggtgtcctggatgacgtgtctgccattttcggcttgcatgtggatccaggacttcccgtaggcaccgtttcttccaggccagggccgtttctagcagcagcaggtagatttctggtgacggtcactggaaaaggcggacatgctgcagggccacaggatgctgtggatcccattgttgcagcatcatctgccatcgtcagccttcagcttcttgttgcccgggaaattgatcccctccaggctgcagtggtttcggtcacgttcatgaaaggaggtgatgcttacaacgtaattccagagtcagcatccttcggcgggaccttcaggagcttgacaacagaaggcttttcgtatctcatgaagaggatcaaagagatcatagaaggtcatgccgccgtccaccgctgcaccgccgccgtcgacttcatgcaggagaagctccgcccgtacccagccaccgtgaacgacgaagggatgtaccgtcacgccagagaagtggcagaggccatgcttggacaggacaaggtgagtgtaggcgcccagatgatgggcgccgaggatttctccttctacgcggagaagtttgcaggggcgttcttcatgatcggagtccgcaacaagagcatggaggaggcgatgcatcctctccactccccgtacttcgtgatagatgaggacgtgctgcctgtaggagctgccttccactctgcagtagcgatggagtacctgaacaaatactcaacgacccggcaaactgagctgctgcgcattgagctgtgatagattattttgcttgtaataatggttacgaggccgaggtcatgttgcacaaaagaaagtttgcattgtgcccatag

SEQ ID NO: 6070 - protein, 490 aa, Zea mays subsp. mays
  peptide (1)..(490): Ceres Seq. ID no. 12406893
  misc_feature (94)..(475): Pfam Name: Peptidase family M20/M25/M40 Pfam Description: Peptidase family M20/M25/M40
  misc_feature (46)..(480): Homolog of NCBI NO: 34900780 NR Description: putative IAA amidohydrolase [Oryza sativa
  misc_feature (56)..(477): Homolog of NCBI NO: 34900782 NR Description: putative IAA amidohydrolase [Oryza sativa
  misc_feature (61)..(480): Homolog of NCBI NO: 34900784 NR Description: IAA amidohydrolase-like protein~contains ESTs
  misc_feature (79)..(476): Homolog of NCBI NO: 28376718 NR Description: putative IAA amidohydrolase [Oryza sativa
  misc_feature (79)..(481): Homolog of NCBI NO: 28376716 NR Description: putative IAA amidohydrolase [Oryza sativa
  misc_feature (79)..(485): Homolog of NCBI NO: 18129692 NR Description: IAA amidohydrolase [Arabidopsis suecica]
  misc_feature (79)..(485): Homolog of NCBI NO: 15233011 NR Description: IAA-amino acid hydrolase (ILR1); protein id: supported by cDNA: 259555., supported by cDNA: gi_15451119, by cDNA: gi_18652313, supported by cDNA: gi_20148340 acid
  misc_feature (79)..(485): Homolog of NCBI NO: 21554648 NR Description: IAA-amino acid hydrolase (ILR1) [Arabidopsis
  misc_feature (79)..(485): Homolog of NCBI NO: 887785 NR Description: ILR1
  misc_feature (50)..(476): Homolog of NCBI NO: 34910396 NR Description: putative IAA-Ala hydrolase [Oryza sativa
KKTNPALSLASRPTGYLTDSDRNRTRAYFSRRSRSRGASRLRHSPTADMAPPPWPLLATSLLLILFHHSPRAAVAFPPSLGDGLLGAARAPGFAAWLRGFRRRIHERPELAFQEYRTSELVRDELDAIGVPYVWPVAQTGVVATIAGGSDGPVVALRADMDALPLQELVDWEHKSKENGKMHACGHDAHTTMLLGAAKLLHARKDDLKGTVKLVFQPGEEGYGGAYHVLREGVLDDVSAIFGLHVDPGLPVGTVSSRPGPFLAAAGRFLVTVTGKGGHAAGPQDAVDPIVAASSAIVSLQLLVAREIDPLQAAVVSVTFMKGGDAYNVIPESASFGGTFRSLTTEGFSYLMKRIKEIIEGHAAVHRCTAAVDFMQEKLRPYPATVNDEGMYRHAREVAEAMLGQDKVSVGAQMMGAEDFSFYAEKFAGAFFMIGVRNKSMEEAMHPLHSPYFVIDEDVLPVGAAFHSAVAMEYLNKYSTTRQTELLRIEL

SEQ ID NO: 6071 - protein, 442 aa, Zea mays subsp. mays
  peptide (1)..(442): Ceres Seq. ID no. 12406894
  misc_feature (46)..(427): Pfam Name: Peptidase family M20/M25/M40 Pfam Description: Peptidase family M20/M25/M40
  misc_feature (1)..(432): Homolog of NCBI NO: 34900780 NR Description: putative IAA amidohydrolase [Oryza sativa
  misc_feature (8)..(429): Homolog of NCBI NO: 34900782 NR Description: putative IAA amidohydrolase [Oryza sativa
  misc_feature (13)..(432): Homolog of NCBI NO: 34900784 NR Description: IAA amidohydrolase-like protein~contains ESTs
  misc_feature (31)..(428): Homolog of NCBI NO: 28376718 NR Description: putative IAA amidohydrolase [Oryza sativa
  misc_feature (31)..(433): Homolog of NCBI NO: 28376716 NR Description: putative IAA amidohydrolase [Oryza sativa
  misc_feature (31)..(437): Homolog of NCBI NO: 18129692 NR Description: IAA amidohydrolase [Arabidopsis suecica]
  misc_feature (31)..(437): Homolog of NCBI NO: 15233011 NR Description: IAA-amino acid hydrolase (ILR1); protein id: supported by cDNA: 259555., supported by cDNA: gi_15451119, by cDNA: gi_18652313, supported by cDNA: gi_20148340 acid
  misc_feature (31)..(437): Homolog of NCBI NO: 21554648 NR Description: IAA-amino acid hydrolase (ILR1) [Arabidopsis
  misc_feature (31)..(437): Homolog of NCBI NO: 887785 NR Description: ILR1
  misc_feature (2)..(428): Homolog of NCBI NO: 34910396 NR Description: putative IAA-Ala hydrolase [Oryza sativa
MAPPPWPLLATSLLLILFHHSPRAAVAFPPSLGDGLLGAARAPGFAAWLRGFRRRIHERPELAFQEYRTSELVRDELDAIGVPYVWPVAQTGVVATIAGGSDGPVVALRADMDALPLQELVDWEHKSKENGKMHACGHDAHTTMLLGAAKLLHARKDDLKGTVKLVFQPGEEGYGGAYHVLREGVLDDVSAIFGLHVDPGLPVGTVSSRPGPFLAAAGRFLVTVTGKGGHAAGPQDAVDPIVAASSAIVSLQLLVAREIDPLQAAVVSVTFMKGGDAYNVIPESASFGGTFRSLTTEGFSYLMKRIKEIIEGHAAVHRCTAAVDFMQEKLRPYPATVNDEGMYRHAREVAEAMLGQDKVSVGAQMMGAEDFSFYAEKFAGAFFMIGVRNKSMEEAMHPLHSPYFVIDEDVLPVGAAFHSAVAMEYLNKYSTTRQTELLRIEL

SEQ ID NO: 6072 - protein, 331 aa, Zea mays subsp. mays
  peptide (1)..(331): Ceres Seq. ID no. 12406895
  misc_feature (1)..(316): Pfam Name: Peptidase family M20/M25/M40 Pfam Description: Peptidase family M20/M25/M40
  misc_feature (1)..(321): Homolog of NCBI NO: 34900780 NR Description: putative IAA amidohydrolase [Oryza sativa
  misc_feature (1)..(318): Homolog of NCBI NO: 34900782 NR Description: putative IAA amidohydrolase [Oryza sativa
  misc_feature (1)..(321): Homolog of NCBI NO: 34900784 NR Description: IAA amidohydrolase-like protein~contains ESTs
  misc_feature (1)..(317): Homolog of NCBI NO: 28376718 NR Description: putative IAA amidohydrolase [Oryza sativa
  misc_feature (1)..(322): Homolog of NCBI NO: 28376716 NR Description: putative IAA amidohydrolase [Oryza sativa
  misc_feature (1)..(326): Homolog of NCBI NO: 18129692 NR Description: IAA amidohydrolase [Arabidopsis suecica]
  misc_feature (1)..(326): Homolog of NCBI NO: 15233011 NR Description: IAA-amino acid hydrolase (ILR1); protein id: supported by cDNA: 259555., supported by cDNA: gi_15451119, by cDNA: gi_18652313, supported by cDNA: gi_20148340 acid
  misc_feature (1)..(326): Homolog of NCBI NO: 21554648 NR Description: IAA-amino acid hydrolase (ILR1) [Arabidopsis
  misc_feature (1)..(326): Homolog of NCBI NO: 887785 NR Description: ILR1
  misc_feature (1)..(317): Homolog of NCBI NO: 34910396 NR Description: putative IAA-Ala hydrolase [Oryza sativa
MDALPLQELVDWEHKSKENGKMHACGHDAHTTMLLGAAKLLHARKDDLKGTVKLVFQPGEEGYGGAYHVLREGVLDDVSAIFGLHVDPGLPVGTVSSRPGPFLAAAGRFLVTVTGKGGHAAGPQDAVDPIVAASSAIVSLQLLVAREIDPLQAAVVSVTFMKGGDAYNVIPESASFGGTFRSLTTEGFSYLMKRIKEIIEGHAAVHRCTAAVDFMQEKLRPYPATVNDEGMYRHAREVAEAMLGQDKVSVGAQMMGAEDFSFYAEKFAGAFFMIGVRNKSMEEAMHPLHSPYFVIDEDVLPVGAAFHSAVAMEYLNKYSTTRQTELLRIEL

SEQ ID NO: 6073 - DNA, 1436 bp, Zea mays subsp. mays
  misc_feature (1)..(1436): Ceres Seq. ID no. 12409231
  misc_feature: MA Experiment ID: 108535 Result: Up-regulated in Transcription
  misc_feature: MA Experiment 108535 PARAMETER Experiment Name: Zm_Meristem_P Parameter: Age (day) Value: 8
  misc_feature: MA Experiment 108535 PARAMETER Experiment Name: Zm_Meristem_P Parameter: Organism Value: Zea mays
  misc_feature: MA Experiment 108535 PARAMETER Experiment Name: Zm_Meristem_P Parameter: Plant Line Value: 35A19
  misc_feature: MA Experiment 108535 PARAMETER Experiment Name: Zm_Meristem_P Parameter: Tissue Value: Root Meristem vs. Above Root Meristem
  misc_feature: MA Experiment ID: 20000487 Result: Up-regulated in Transcription
  misc_feature: MA Experiment 20000487 PARAMETER Experiment Name: Zm_50mM_NH4NO3_L_to_H_P Parameter: Organism Value: Zea mays
  misc_feature: MA Experiment 20000487 PARAMETER Experiment Name: Zm_50mM_NH4NO3_L_to_H_P Parameter: Timepoint (hr) Value: 4
  misc_feature: MA Experiment 20000487 PARAMETER Experiment Name: Zm_50mM_NH4NO3_L_to_H_P Parameter: Tissue Value: Leaves
  misc_feature: MA Experiment 20000487 PARAMETER Experiment Name: Zm_50mM_NH4NO3_L_to_H_P Parameter: Treatment Value: 50mM NH4NO3 vs. 100mM Mannitol
  misc_feature: MA Experiment ID: 20000488 Result: Up-regulated in Transcription
  misc_feature: MA Experiment 20000488 PARAMETER Experiment Name: Zm_50mM_NH4NO3_L_to_H_P Parameter: Organism Value: Zea mays
  misc_feature: MA Experiment 20000488 PARAMETER Experiment Name: Zm_50mM_NH4NO3_L_to_H_P Parameter: Timepoint (hr) Value: 8
  misc_feature: MA Experiment 20000488 PARAMETER Experiment Name: Zm_50mM_NH4NO3_L_to_H_P Parameter: Tissue Value: Leaves
  misc_feature: MA Experiment 20000488 PARAMETER Experiment Name: Zm_50mM_NH4NO3_L_to_H_P Parameter: Treatment Value: 50mM NH4NO3 vs. 100mM Mannitol
  misc_feature: MA Experiment ID: 20000534 Result: Down-regulated in Transcription
  misc_feature: MA Experiment 20000534 PARAMETER Experiment Name: Zm_Hybrid_Pollen_P Parameter: Age (day) Value: 8
  misc_feature: MA Experiment 20000534 PARAMETER Experiment Name: Zm_Hybrid_Pollen_P Parameter: Organism Value: Zea mays
  misc_feature: MA Experiment 20000534 PARAMETER Experiment Name: Zm_Hybrid_Pollen_P Parameter: Plant Line Value: 35A19
  misc_feature: MA Experiment 20000534 PARAMETER Experiment Name: Zm_Hybrid_Pollen_P Parameter: Tissue Value: Pollen vs. Aerial
  misc_feature: MA Experiment ID: 20001606 Result: Up-regulated in Transcription
  misc_feature: MA Experiment 20001606 PARAMETER Experiment Name: Zm_50ppm_KNO3_L-to-H_P Parameter: Age (day) Value: 19
  misc_feature: MA Experiment 20001606 PARAMETER Experiment Name: Zm_50ppm_KNO3_L-to-H_P Parameter: Organism Value: Zea mays
  misc_feature: MA Experiment 20001606 PARAMETER Experiment Name: Zm_50ppm_KNO3_L-to-H_P Parameter: Plant Line Value: 35A19
  misc_feature: MA Experiment 20001606 PARAMETER Experiment Name: Zm_50ppm_KNO3_L-to-H_P Parameter: Timepoint (hr) Value: 8
  misc_feature: MA Experiment 20001606 PARAMETER Experiment Name: Zm_50ppm_KNO3_L-to-H_P Parameter: Tissue Value: Shoots
  misc_feature: MA Experiment 20001606 PARAMETER Experiment Name: Zm_50ppm_KNO3_L-to-H_P Parameter: Treatment Value: 50ppm KNO3 vs. 50ppm KCl
acccttactcagcatggaacaggttctctgtcctcataactccaaccaaacaacggcagctagcgagctcccgcggtcccgccgccgccccctggtcctccaaaaaacggctgaaccctaaaccctccctagctcccgccgcctcgcttaaccgcgcccatggccgccgccgctcgcgccgccctcccgcggccccacctctctcttttttcgtcctcccaccgcagcccccatctgtccctcacgccctcctccgcccctcgcctgcgcagcggcgctgccacctcccctgcgctgcagcagcaccaccaggtcaccacgcgcctgggcgacgtgatcgaggcgcagcagttcgaccgggacgcgctgaacgagatcttcgaggtggcgcgggagatggaggccgtggagaggggttcccacggcgcccccagccgcgtcctcgaggggtacctcatggccacgcttttctacgagccctccacgcgcacgcgcctctccttcgaggctgctatgcggaggctcggcggggaggtcctcaccaccgagaatgcgcgcgagttctcttccgccgccaagggggagacactcgaagataccataagaaccgttgagggttattccgatattattgtactgagacattttgaaagtggagctgcaaggaaagcagcagatactgcaaatattcctgttattaatgcaggtgatggaccagggcaacatccaacccaggctttgttggatgtgtacacaataaagagagaaattggcacactagatggaattaaacttggtttggttggtgaccttgctaatgggaggacagttcgttctctggcttacttgattgctaagtaccagaacattaagatatactttgtatctcctgatgttgttaaaatgaaggatgatatcaagaactacttaaattccaaaggtgttgaatgggaagaaagttcagatttgttggaggtggcatccaagtgtgatgttatttatcaaacacgtattcaaaaagaaagatttggtgagaggattgacctttatgaagctgctcgtggcaagtacatcatggataaaaaggtcttagatgtgctgccaaaacatgctgtcatcatgcatccccttccaaggcttgatgagatcacagtagaagttgatagtgatccaagagctgcatattttaggcaggctaagaatggcctctacataaggatggcattgctcaaacttctgcttgttggtcactgacatttcggctagtgctttagcttgtgctgcgtcaagggattagaaggtattattcttaatataatgatcgaggctgtcttactcacgcaggtcgagtttttagaaacatgtactaataatcagcagcttgtgtcaaaattcaatgttcgctgttgcaggtaataaaagtctgcatccatgcg

SEQ ID NO: 6074 - protein, 364 aa, Zea mays subsp. mays
  peptide (1)..(364): Ceres Seq. ID no. 12409232
  misc_feature (207)..(361): Pfam Name: Aspartate/ornithine carbamoyltransferase, Pfam Description: Aspartate/ornithine carbamoyltransferase,
  misc_feature (3)..(363): Homolog of NCBI NO: 9453916 NR Description: aspartate carbamoyl transferase [Oryza sativa
  misc_feature (55)..(363): Homolog of NCBI NO: 3914501 NR Description: Aspartate carbamoyltransferase 3, chloroplast (Aspartate transcarbamylase 3) (ATCase 3) >gi|7433584|pir||T06425
  misc_feature (55)..(363): Homolog of NCBI NO: 3914503 NR Description: Aspartate carbamoyltransferase 2, chloroplast (Aspartate transcarbamylase 2) (ATCase 2) >gi|7433605|pir||T10181
  misc_feature (45)..(363): Homolog of NCBI NO: 21535795 NR Description: aspartate carbamoyltransferase [Solanum tuberosum]
  misc_feature (56)..(363): Homolog of NCBI NO: 15231112 NR Description: aspartate carbamoyltransferase precursor transcarbamylase); protein id: At3g20330.1, supported by cDNA: supported by cDNA: gi_19699265 [Arabidopsis thaliana] chloroplast
  misc_feature (55)..(363): Homolog of NCBI NO: 3914502 NR Description: Aspartate carbamoyltransferase 1, chloroplast (Aspartate transcarbamylase 1) (ATCase 1) >gi|7433585|pir||T06484
  misc_feature (56)..(363): Homolog of NCBI NO: 1076293 NR Description: aspartate carbamoyltransferase (EC 2.1.3.2) - thaliana >gi|443820|emb|CAA50687.1| aspartate
  misc_feature (56)..(363): Homolog of NCBI NO: 15215706 NR Description: AT3g20330/MQC12_8 [Arabidopsis thaliana]
  misc_feature (97)..(363): Homolog of NCBI NO: 479713 NR Description: aspartate carbamoyltransferase (EC 2.1.3.2) -
  misc_feature (97)..(363): Homolog of NCBI NO: 397385 NR Description: aspartate carbamoyltransferase [Lycopersicon
MAAAARAALPRPHLSLFSSSHRSPHLSLTPSSAPRLRSGAATSPALQQHHQVTTRLGDVIEAQQFDRDALNEIFEVAREMEAVERGSHGAPSRVLEGYLMATLFYEPSTRTRLSFEAAMRRLGGEVLTTENAREFSSAAKGETLEDTIRTVEGYSDIIVLRHFESGAARKAADTANIPVINAGDGPGQHPTQALLDVYTIKREIGTLDGIKLGLVGDLANGRTVRSLAYLIAKYQNIKIYFVSPDVVKMKDDIKNYLNSKGVEWEESSDLLEVASKCDVIYQTRIQKERFGERIDLYEAARGKYIMDKKVLDVLPKHAVIMHPLPRLDEITVEVDSDPRAAYFRQAKNGLYIRMALLKLLLVGH

SEQ ID NO: 6075 - protein, 285 aa, Zea mays subsp. mays
  peptide (1)..(285): Ceres Seq. ID no. 12409233
  misc_feature (128)..(282): Pfam Name: Aspartate/ornithine carbamoyltransferase, Pfam Description: Aspartate/ornithine carbamoyltransferase,
  misc_feature (1)..(284): Homolog of NCBI NO: 3914503 NR Description: Aspartate carbamoyltransferase 2, chloroplast (Aspartate transcarbamylase 2) (ATCase 2) >gi|7433605|pir||T10181
  misc_feature (1)..(284): Homolog of NCBI NO: 21535795 NR Description: aspartate carbamoyltransferase [Solanum tuberosum]
  misc_feature (1)..(284): Homolog of NCBI NO: 15231112 NR Description: aspartate carbamoyltransferase precursor transcarbamylase); protein id: At3g20330.1, supported by cDNA: supported by cDNA: gi_19699265 [Arabidopsis thaliana] chloroplast
  misc_feature (1)..(284): Homolog of NCBI NO: 3914502 NR Description: Aspartate carbamoyltransferase 1, chloroplast (Aspartate transcarbamylase 1) (ATCase 1) >gi|7433585|pir||T06484
  misc_feature (1)..(284): Homolog of NCBI NO: 9453916 NR Description: aspartate carbamoyl transferase [Oryza sativa
  misc_feature (1)..(284): Homolog of NCBI NO: 3914501 NR Description: Aspartate carbamoyltransferase 3, chloroplast (Aspartate transcarbamylase 3) (ATCase 3) >gi|7433584|pir||T06425
  misc_feature (1)..(284): Homolog of NCBI NO: 1076293 NR Description: aspartate carbamoyltransferase (EC 2.1.3.2) - thaliana >gi|443820|emb|CAA50687.1| aspartate
  misc_feature (1)..(284): Homolog of NCBI NO: 15215706 NR Description: AT3g20330/MQC12_8 [Arabidopsis thaliana]
  misc_feature (18)..(284): Homolog of NCBI NO: 479713 NR Description: aspartate carbamoyltransferase (EC 2.1.3.2) -
  misc_feature (18)..(284): Homolog of NCBI NO: 397385 NR Description: aspartate carbamoyltransferase [Lycopersicon
MEAVERGSHGAPSRVLEGYLMATLFYEPSTRTRLSFEAAMRRLGGEVLTTENAREFSSAAKGETLEDTIRTVEGYSDIIVLRHFESGAARKAADTANIPVINAGDGPGQHPTQALLDVYTIKREIGTLDGIKLGLVGDLANGRTVRSLAYLIAKYQNIKIYFVSPDVVKMKDDIKNYLNSKGVEWEESSDLLEVASKCDVIYQTRIQKERFGERIDLYEAARGKYIMDKKVLDVLPKHAVIMHPLPRLDEITVEVDSDPRAAYFRQAKNGLYIRMALLKLLLVGH

SEQ ID NO: 6076 - protein, 265 aa, Zea mays subsp. mays
  peptide (1)..(265): Ceres Seq. ID no. 12409234
  misc_feature (108)..(262): Pfam Name: Aspartate/ornithine carbamoyltransferase, Pfam Description: Aspartate/ornithine carbamoyltransferase,
  misc_feature (1)..(264): Homolog of NCBI NO: 9453916 NR Description: aspartate carbamoyl transferase [Oryza sativa
  misc_feature (1)..(264): Homolog of NCBI NO: 3914501 NR Description: Aspartate carbamoyltransferase 3, chloroplast (Aspartate transcarbamylase 3) (ATCase 3) >gi|7433584|pir||T06425
  misc_feature (1)..(264): Homolog of NCBI NO: 3914503 NR Description: Aspartate carbamoyltransferase 2, chloroplast (Aspartate transcarbamylase 2) (ATCase 2) >gi|7433605|pir||T10181
  misc_feature (1)..(264): Homolog of NCBI NO: 21535795 NR Description: aspartate carbamoyltransferase [Solanum tuberosum]
  misc_feature (1)..(264): Homolog of NCBI NO: 15231112 NR Description: aspartate carbamoyltransferase precursor transcarbamylase); protein id: At3g20330.1, supported by cDNA: supported by cDNA: gi_19699265 [Arabidopsis thaliana] chloroplast
  misc_feature (1)..(264): Homolog of NCBI NO: 3914502 NR Description: Aspartate carbamoyltransferase 1, chloroplast (Aspartate transcarbamylase 1) (ATCase 1) >gi|7433585|pir||T06484
  misc_feature (1)..(264): Homolog of NCBI NO: 1076293 NR Description: aspartate carbamoyltransferase (EC 2.1.3.2) - thaliana >gi|443820|emb|CAA50687.1| aspartate
  misc_feature (1)..(264): Homolog of NCBI NO: 15215706 NR Description: AT3g20330/MQC12_8 [Arabidopsis thaliana]
  misc_feature (1)..(264): Homolog of NCBI NO: 479713 NR Description: aspartate carbamoyltransferase (EC 2.1.3.2) -
  misc_feature (1)..(264): Homolog of NCBI NO: 397385 NR Description: aspartate carbamoyltransferase [Lycopersicon
MATLFYEPSTRTRLSFEAAMRRLGGEVLTTENAREFSSAAKGETLEDTIRTVEGYSDIIVLRHFESGAARKAADTANIPVINAGDGPGQHPTQALLDVYTIKREIGTLDGIKLGLVGDLANGRTVRSLAYLIAKYQNIKIYFVSPDVVKMKDDIKNYLNSKGVEWEESSDLLEVASKCDVIYQTRIQKERFGERIDLYEAARGKYIMDKKVLDVLPKHAVIMHPLPRLDEITVEVDSDPRAAYFRQAKNGLYIRMALLKLLLVGH

SEQ ID NO: 6077 - DNA, 1486 bp, Zea mays subsp. mays
  misc_feature (1)..(1486): Ceres Seq. ID no. 13494425
  misc_feature: MA Experiment ID: 108534 Result: Up-regulated in Transcription
  misc_feature: MA Experiment 108534 PARAMETER Experiment Name: Zm_4deg_Cold_P Parameter: Age (hr) Value: 8
  misc_feature: MA Experiment 108534 PARAMETER Experiment Name: Zm_4deg_Cold_P Parameter: Organism Value: Zea mays
  misc_feature: MA Experiment 108534 PARAMETER Experiment Name: Zm_4deg_Cold_P Parameter: Plant Line Value: 35A19
  misc_feature: MA Experiment 108534 PARAMETER Experiment Name: Zm_4deg_Cold_P Parameter: Temperature (deg C) Value: 4 vs. 22
  misc_feature: MA Experiment 108534 PARAMETER Experiment Name: Zm_4deg_Cold_P Parameter: Timepoint (hr) Value: 6
  misc_feature: MA Experiment 108534 PARAMETER Experiment Name: Zm_4deg_Cold_P Parameter: Tissue Value: Aerial
  misc_feature: MA Experiment ID: 20000492 Result: Down-regulated in Transcription
  misc_feature: MA Experiment 20000492 PARAMETER Experiment Name: Zm_Hybrid_Seed_Dev_P Parameter: DAP Value: 12
  misc_feature: MA Experiment 20000492 PARAMETER Experiment Name: Zm_Hybrid_Seed_Dev_P Parameter: Organism Value: Zea mays
  misc_feature: MA Experiment 20000492 PARAMETER Experiment Name: Zm_Hybrid_Seed_Dev_P Parameter: Plant Line Value: 35A19
  misc_feature: MA Experiment 20000492 PARAMETER Experiment Name: Zm_Hybrid_Seed_Dev_P Parameter: Tissue Value: Fert Kernel vs. Unfert Floret
  misc_feature: MA Experiment ID: 20000535 Result: Down-regulated in Transcription
  misc_feature: MA Experiment 20000535 PARAMETER Experiment Name: Zm_Hybrid_Seed_Dev_P Parameter: DAP Value: 30 vs. 12
  misc_feature: MA Experiment 20000535 PARAMETER Experiment Name: Zm_Hybrid_Seed_Dev_P Parameter: Organism Value: Zea mays
  misc_feature: MA Experiment 20000535 PARAMETER Experiment Name: Zm_Hybrid_Seed_Dev_P Parameter: Plant Line Value: 35A19
  misc_feature: MA Experiment 20000535 PARAMETER Experiment Name: Zm_Hybrid_Seed_Dev_P Parameter: Tissue Value: Embryo vs. Unfert Floret
  misc_feature: MA Experiment ID: 20000626 Result: Down-regulated in Transcription
  misc_feature: MA Experiment 20000626 PARAMETER Experiment Name: Zm_Herbicide-Treatments_P Parameter: Timepoint (hr) Value: 12
  misc_feature: MA Experiment 20000626 PARAMETER Experiment Name: Zm_Herbicide-Treatments_P Parameter: Tissue Value: Aerial
  misc_feature: MA Experiment 20000626 PARAMETER Experiment Name: Zm_Herbicide-Treatments_P Parameter: Treatment Value: Roundup vs. No Treatment
agaaataggcgcgcgtgccgcctcggccgctcgctcctctggttaatcccccctcgccacgactcgcagccatcccttcacattatccgcgcgcgcgcgagcgagcggacgtagcgtgtgggtagcgtcgccgtgcggacggtctcttggtgccggtgcgggccgcgtgacggtgcgtgtgccgcccgcggggaggaggtcgttcggttggttggccctcggcgacgatggcggtccacggcggagaggcggtctccgtcgcgctcctcttctccctcgctttcttctgcgctcgcctcctgctcgaccgcctcgtctacaagccattagcagtctaccttttcaacaccaaagcttctaagttgatgaataatgaggccaggcaagcaaagattgtcaagttctcagagtccatttggaaacttacctactatgcttctgttcaagcatgggtcctcatgataataaagcaggaaccatggtcattggatatgatgcaatactttgatggctggccgaaccaacccatcgtgtcttcattgatgcttttctatatgtgccagtgtggattttatatctatagcatcggtgctcttgttgcttgggaaacccgcagaaaagattttgctgtaatgatgtctcatcatgtaataacatctactctaattggagtttcatatctgactggatttttccgaattgggaccatcattctcgctcttcatgatgcaagtgatgtgtttcttgagactgccaaattgtgcaaatacacagaaaaagagctgggtgctagcttgttttttggtctcttcgctatctcctggcttctattgcgtctgatttacttcccattttggataatcaaagcctctagctatcattccatcacattcttgaggaagctggatgaattcccaacaactttgtactacatcttgaacacaatgcttctcacattgcttgtattccatatgtactggtggaaactcatatgtttgatgataatgagacagctgaataataaaggacaagttacagacgatgtccgatctgattctgaggatgaggagtgatgggagattcattctttgacatctgcaacgtggcatttcctcgtcaatacttttctatgcctgcttccagaattgattgcttttaatcttggcaagtctcgggaacgtataggaaagtttaatctctgtatattgccttatgatatcaaacatggctagaccgggaatggatctatacatgatgacgggcatagctagcaagcttacttcaaggttccttaaaaaattttggttcacctttatttgatatggggaaagacatgagagggtgtacagctttttcctgaagcttgcagaacccccctctgtaccatgatcaatatacttcacttgtgagtagatttagttctaattgatgataataaattgattcttttgattgggaatgaatctcacctgaaccttgatgatct

SEQ ID NO: 6078 - protein, 281 aa, Zea mays subsp. mays
  peptide (1)..(281): Ceres Seq. ID no. 13494426
  misc_feature (77)..(281): Pfam Name: Longevity-assurance protein (LAG1) Pfam Description: Longevity-assurance protein (LAG1)
  misc_feature (1)..(281): Homolog of NCBI NO: 34901974 NR Description: unknown protein [Oryza sativa (japonica
  misc_feature (11)..(281): Homolog of NCBI NO: 15230323 NR Description: longevity factor-related protein [Arabidopsis >gi|9294628|dbj|BAB02967.1| contains similarity to unknown
  misc_feature (11)..(281): Homolog of NCBI NO: 7658241 NR Description: LAG1 homolog 2 [Arabidopsis thaliana]
  misc_feature (1)..(281): Homolog of NCBI NO: 25518747 NR Description: hypothetical protein F13B4.7 - Arabidopsis >gi|9802756|gb|AAF99825.1|AC027134_7 Highly similar to fungal
  misc_feature (1)..(281): Homolog of NCBI NO: 18404559 NR Description: LAG1 homolog 1 [Arabidopsis thaliana] LAG1 homolog 1 [Arabidopsis thaliana] >gi|9279733|dbj|BAB01323.1|
  misc_feature (7)..(280): Homolog of NCBI NO: 16974114 NR Description: putative resistance protein [Lycopersicon
  misc_feature (1)..(281): Homolog of NCBI NO: 7688742 NR Description: ASC1 [Lycopersicon esculentum] alternaria stem canker resistance protein [Lycopersicon
  misc_feature (1)..(217): Homolog of NCBI NO: 30683361 NR Description: longevity assurance protein -related [Arabidopsis
  misc_feature (49)..(281): Homolog of NCBI NO: 27769146 NR Description: Similar to RIKEN cDNA 0610013I17 gene [Xenopus
  misc_feature (45)..(279): Homolog of NCBI NO: 21358551 NR Description: Longevity assurance gene 1 CG3576-PB [Drosophila
MAVHGGEAVSVALLFSLAFFCARLLLDRLVYKPLAVYLFNTKASKLMNNEARQAKIVKFSESIWKLTYYASVQAWVLMIIKQEPWSLDMMQYFDGWPNQPIVSSLMLFYMCQCGFYIYSIGALVAWETRRKDFAVMMSHHVITSTLIGVSYLTGFFRIGTIILALHDASDVFLETAKLCKYTEKELGASLFFGLFAISWLLLRLIYFPFWIIKASSYHSITFLRKLDEFPTTLYYILNTMLLTLLVFHMYWWKLICLMIMRQLNNKGQVTDDVRSDSEDEE

SEQ ID NO: 6079 - protein, 235 aa, Zea mays subsp. mays
  peptide (1)..(235): Ceres Seq. ID no. 13494427
  misc_feature (31)..(235): Pfam Name: Longevity-assurance protein (LAG1) Pfam Description: Longevity-assurance protein (LAG1)
  misc_feature (1)..(235): Homolog of NCBI NO: 34901974 NR Description: unknown protein [Oryza sativa (japonica
  misc_feature (1)..(235): Homolog of NCBI NO: 15230323 NR Description: longevity factor-related protein [Arabidopsis >gi|9294628|dbj|BAB02967.1| contains similarity to unknown
  misc_feature (1)..(235): Homolog of NCBI NO: 7658241 NR Description: LAG1 homolog 2 [Arabidopsis thaliana]
  misc_feature (1)..(235): Homolog of NCBI NO: 25518747 NR Description: hypothetical protein F13B4.7 - Arabidopsis >gi|9802756|gb|AAF99825.1|AC027134_7 Highly similar to fungal
  misc_feature (1)..(235): Homolog of NCBI NO: 18404559 NR Description: LAG1 homolog 1 [Arabidopsis thaliana] LAG1 homolog 1 [Arabidopsis thaliana] >gi|9279733|dbj|BAB01323.1|
  misc_feature (1)..(234): Homolog of NCBI NO: 16974114 NR Description: putative resistance protein [Lycopersicon
  misc_feature (1)..(235): Homolog of NCBI NO: 7688742 NR Description: ASC1 [Lycopersicon esculentum] alternaria stem canker resistance protein [Lycopersicon
  misc_feature (1)..(171): Homolog of NCBI NO: 30683361 NR Description: longevity assurance protein -related [Arabidopsis
  misc_feature (3)..(235): Homolog of NCBI NO: 27769146 NR Description: Similar to RIKEN cDNA 0610013I17 gene [Xenopus
  misc_feature (1)..(233): Homolog of NCBI NO: 21358551 NR Description: Longevity assurance gene 1 CG3576-PB [Drosophila
MNNEARQAKIVKFSESIWKLTYYASVQAWVLMIIKQEPWSLDMMQYFDGWPNQPIVSSLMLFYMCQCGFYIYSIGALVAWETRRKDFAVMMSHHVITSTLIGVSYLTGFFRIGTIILALHDASDVFLETAKLCKYTEKELGASLFFGLFAISWLLLRLIYFPFWIIKASSYHSITFLRKLDEFPTTLYYILNTMLLTLLVFHMYWWKLICLMIMRQLNNKGQVTDDVRSDSEDEE

SEQ ID NO: 6080 - protein, 204 aa, Zea mays subsp. mays
  peptide (1)..(204): Ceres Seq. ID no. 13494428
  misc_feature (1)..(204): Pfam Name: Longevity-assurance protein (LAG1) Pfam Description: Longevity-assurance protein (LAG1)
  misc_feature (1)..(204): Homolog of NCBI NO: 34901974 NR Description: unknown protein [Oryza sativa (japonica
  misc_feature (1)..(204): Homolog of NCBI NO: 15230323 NR Description: longevity factor-related protein [Arabidopsis >gi|9294628|dbj|BAB02967.1| contains similarity to unknown
  misc_feature (1)..(204): Homolog of NCBI NO: 7658241 NR Description: LAG1 homolog 2 [Arabidopsis thaliana]
  misc_feature (1)..(204): Homolog of NCBI NO: 25518747 NR Description: hypothetical protein F13B4.7 - Arabidopsis >gi|9802756|gb|AAF99825.1|AC027134_7 Highly similar to fungal
  misc_feature (1)..(204): Homolog of NCBI NO: 18404559 NR Description: LAG1 homolog 1 [Arabidopsis thaliana] LAG1 homolog 1 [Arabidopsis thaliana] >gi|9279733|dbj|BAB01323.1|
  misc_feature (1)..(203): Homolog of NCBI NO: 16974114 NR Description: putative resistance protein [Lycopersicon
  misc_feature (1)..(204): Homolog of NCBI NO: 7688742 NR Description: ASC1 [Lycopersicon esculentum] alternaria stem canker resistance protein [Lycopersicon
  misc_feature (1)..(140): Homolog of NCBI NO: 30683361 NR Description: longevity assurance protein -related [Arabidopsis
  misc_feature (1)..(204): Homolog of NCBI NO: 27769146 NR Description: Similar to RIKEN cDNA 0610013I17 gene [Xenopus
  misc_feature (1)..(202): Homolog of NCBI NO: 21358551 NR Description: Longevity assurance gene 1 CG3576-PB [Drosophila
MIIKQEPWSLDMMQYFDGWPNQPIVSSLMLFYMCQCGFYIYSIGALVAWETRRKDFAVMMSHHVITSTLIGVSYLTGFFRIGTIILALHDASDVFLETAKLCKYTEKELGASLFFGLFAISWLLLRLIYFPFWIIKASSYHSITFLRKLDEFPTTLYYILNTMLLTLLVFHMYWWKLICLMIMRQLNNKGQVTDDVRSDSEDEE

SEQ ID NO: 6081 - DNA, 1149 bp, Zea mays subsp. mays
  misc_feature (1)..(1149): Ceres Seq. ID no. 12409227
  misc_feature: MA Experiment ID: 108556 Result: Down-regulated in Transcription
  misc_feature: MA Experiment 108556 PARAMETER Experiment Name: Zm_Drought_P Parameter: Age (day) Value: 9
  misc_feature: MA Experiment 108556 PARAMETER Experiment Name: Zm_Drought_P Parameter: Organism Value: Zea mays
  misc_feature: MA Experiment 108556 PARAMETER Experiment Name: Zm_Drought_P Parameter: Plant Line Value: 35A19
  misc_feature: MA Experiment 108556 PARAMETER Experiment Name: Zm_Drought_P Parameter: Timepoint (hr) Value: 24
  misc_feature: MA Experiment 108556 PARAMETER Experiment Name: Zm_Drought_P Parameter: Tissue Value: Aerial
  misc_feature: MA Experiment 108556 PARAMETER Experiment Name: Zm_Drought_P Parameter: Treatment Value: Drought vs. No Drought
  misc_feature: MA Experiment ID: 108687 Result: Down-regulated in Transcription
  misc_feature: MA Experiment 108687 PARAMETER Experiment Name: Zm_Embryos-Flowers__P Parameter: Tissue Value: Embryo vs. Aerial+
  misc_feature: MA Experiment ID: 108689 Result: Down-regulated in Transcription
  misc_feature: MA Experiment 108689 PARAMETER Experiment Name: Zm_Drought_Roots_P Parameter: Age (day) Value: 9
  misc_feature: MA Experiment 108689 PARAMETER Experiment Name: Zm_Drought_Roots_P Parameter: Organism Value: Zea mays
  misc_feature: MA Experiment 108689 PARAMETER Experiment Name: Zm_Drought_Roots_P Parameter: Plant Line Value: 35A19
  misc_feature: MA Experiment 108689 PARAMETER Experiment Name: Zm_Drought_Roots_P Parameter: Timepoint (hr) Value: 24
  misc_feature: MA Experiment 108689 PARAMETER Experiment Name: Zm_Drought_Roots_P Parameter: Tissue Value: Roots
  misc_feature: MA Experiment 108689 PARAMETER Experiment Name: Zm_Drought_Roots_P Parameter: Treatment Value: Drought vs. No Drought
  misc_feature: MA Experiment ID: 20000480 Result: Down-regulated in Transcription
  misc_feature: MA Experiment 20000480 PARAMETER Experiment Name: Zm_Drought_P Parameter: Age (day) Value: 11
  misc_feature: MA Experiment 20000480 PARAMETER Experiment Name: Zm_Drought_P Parameter: Organism Value: Zea mays
  misc_feature: MA Experiment 20000480 PARAMETER Experiment Name: Zm_Drought_P Parameter: Plant Line Value: 35A19
  misc_feature: MA Experiment 20000480 PARAMETER Experiment Name: Zm_Drought_P Parameter: Timepoint (hr) Value: 72
  misc_feature: MA Experiment 20000480 PARAMETER Experiment Name: Zm_Drought_P Parameter: Tissue Value: Aerial
  misc_feature: MA Experiment 20000480 PARAMETER Experiment Name: Zm_Drought_P Parameter: Treatment Value: Drought vs. No Drought
  misc_feature: MA Experiment ID: 20000535 Result: Down-regulated in Transcription
  misc_feature: MA Experiment 20000535 PARAMETER Experiment Name: Zm_Hybrid_Seed_Dev_P Parameter: DAP Value: 30 vs. 12
  misc_feature: MA Experiment 20000535 PARAMETER Experiment Name: Zm_Hybrid_Seed_Dev_P Parameter: Organism Value: Zea mays
  misc_feature: MA Experiment 20000535 PARAMETER Experiment Name: Zm_Hybrid_Seed_Dev_P Parameter: Plant Line Value: 35A19
  misc_feature: MA Experiment 20000535 PARAMETER Experiment Name: Zm_Hybrid_Seed_Dev_P Parameter: Tissue Value: Embryo vs. Unfert Floret
attttttaactcgaccccgccctacctctcgccgtcgaccacaagtccacaacccacaaaatgcacgggaggacccagggcgccgccgtcggcgacatgacccagcgccttctcctcgccctctcgctcatcgcatcagcgaccgccgtgcccgctgtcatccgcacggtcccggacgaccccaccgcgggctcctctggcgcggcagacgccgcggacgcgctcttctgtgacagctggaggctgtcggtggagacggccaacgcgggcccctggagcgccgtgccctcgcgctgtggggctttcgtgcgggactacatggagggacctcgctacgcgtctgactccgccgtcgccgacgccgacgccctagccttcgcctccgaagccctggccgccgccgagtggggcggctcggcgagcgcgaggcctgcgtgggtgttcgacgtcgacgagacgctgctctctaacgcgccgtactacgcggtcaacggatggggatcacaggaattcaatgagacctcatttgatgaatgggtagatgctgcaaaggcaccaacattaccatcgagcttgaatttgtacaatcaacttcagggacttggtttccatgttatcctattgactggccggagtgaattccaacgtaatgccacagaattgaatcttttgtttgctggctacaactcatgggaaaaactcatactgaggcaaccttatgatattggcaagaacgctgtgcagtacaaatcagagagacgagcagcaatggaagcggaaggtttcaagatacttgggaactcaggggatcagtggagtgatttgataggatcgcccatggcaacgagatccttcaagctaccaaacccaatgtacttcatcagctgattttattgttagagcagtggacgaaggagcaggttttcatagggtgttcatatggtcccggtgtgaaactgcttttgttagacatccctcgggacataaatttagatttttatcttcaagcatgttgaaattcaactgaggcttgggtccgtcgaatctgccctatgatgatctgtaattacacacttcttttcccacactactggaagcatttgtggtaaggctaaaaaaaaaaaaaaaaaaatcaagaactcgcacgag

SEQ ID NO: 6082 - protein, 275 aa, Zea mays subsp. mays
  peptide (1)..(275): Ceres Seq. ID no. 12409228
  misc_feature (56)..(274): Pfam Name: HAD superfamily, subfamily IIIB (Acid phosphatase) Pfam Description: HAD superfamily, subfamily IIIB (Acid
  misc_feature (56)..(274): Homolog of NCBI NO: 15233504 NR Description: acid phosphatase-like protein; protein id: supported by cDNA: gi_15293022, supported by cDNA: gi_20258884
  misc_feature (53)..(274): Homolog of NCBI NO: 130718 NR Description: Acid phosphatase precursor 1
  misc_feature (53)..(274): Homolog of NCBI NO: 445113 NR Description: acid phosphatase 1
  misc_feature (19)..(275): Homolog of NCBI NO: 15233526 NR Description: acid phosphatase-like protein; protein id: supported by cDNA: 108301. [Arabidopsis thaliana]
MHGRTQGAAVGDMTQRLLLALSLIASATAVPAVIRTVPDDPTAGSSGAADAADALFCDSWRLSVETANAGPWSAVPSRCGAFVRDYMEGPRYASDSAVADADALAFASEALAAAEWGGSASARPAWVFDVDETLLSNAPYYAVNGWGSQEFNETSFDEWVDAAKAPTLPSSLNLYNQLQGLGFHVILLTGRSEFQRNATELNLLFAGYNSWEKLILRQPYDIGKNAVQYKSERRAAMEAEGFKILGNSGDQWSDLIGSPMATRSFKLPNPMYFIS

SEQ ID NO: 6083 - protein, 263 aa, Zea mays subsp. mays
  peptide (1)..(263): Ceres Seq. ID no. 12409229
  misc_feature (44)..(262): Pfam Name: HAD superfamily, subfamily IIIB (Acid phosphatase) Pfam Description: HAD superfamily, subfamily IIIB (Acid
  misc_feature (44)..(262): Homolog of NCBI NO: 15233504 NR Description: acid phosphatase-like protein; protein id: supported by cDNA: gi_15293022, supported by cDNA: gi_20258884
  misc_feature (41)..(262): Homolog of NCBI NO: 130718 NR Description: Acid phosphatase precursor 1
  misc_feature (41)..(262): Homolog of NCBI NO: 445113 NR Description: acid phosphatase 1
  misc_feature (7)..(263): Homolog of NCBI NO: 15233526 NR Description: acid phosphatase-like protein; protein id: supported by cDNA: 108301. [Arabidopsis thaliana]
MTQRLLLALSLIASATAVPAVIRTVPDDPTAGSSGAADAADALFCDSWRLSVETANAGPWSAVPSRCGAFVRDYMEGPRYASDSAVADADALAFASEALAAAEWGGSASARPAWVFDVDETLLSNAPYYAVNGWGSQEFNETSFDEWVDAAKAPTLPSSLNLYNQLQGLGFHVILLTGRSEFQRNATELNLLFAGYNSWEKLILRQPYDIGKNAVQYKSERRAAMEAEGFKILGNSGDQWSDLIGSPMATRSFKLPNPMYFIS

SEQ ID NO: 6084 - protein, 189 aa, Zea mays subsp. mays
  peptide (1)..(189): Ceres Seq. ID no. 12409230
  misc_feature (1)..(188): Pfam Name: HAD superfamily, subfamily IIIB (Acid phosphatase) Pfam Description: HAD superfamily, subfamily IIIB (Acid
  misc_feature (1)..(188): Homolog of NCBI NO: 15233504 NR Description: acid phosphatase-like protein; protein id: supported by cDNA: gi_15293022, supported by cDNA: gi_20258884
  misc_feature (1)..(188): Homolog of NCBI NO: 130718 NR Description: Acid phosphatase precursor 1
  misc_feature (1)..(188): Homolog of NCBI NO: 445113 NR Description: acid phosphatase 1
  misc_feature (1)..(189): Homolog of NCBI NO: 15233526 NR Description: acid phosphatase-like protein; protein id: supported by cDNA: 108301. [Arabidopsis thaliana]
MEGPRYASDSAVADADALAFASEALAAAEWGGSASARPAWVFDVDETLLSNAPYYAVNGWGSQEFNETSFDEWVDAAKAPTLPSSLNLYNQLQGLGFHVILLTGRSEFQRNATELNLLFAGYNSWEKLILRQPYDIGKNAVQYKSERRAAMEAEGFKILGNSGDQWSDLIGSPMATRSFKLPNPMYFIS

SEQ ID NO: 6085 - DNA, 1268 bp, Zea mays subsp. mays
  misc_feature (1)..(1268): Ceres Seq. ID no. 12407255
  misc_feature: MA Experiment ID: 108528 Result: Up-regulated in Transcription
  misc_feature: MA Experiment 108528 PARAMETER Experiment Name: Zm_Imbibed_Seeds_P Parameter: Age (day) Value: 5 vs. 2
  misc_feature: MA Experiment 108528 PARAMETER Experiment Name: Zm_Imbibed_Seeds_P Parameter: Organism Value: Zea mays
  misc_feature: MA Experiment 108528 PARAMETER Experiment Name: Zm_Imbibed_Seeds_P Parameter: Plant Line Value: 35A19
  misc_feature: MA Experiment 108528 PARAMETER Experiment Name: Zm_Imbibed_Seeds_P Parameter: Tissue Value: Aerial vs. Embryo
  misc_feature: MA Experiment ID: 108530 Result: Up-regulated in Transcription
  misc_feature: MA Experiment 108530 PARAMETER Experiment Name: Zm_Imbibed_Seeds_P Parameter: Age (day) Value: 6 vs. 2
  misc_feature: MA Experiment 108530 PARAMETER Experiment Name: Zm_Imbibed_Seeds_P Parameter: Organism Value: Zea mays
  misc_feature: MA Experiment 108530 PARAMETER Experiment Name: Zm_Imbibed_Seeds_P Parameter: Plant Line Value: 35A19
  misc_feature: MA Experiment 108530 PARAMETER Experiment Name: Zm_Imbibed_Seeds_P Parameter: Tissue Value: Aerial vs. Embryo
  misc_feature: MA Experiment ID: 108547 Result: Up-regulated in Transcription
  misc_feature: MA Experiment 108547 PARAMETER Experiment Name: Zm_Imbibed_Seeds_P Parameter: Age (day) Value: 4 vs. 2
  misc_feature: MA Experiment 108547 PARAMETER Experiment Name: Zm_Imbibed_Seeds_P Parameter: Organism Value: Zea mays
  misc_feature: MA Experiment 108547 PARAMETER Experiment Name: Zm_Imbibed_Seeds_P Parameter: Plant Line Value: 35A19
  misc_feature: MA Experiment 108547 PARAMETER Experiment Name: Zm_Imbibed_Seeds_P Parameter: Tissue Value: Aerial vs. Embryo
  misc_feature: MA Experiment ID: 108556 Result: Down-regulated in Transcription
  misc_feature: MA Experiment 108556 PARAMETER Experiment Name: Zm_Drought_P Parameter: Age (day) Value: 9
  misc_feature: MA Experiment 108556 PARAMETER Experiment Name: Zm_Drought_P Parameter: Organism Value: Zea mays
  misc_feature: MA Experiment 108556 PARAMETER Experiment Name: Zm_Drought_P Parameter: Plant Line Value: 35A19
  misc_feature: MA Experiment 108556 PARAMETER Experiment Name: Zm_Drought_P Parameter: Timepoint (hr) Value: 24
  misc_feature: MA Experiment 108556 PARAMETER Experiment Name: Zm_Drought_P Parameter: Tissue Value: Aerial
  misc_feature: MA Experiment 108556 PARAMETER Experiment Name: Zm_Drought_P Parameter: Treatment Value: Drought vs. No Drought
  misc_feature: MA Experiment ID: 108597 Result: Down-regulated in Transcription
  misc_feature: MA Experiment 108597 PARAMETER Experiment Name: Zm_100uM_ABA_P Parameter: Age (day) Value: 9
  misc_feature: MA Experiment 108597 PARAMETER Experiment Name: Zm_100uM_ABA_P Parameter: Organism Value: Zea mays
  misc_feature: MA Experiment 108597 PARAMETER Experiment Name: Zm_100uM_ABA_P Parameter: Plant Line Value: 35A19
  misc_feature: MA Experiment 108597 PARAMETER Experiment Name: Zm_100uM_ABA_P Parameter: Timepoint (hr) Value: 24
  misc_feature: MA Experiment 108597 PARAMETER Experiment Name: Zm_100uM_ABA_P Parameter: Tissue Value: Aerial
  misc_feature: MA Experiment 108597 PARAMETER Experiment Name: Zm_100uM_ABA_P Parameter: Treatment Value: 100uM ABA vs. No Treatment
  misc_feature: MA Experiment ID: 20000477 Result: Down-regulated in Transcription
  misc_feature: MA Experiment 20000477 PARAMETER Experiment Name: Zm_5mM_SA_P Parameter: Age (day) Value: 10
  misc_feature: MA Experiment 20000477 PARAMETER Experiment Name: Zm_5mM_SA_P Parameter: Organism Value: Zea mays
  misc_feature: MA Experiment 20000477 PARAMETER Experiment Name: Zm_5mM_SA_P Parameter: Plant Line Value: 35A19
  misc_feature: MA Experiment 20000477 PARAMETER Experiment Name: Zm_5mM_SA_P Parameter: Timepoint (hr) Value: 48
  misc_feature: MA Experiment 20000477 PARAMETER Experiment Name: Zm_5mM_SA_P Parameter: Tissue Value: Aerial
  misc_feature: MA Experiment 20000477 PARAMETER Experiment Name: Zm_5mM_SA_P Parameter: Treatment Value: 5mM SA vs. No Treatment
  misc_feature: MA Experiment ID: 20000478 Result: Down-regulated in Transcription
  misc_feature: MA Experiment 20000478 PARAMETER Experiment Name: Zm_5mM_SA_P Parameter: Age (day) Value: 11
  misc_feature: MA Experiment 20000478 PARAMETER Experiment Name: Zm_5mM_SA_P Parameter: Organism Value: Zea mays
  misc_feature: MA Experiment 20000478 PARAMETER Experiment Name: Zm_5mM_SA_P Parameter: Plant Line Value: 35A19
  misc_feature: MA Experiment 20000478 PARAMETER Experiment Name: Zm_5mM_SA_P Parameter: Timepoint (hr) Value: 72
  misc_feature: MA Experiment 20000478 PARAMETER Experiment Name: Zm_5mM_SA_P Parameter: Tissue Value: Aerial
  misc_feature: MA Experiment 20000478 PARAMETER Experiment Name: Zm_5mM_SA_P Parameter: Treatment Value: 5mM SA vs. No Treatment
  misc_feature: MA Experiment ID: 20000480 Result: Down-regulated in Transcription
  misc_feature: MA Experiment 20000480 PARAMETER Experiment Name: Zm_Drought_P Parameter: Age (day) Value: 11
  misc_feature: MA Experiment 20000480 PARAMETER Experiment Name: Zm_Drought_P Parameter: Organism Value: Zea mays
  misc_feature: MA Experiment 20000480 PARAMETER Experiment Name: Zm_Drought_P Parameter: Plant Line Value: 35A19
  misc_feature: MA Experiment 20000480 PARAMETER Experiment Name: Zm_Drought_P Parameter: Timepoint (hr) Value: 72
  misc_feature: MA Experiment 20000480 PARAMETER Experiment Name: Zm_Drought_P Parameter: Tissue Value: Aerial
  misc_feature: MA Experiment 20000480 PARAMETER Experiment Name: Zm_Drought_P Parameter: Treatment Value: Drought vs. No Drought
acctgcacgctggccccccgccccgccgcgggatcaaatacgccgcctccgcccgtccactccctcgccgcccccgtctcctctcctctcctctcccccgcatccacggccgcaggccgcagccagccactcgacgatctagtcgtctctctctccccgctctgccgcctcgctgccgcggcttcccgtcggctggaggatgaaggtcacggtcgtgtcccggagcggccgggaggtcgtcaagggcggcatcgacctcaaggactcggccaaggtcgcggacctgcaggaggccatccatgccaggactaagaagtattatccttctaggcagcggctcaccctcccccttcaacctggaaaaggcgggaagccagttgtcctcagtccgaaggccagcctgctagaatactgcgagaagggttctgggtcactgacagtggtcttcaaagatttagggccacaggtctactacagcacactgttcttcttcgagtacctgggtcctctcatcatctaccccatgttctactatctgcctgtctacaaatacttcgggtacgagggggagcgggccatgcaccctgtccagacctacgccatgtactactggtgcttccactacttcaagcggatcatggagacattcttcgtgcaccgcttcagccacgcgacgtcgccgctctcgaacgtcttcaggaactgtgcctactactggaccttcggcgcctacattgcttactactgcaaccacccgctgtacaccccagtgagtgatctgcagatgaagattgggtttggttttggggtcgtctgccaggtcgcgaacttctactgccacatcctgctgcggaacctcaggagcccaagcggcagcggcgggtaccagatcccccgcggtttcttgttcaacatcgtgacctgcgccaattataccaccgagatctatcagtgggtcggcttcaacatcgccacgcagaccgtggcaggttacgtcttccttgtcgtggcggcaggcatcatgaccaactgggcgctcggcaagcacagccgtctgaagaagctgtttgacggcaaggatgggaggcccaagtaccctcgccggtgggtgattctccctccgttcctgtgaagaggtggtggtggtcggcctattgtgattcgatgtctacagacagttgtactgtactaatcgtgcctgtttagcggttgaacttggattccgttgtccgaaatttctaatccgaaagatggatttcattgtcttc

SEQ ID NO: 6086 - protein, 310 aa, Zea mays subsp. mays; identical to SEQ ID NO: 2382
  peptide (1)..(310): Ceres Seq. ID no. 12407256
  misc_feature (158)..(310): Pfam Name: 3-oxo-5-alpha-steroid 4-dehydrogenase Pfam Description: 3-oxo-5-alpha-steroid 4-dehydrogenase
  misc_feature (1)..(310): Homolog of NCBI NO: 34895848 NR Description: putative glycoprotein [Oryza sativa (japonica group)] >gi|9663963|dbj|BAB03604.1| putative glycoprotein [Oryza
  misc_feature (1)..(310): Homolog of NCBI NO: 15233250 NR Description: synaptic glycoprotein SC2-like protein; protein At3g55360.1, supported by cDNA: 6774., supported by cDNA: supported by cDNA: gi_20148508 [Arabidopsis thaliana]
  misc_feature (1)..(310): Homolog of NCBI NO: 25004880 NR Description: steroid 5-alpha reductase [Cicer arietinum]
  misc_feature (38)..(310): Homolog of NCBI NO: 39590267 NR Description: Hypothetical protein CBG11196 [Caenorhabditis
  misc_feature (38)..(310): Homolog of NCBI NO: 17531783 NR Description: Synaptic glycoprotein SC2 (35.1 kD) elegans] >gi|7206593|gb|AAF39753.1| Hypothetical protein C15F1.6
  misc_feature (24)..(291): Homolog of NCBI NO: 13111809 NR Description: Unknown (protein for IMAGE:2901253) [Homo sapiens]
  misc_feature (24)..(291): Homolog of NCBI NO: 24475816 NR Description: glycoprotein, synaptic 2; synaptic glycoprotein [Homo sapiens] >gi|20177939|sp|Q9NZ01|GSN2_HUMAN Synaptic
  misc_feature (24)..(291): Homolog of NCBI NO: 30585427 NR Description: Homo sapiens glycoprotein, synaptic 2 [synthetic
  misc_feature (24)..(310): Homolog of NCBI NO: 33585860 NR Description: Glycoprotein, synaptic 2 [Xenopus laevis]
  misc_feature (20)..(291): Homolog of NCBI NO: 19924091 NR Description: synaptic glycoprotein SC2 [Rattus norvegicus]

SEQ ID NO: 6087 - protein, 202 aa, Zea mays subsp. mays; identical to SEQ ID NO: 2383
  peptide (1)..(202): Ceres Seq. ID no. 12407257
  misc_feature (50)..(202): Pfam Name: 3-oxo-5-alpha-steroid 4-dehydrogenase Pfam Description: 3-oxo-5-alpha-steroid 4-dehydrogenase
  misc_feature (1)..(202): Homolog of NCBI NO: 34895848 NR Description: putative glycoprotein [Oryza sativa (japonica group)] >gi|9663963|dbj|BAB03604.1| putative glycoprotein [Oryza
  misc_feature (1)..(202): Homolog of NCBI NO: 15233250 NR Description: synaptic glycoprotein SC2-like protein; protein At3g55360.1, supported by cDNA: 6774., supported by cDNA: supported by cDNA: gi_20148508 [Arabidopsis thaliana]
  misc_feature (1)..(202): Homolog of NCBI NO: 25004880 NR Description: steroid 5-alpha reductase [Cicer arietinum]
  misc_feature (1)..(202): Homolog of NCBI NO: 39590267 NR Description: Hypothetical protein CBG11196 [Caenorhabditis
  misc_feature (1)..(202): Homolog of NCBI NO: 17531783 NR Description: Synaptic glycoprotein SC2 (35.1 kD) elegans] >gi|7206593|gb|AAF39753.1| Hypothetical protein C15F1.6
  misc_feature (1)..(183): Homolog of NCBI NO: 13111809 NR Description: Unknown (protein for IMAGE:2901253) [Homo sapiens]
  misc_feature (1)..(183): Homolog of NCBI NO: 24475816 NR Description: glycoprotein, synaptic 2; synaptic glycoprotein [Homo sapiens] >gi|20177939|sp|Q9NZ01|GSN2_HUMAN Synaptic
  misc_feature (1)..(183): Homolog of NCBI NO: 30585427 NR Description: Homo sapiens glycoprotein, synaptic 2 [synthetic
  misc_feature (1)..(202): Homolog of NCBI NO: 33585860 NR Description: Glycoprotein, synaptic 2 [Xenopus laevis]
  misc_feature (1)..(183): Homolog of NCBI NO: 19924091 NR Description: synaptic glycoprotein SC2 [Rattus norvegicus]

SEQ ID NO: 6088 - protein, 184 aa, Zea mays subsp. mays; identical to SEQ ID NO: 2384
  peptide (1)..(184): Ceres Seq. ID no. 12407258
  misc_feature (32)..(184): Pfam Name: 3-oxo-5-alpha-steroid 4-dehydrogenase Pfam Description: 3-oxo-5-alpha-steroid 4-dehydrogenase
  misc_feature (1)..(184): Homolog of NCBI NO: 34895848 NR Description: putative glycoprotein [Oryza sativa (japonica group)] >gi|9663963|dbj|BAB03604.1| putative glycoprotein [Oryza
  misc_feature (1)..(184): Homolog of NCBI NO: 15233250 NR Description: synaptic glycoprotein SC2-like protein; protein At3g55360.1, supported by cDNA: 6774., supported by cDNA: supported by cDNA: gi_20148508 [Arabidopsis thaliana]
  misc_feature (1)..(184): Homolog of NCBI NO: 25004880 NR Description: steroid 5-alpha reductase [Cicer arietinum]
  misc_feature (1)..(184): Homolog of NCBI NO: 39590267 NR Description: Hypothetical protein CBG11196 [Caenorhabditis
  misc_feature (1)..(184): Homolog of NCBI NO: 17531783 NR Description: Synaptic glycoprotein SC2 (35.1 kD) elegans] >gi|7206593|gb|AAF39753.1| Hypothetical protein C15F1.6
  misc_feature (1)..(165): Homolog of NCBI NO: 13111809 NR Description: Unknown (protein for IMAGE:2901253) [Homo sapiens]
  misc_feature (1)..(165): Homolog of NCBI NO: 24475816 NR Description: glycoprotein, synaptic 2; synaptic glycoprotein [Homo sapiens] >gi|20177939|sp|Q9NZ01|GSN2_HUMAN Synaptic
  misc_feature (1)..(165): Homolog of NCBI NO: 30585427 NR Description: Homo sapiens glycoprotein, synaptic 2 [synthetic
  misc_feature (1)..(184): Homolog of NCBI NO: 33585860 NR Description: Glycoprotein, synaptic 2 [Xenopus laevis]
  misc_feature (1)..(165): Homolog of NCBI NO: 19924091 NR Description: synaptic glycoprotein SC2 [Rattus norvegicus]

SEQ ID NO: 6089 - DNA, 1010 bp, Zea mays subsp. mays
  misc_feature (1)..(1010): Ceres Seq. ID no. 12353858
  misc_feature: MA Experiment ID: 108522 Result: Up-regulated in Transcription
  misc_feature: MA Experiment 108522 PARAMETER Experiment Name: Zm_42deg_Heat_P Parameter: Age (day) Value: 8
  misc_feature: MA Experiment 108522 PARAMETER Experiment Name: Zm_42deg_Heat_P Parameter: Organism Value: Zea mays
  misc_feature: MA Experiment 108522 PARAMETER Experiment Name: Zm_42deg_Heat_P Parameter: Plant Line Value: 35A19
  misc_feature: MA Experiment 108522 PARAMETER Experiment Name: Zm_42deg_Heat_P Parameter: Temperature (deg C) Value: 42 vs. 22
  misc_feature: MA Experiment 108522 PARAMETER Experiment Name: Zm_42deg_Heat_P Parameter: Timepoint (hr) Value: 1
  misc_feature: MA Experiment 108522 PARAMETER Experiment Name: Zm_42deg_Heat_P Parameter: Tissue Value: Aerial
agaaatcagcccgccgtgtcgtgcctactctctccttcccccaaaataaaagaagcgattttgaacggctccgctagctaaagcagggcaaggcggccggaaggcaggaaatccgtacgcacgccgaggtcgaggtcgaggtctcagcagggaggatggagacggagcagcagggcgtggttgcggcggtgaagccgacgctggccaaggggacgccgtcggcgtcgttccggctccgcaacgggagcctaaacgcggtgcgcctccgccgcgtgttcgacctgttcgaccgcaacggggacggcgagatcacggtggacgagctggcgcaggcgctggacgcgctgggcctagacgcggaccgcggcgggctggccgccaccgttggcacctacgtgcccgacggcgccgcaggcctccgctttgaggacttcgaccggctgcaccgcgcgctcggggacgccttcttcggagcgctggcgggccaggacgacgcggccgcggacggcgccggcgccggggaggacgacgacgagcaggagatgcgggaggcgttcagggtcttcgacgtcgacggcgacggcttcatctctgccgccgagctgcaggaggtgctcaagaagctcggcctccccgaggccagcagcatggccaacgtccgggagatgatctgcaacgtcgaccgcgacagcgacggccgcgtcgacttcgccgagttcaagtgcatgatgcaggggatcaccgtctggggcgcctgatcgatcccatcgtcgtcggagcggacgagagtgtgtgtgtgtgtgtcgaggagcgggggcgaggcaaattgaaccacaaagctccgtatttccttcctcgagacagcgatgcgactgcgaccttcattcttgtcttgtcttgtggtggcaccggtgtgtctctacttgtgtgtgctcttcttttaaattcattaattattaatcttgtcgtctttcgctggtcaagcagaggcgatgagaatggttcatgct

SEQ ID NO: 6090 - protein, 200 aa, Zea mays subsp. mays
  peptide (1)..(200): Ceres Seq. ID no. 12353859
  misc_feature (36)..(64): Pfam Name: EF hand Pfam Description: EF hand
  misc_feature (1)..(200): Homolog of NCBI NO: 33146667 NR Description: putative Avr9/Cf-9 rapidly elicited protein 31
  misc_feature (1)..(199): Homolog of NCBI NO: 29467539 NR Description: P0665F09.7 [Oryza sativa (japonica
  misc_feature (10)..(200): Homolog of NCBI NO: 13194672 NR Description: calmodulin-like protein [Pennisetum ciliare]
  misc_feature (22)..(197): Homolog of NCBI NO: 15233402 NR Description: calcium-binding protein - like; protein id:
  misc_feature (4)..(197): Homolog of NCBI NO: 12003380 NR Description: Avr9/Cf-9 rapidly elicited protein 31 [Nicotiana
  misc_feature (22)..(197): Homolog of NCBI NO: 15241500 NR Description: calmodulin-like protein; protein id: At5g44460.1
  misc_feature (18)..(197): Homolog of NCBI NO: 1168782 NR Description: Calcium-binding protein CAST
  misc_feature (22)..(197): Homolog of NCBI NO: 1168696 NR Description: Calcium-binding allergen Bet v 3 (Bet v III)
  misc_feature (19)..(194): Homolog of NCBI NO: 21740787 NR Description: OSJNBb0091E11.1 [Oryza sativa (japonica
  misc_feature (123)..(194): Homolog of NCBI NO: 28301674 NR Description: calcium-binding protein [Lotus japonicus]
METEQQGVVAAVKPTLAKGTPSASFRLRNGSLNAVRLRRVFDLFDRNGDGEITVDELAQALDALGLDADRGGLAATVGTYVPDGAAGLRFEDFDRLHRALGDAFFGALAGQDDAAADGAGAGEDDDEQEMREAFRVFDVDGDGFISAAELQEVLKKLGLPEASSMANVREMICNVDRDSDGRVDFAEFKCMMQGITVWGA

SEQ ID NO: 6091 - DNA, 1017 bp, Zea mays subsp. mays
  misc_feature (1)..(1017): Ceres Seq. ID no. 12349105
  misc_feature: MA Experiment ID: 108527 Result: Up-regulated in Transcription
  misc_feature: MA Experiment 108527 PARAMETER Experiment Name: Zm_5mM_NO_P Parameter: Age (day) Value: 8
  misc_feature: MA Experiment 108527 PARAMETER Experiment Name: Zm_5mM_NO_P Parameter: Organism Value: Zea mays
  misc_feature: MA Experiment 108527 PARAMETER Experiment Name: Zm_5mM_NO_P Parameter: Plant Line Value: 35A19
  misc_feature: MA Experiment 108527 PARAMETER Experiment Name: Zm_5mM_NO_P Parameter: Timepoint (hr) Value: 6
  misc_feature: MA Experiment 108527 PARAMETER Experiment Name: Zm_5mM_NO_P Parameter: Tissue Value: Aerial
  misc_feature: MA Experiment 108527 PARAMETER Experiment Name: Zm_5mM_NO_P Parameter: Treatment Value: 5mM NO vs. No Treatment
  misc_feature: MA Experiment ID: 108545 Result: Down-regulated in Transcription
  misc_feature: MA Experiment 108545 PARAMETER Experiment Name: Zm_Imbibed_Seeds_P Parameter: Age (day) Value: 3 vs. 2
  misc_feature: MA Experiment 108545 PARAMETER Experiment Name: Zm_Imbibed_Seeds_P Parameter: Organism Value: Zea mays
  misc_feature: MA Experiment 108545 PARAMETER Experiment Name: Zm_Imbibed_Seeds_P Parameter: Plant Line Value: 35A19
  misc_feature: MA Experiment 108545 PARAMETER Experiment Name: Zm_Imbibed_Seeds_P Parameter: Tissue Value: Aerial vs. Embryo
  misc_feature: MA Experiment ID: 108688 Result: Down-regulated in Transcription
  misc_feature: MA Experiment 108688 PARAMETER Experiment Name: Zm_Embryos-Flowers__P Parameter: Tissue Value: Immature Flowers vs. Aerial+
  misc_feature: MA Experiment ID: 20000492 Result: Down-regulated in Transcription
  misc_feature: MA Experiment 20000492 PARAMETER Experiment Name: Zm_Hybrid_Seed_Dev_P Parameter: DAP Value: 12
  misc_feature: MA Experiment 20000492 PARAMETER Experiment Name: Zm_Hybrid_Seed_Dev_P Parameter: Organism Value: Zea mays
  misc_feature: MA Experiment 20000492 PARAMETER Experiment Name: Zm_Hybrid_Seed_Dev_P Parameter: Plant Line Value: 35A19
  misc_feature: MA Experiment 20000492 PARAMETER Experiment Name: Zm_Hybrid_Seed_Dev_P Parameter: Tissue Value: Fert Kernel vs. Unfert Floret
  misc_feature: MA Experiment ID: 20000535 Result: Down-regulated in Transcription
  misc_feature: MA Experiment 20000535 PARAMETER Experiment Name: Zm_Hybrid_Seed_Dev_P Parameter: DAP Value: 30 vs. 12
  misc_feature: MA Experiment 20000535 PARAMETER Experiment Name: Zm_Hybrid_Seed_Dev_P Parameter: Organism Value: Zea mays
  misc_feature: MA Experiment 20000535 PARAMETER Experiment Name: Zm_Hybrid_Seed_Dev_P Parameter: Plant Line Value: 35A19
  misc_feature: MA Experiment 20000535 PARAMETER Experiment Name: Zm_Hybrid_Seed_Dev_P Parameter: Tissue Value: Embryo vs. Unfert Floret
gtccagggtagagagagagagggatggtgtgagggagggaagggagcaaaggcaaagcagccaacgaccagagagacacggaggctgagagagagagagagagagagatttgggaatcgagaaagcagcgaggaagaagaagatggagcaggaggaagcgtgcacctcgtcgctgcggcagtgcaggatttgccacgacgaggaggacgagcggcgctccgccatggagtcgccctgcgcctgttccggctccctcaagtacgctcacaggggatgcgtgcagaggtggtgcgacgagaagggaagcgccgtctgcgagatttgcctccagaactttgagccgggctacaccgttcctcccaagaaaacccaacctgctgatgtcgcggtgaccatcagagacagcgtgggggtgcccaggccgcagcacgagcctgaagaggaggagcaggagcaggtggacgcggcgttgatcggaggcagcgacccggagtacgccgagtgcgcgcgcgccgccggcaggagcgcgtcctggtgccggtcggtggccgtcacgttcacggtcgtcctgctgctgaggcacctggtcaccgtggtcacggtcggagcggccaaccagttcgccttcggtctcctcacggtatacttgctgcgggcgagcgggatcctgcttccgttctacctcgtcatgaggctcatctccgtgatccagcaggggcagaggcagtaccgcctccggctgctccaggagcagaggaggcacgcgttgaggtcggcccggctgcacggccaggaacaggaacagcatgtcatcctggttcgctgaggaacgagccattcattcaccttggtgtccatacattccattcatccgtcgtacgcgtacaaggttgtaagatgtaccactccatttttttgttcaggcctttacaagcctaaaaaaagcttatatgtaccaccacttcatttgtaaaccctcaaaatttgttgctgagaagatcgacatatcatgtatag

SEQ ID NO: 6092 - protein, 227 aa, Zea mays subsp. mays
  peptide (1)..(227): Ceres Seq. ID no. 12349106
  misc_feature (14)..(61): Pfam Name: Zinc finger, C3HC4 type (RING finger) Pfam Description: Zinc finger, C3HC4 type (RING finger)
  misc_feature (9)..(223): Homolog of NCBI NO: 25518349 NR Description: hypothetical protein T14P4.10 - Arabidopsis >gi|9972376|gb|AAG10626.1|AC022521_4 Unknown protein [Arabidopsis
  misc_feature (13)..(227): Homolog of NCBI NO: 15227065 NR Description: unknown protein; protein id: At2g02960.1, by cDNA: gi_17529099, supported by cDNA: gi_20259116 [Arabidopsis >gi|25365876|pir||F84442 hypothetical protein At2g02960
  misc_feature (11)..(223): Homolog of NCBI NO: 18411826 NR Description: Expressed protein; protein id: At4g02075.1, by cDNA: gi_4741922 [Arabidopsis thaliana]
  misc_feature (10)..(194): Homolog of NCBI NO: 22325409 NR Description: similar to nucleoside triphosphatase, putative;
  misc_feature (1)..(195): Homolog of NCBI NO: 18424590 NR Description: expressed protein; protein id: At5g62460.1, by cDNA: gi_16974606 [Arabidopsis thaliana] gene_id:K19B1.7~unknown protein [Arabidopsis thaliana]
  misc_feature (1)..(227): Homolog of NCBI NO: 34905532 NR Description: B1146F03.23 [Oryza sativa (japonica
  misc_feature (2)..(198): Homolog of NCBI NO: 30692888 NR Description: expressed protein [Arabidopsis thaliana]
  misc_feature (2)..(195): Homolog of NCBI NO: 15232824 NR Description: putative protein; protein id: At3g47550.1
  misc_feature (2)..(224): Homolog of NCBI NO: 15223693 NR Description: nucleoside triphosphatase, putative; protein id:
  misc_feature (2)..(224): Homolog of NCBI NO: 26451292 NR Description: unknown protein [Arabidopsis thaliana]
MEQEEACTSSLRQCRICHDEEDERRSAMESPCACSGSLKYAHRGCVQRWCDEKGSAVCEICLQNFEPGYTVPPKKTQPADVAVTIRDSVGVPRPQHEPEEEEQEQVDAALIGGSDPEYAECARAAGRSASWCRSVAVTFTVVLLLRHLVTVVTVGAANQFAFGLLTVYLLRASGILLPFYLVMRLISVIQQGQRQYRLRLLQEQRRHALRSARLHGQEQEQHVILVR

SEQ ID NO: 6093 - protein, 200 aa, Zea mays subsp. mays
  peptide (1)..(200): Ceres Seq. ID no. 12349107
  misc_feature (1)..(34): Pfam Name: Zinc finger, C3HC4 type (RING finger) Pfam Description: Zinc finger, C3HC4 type (RING finger)
  misc_feature (1)..(200): Homolog of NCBI NO: 34905532 NR Description: B1146F03.23 [Oryza sativa (japonica
  misc_feature (1)..(196): Homolog of NCBI NO: 25518349 NR Description: hypothetical protein T14P4.10 - Arabidopsis >gi|9972376|gb|AAG10626.1|AC022521_4 Unknown protein [Arabidopsis
  misc_feature (1)..(200): Homolog of NCBI NO: 15227065 NR Description: unknown protein; protein id: At2g02960.1, by cDNA: gi_17529099, supported by cDNA: gi_20259116 [Arabidopsis >gi|25365876|pir||F84442 hypothetical protein At2g02960
  misc_feature (1)..(196): Homolog of NCBI NO: 18411826 NR Description: Expressed protein; protein id: At4g02075.1, by cDNA: gi_4741922 [Arabidopsis thaliana]
  misc_feature (1)..(167): Homolog of NCBI NO: 22325409 NR Description: similar to nucleoside triphosphatase, putative;
  misc_feature (1)..(168): Homolog of NCBI NO: 18424590 NR Description: expressed protein; protein id: At5g62460.1, by cDNA: gi_16974606 [Arabidopsis thaliana] gene_id:K19B1.7~unknown protein [Arabidopsis thaliana]
  misc_feature (1)..(171): Homolog of NCBI NO: 30692888 NR Description: expressed protein [Arabidopsis thaliana]
  misc_feature (1)..(168): Homolog of NCBI NO: 15232824 NR Description: putative protein; protein id: At3g47550.1
  misc_feature (1)..(197): Homolog of NCBI NO: 15223693 NR Description: nucleoside triphosphatase, putative; protein id:
  misc_feature (1)..(197): Homolog of NCBI NO: 26451292 NR Description: unknown protein [Arabidopsis thaliana]
MESPCACSGSLKYAHRGCVQRWCDEKGSAVCEICLQNFEPGYTVPPKKTQPADVAVTIRDSVGVPRPQHEPEEEEQEQVDAALIGGSDPEYAECARAAGRSASWCRSVAVTFTVVLLLRHLVTVVTVGAANQFAFGLLTVYLLRASGILLPFYLVMRLISVIQQGQRQYRLRLLQEQRRHALRSARLHGQEQEQHVILVR

SEQ ID NO: 6094 - DNA, 1250 bp, Zea mays subsp. mays
  misc_feature (1)..(1250): Ceres Seq. ID no. 12365550
  misc_feature: MA Experiment ID: 108528 Result: Up-regulated in Transcription
  misc_feature: MA Experiment 108528 PARAMETER Experiment Name: Zm_Imbibed_Seeds_P Parameter: Age (day) Value: 5 vs. 2
  misc_feature: MA Experiment 108528 PARAMETER Experiment Name: Zm_Imbibed_Seeds_P Parameter: Organism Value: Zea mays
  misc_feature: MA Experiment 108528 PARAMETER Experiment Name: Zm_Imbibed_Seeds_P Parameter: Plant Line Value: 35A19
  misc_feature: MA Experiment 108528 PARAMETER Experiment Name: Zm_Imbibed_Seeds_P Parameter: Tissue Value: Aerial vs. Embryo
  misc_feature: MA Experiment ID: 108530 Result: Up-regulated in Transcription
  misc_feature: MA Experiment 108530 PARAMETER Experiment Name: Zm_Imbibed_Seeds_P Parameter: Age (day) Value: 6 vs. 2
  misc_feature: MA Experiment 108530 PARAMETER Experiment Name: Zm_Imbibed_Seeds_P Parameter: Organism Value: Zea mays
  misc_feature: MA Experiment 108530 PARAMETER Experiment Name: Zm_Imbibed_Seeds_P Parameter: Plant Line Value: 35A19
  misc_feature: MA Experiment 108530 PARAMETER Experiment Name: Zm_Imbibed_Seeds_P Parameter: Tissue Value: Aerial vs. Embryo
  misc_feature: MA Experiment ID: 108545 Result: Up-regulated in Transcription
  misc_feature: MA Experiment 108545 PARAMETER Experiment Name: Zm_Imbibed_Seeds_P Parameter: Age (day) Value: 3 vs. 2
  misc_feature: MA Experiment 108545 PARAMETER Experiment Name: Zm_Imbibed_Seeds_P Parameter: Organism Value: Zea mays
  misc_feature: MA Experiment 108545 PARAMETER Experiment Name: Zm_Imbibed_Seeds_P Parameter: Plant Line Value: 35A19
  misc_feature: MA Experiment 108545 PARAMETER Experiment Name: Zm_Imbibed_Seeds_P Parameter: Tissue Value: Aerial vs. Embryo
  misc_feature: MA Experiment ID: 108547 Result: Up-regulated in Transcription
  misc_feature: MA Experiment 108547 PARAMETER Experiment Name: Zm_Imbibed_Seeds_P Parameter: Age (day) Value: 4 vs. 2
  misc_feature: MA Experiment 108547 PARAMETER Experiment Name: Zm_Imbibed_Seeds_P Parameter: Organism Value: Zea mays
  misc_feature: MA Experiment 108547 PARAMETER Experiment Name: Zm_Imbibed_Seeds_P Parameter: Plant Line Value: 35A19
  misc_feature: MA Experiment 108547 PARAMETER Experiment Name: Zm_Imbibed_Seeds_P Parameter: Tissue Value: Aerial vs. Embryo
  misc_feature: MA Experiment ID: 20000535 Result: Down-regulated in Transcription
  misc_feature: MA Experiment 20000535 PARAMETER Experiment Name: Zm_Hybrid_Seed_Dev_P Parameter: DAP Value: 30 vs. 12
  misc_feature: MA Experiment 20000535 PARAMETER Experiment Name: Zm_Hybrid_Seed_Dev_P Parameter: Organism Value: Zea mays
  misc_feature: MA Experiment 20000535 PARAMETER Experiment Name: Zm_Hybrid_Seed_Dev_P Parameter: Plant Line Value: 35A19
  misc_feature: MA Experiment 20000535 PARAMETER Experiment Name: Zm_Hybrid_Seed_Dev_P Parameter: Tissue Value: Embryo vs. Unfert Floret
ggaacagcctcgttctgtccaagtccaactccaacgaggcaacgactcgtcagtggtcagtacactacaccgtaaccgtcgccggaatcgatcgacccaaagctccctttagagcccgagctctatccaacccacgaacgggatcccgatgcccgtggcggcctcggttctcgccgcagcggcggtctcgcccccgctgacgtggcggagatggactcctcttctcgccgcgtcacatccacaggcgaacccgcctcccgcactgcgcccgcgggcgcccgctcctcctctccgggcctcctccgttccccgcgattcctgcgccggagccgccgtccggaggacgccgtgtgcggcggcggcggcacttggtggatgtgtgaaggcggagtccacggagcgggaggcgctcgatcgggatgctctgaagcgggtggcgctactcgcgcttggctgctgcgctgcagccgccgcgctcggctgcggcgctgcagccgccgcgctcggctgcggcgcggcgcgggcagcggcggaggactccatcaaggcgtcaggattcgggctgcgggtggcggagtcgctgcggaggctcggatggcccgacgacaccgtcgtgttcgcgctcgcgacgctgccggtgatcgagctgcggggggcgatccccgttgggtattggctgcggctccatccagtccgcctcaccatcctatccgttcttgggaacatggtgcctgtaccattcatcatcctctacctgaagaaactcgcaacgtttctgtctcagaacagcgcgtccgcgactcgaattatggacctcctctttgagcgggcacggcgcaaggctgctcctgttgaggaattccagtggctcggcttgatgctgttcgttgccgttccattcccaggcacgggagcgtggacatgggccttcattgcatctgtactaggcatgccgttctggtcaggttttacagcaaatttcgtgggagtcgtccttgcagggctgctggtgaacttgctcatgaatcttggcctgaaatacgcgatcgtcactggagtagttttgttctttgtctcaaccgtcatgtggagtgttcttcgttcccttaagaagtccgttaatgtcaagtgatctagtagtctttatcaaactgttcctaatcccttcagagttcagccttgcgtaggaagcttagttgtgtaattttaagtggaactttcagcttccaagtggatttacaagagagagt

SEQ ID NO: 6095 - protein, 327 aa, Zea mays subsp. mays
  peptide (1)..(327): Ceres Seq. ID no. 12365551
  misc_feature (4)..(327): Homolog of NCBI NO: 34897152 NR Description: unknown protein [Oryza sativa (japonica
  misc_feature (122)..(324): Homolog of NCBI NO: 15227004 NR Description: putative transport protein; protein id: supported by cDNA: 26825. [Arabidopsis thaliana]
  misc_feature (162)..(296): Homolog of NCBI NO: 11499286 NR Description: small multidrug export protein (qacE) fulgidus] >gi|7483962|pir||G69461 small multidrug export protein
  misc_feature (151)..(303): Homolog of NCBI NO: 21227925 NR Description: putative small multi-drug export protein
  misc_feature (156)..(288): Homolog of NCBI NO: 28212098 NR Description: putative small multi-drug export protein
  misc_feature (162)..(290): Homolog of NCBI NO: 15613797 NR Description: small multidrug export related protein [Bacillus >gi|25494717|pir||B83804 small multidrug export related protein
  misc_feature (151)..(303): Homolog of NCBI NO: 23052254 NR Description: hypothetical protein [Methanosarcina barkeri]
  misc_feature (155)..(295): Homolog of NCBI NO: 22537969 NR Description: conserved hypothetical protein [Streptococcus NEM316] >gi|22534870|gb|AAN00693.1|AE014275_1 conserved
  misc_feature (156)..(296): Homolog of NCBI NO: 18978147 NR Description: putative small multidrug export protein; (qacE) furiosus DSM 3638] >gi|18893950|gb|AAL81899.1| putative small
  misc_feature (156)..(287): Homolog of NCBI NO: 14591427 NR Description: hypothetical protein [Pyrococcus horikoshii]
MPVAASVLAAAAVSPPLTWRRWTPLLAASHPQANPPPALRPRAPAPPLRASSVPRDSCAGAAVRRTPCAAAAALGGCVKAESTEREALDRDALKRVALLALGCCAAAAALGCGAAAAALGCGAARAAAEDSIKASGFGLRVAESLRRLGWPDDTVVFALATLPVIELRGAIPVGYWLRLHPVRLTILSVLGNMVPVPFIILYLKKLATFLSQNSASATRIMDLLFERARRKAAPVEEFQWLGLMLFVAVPFPGTGAWTWAFIASVLGMPFWSGFTANFVGVVLAGLLVNLLMNLGLKYAIVTGVVLFFVSTVMWSVLRSLKKSVNVK

SEQ ID NO: 6096 - protein, 204 aa, Zea mays subsp. mays
  peptide (1)..(204): Ceres Seq. ID no. 12365552
MDSSSRRVTSTGEPASRTAPAGARSSSPGLLRSPRFLRRSRRPEDAVCGGGGTWWMCEGGVHGAGGARSGCSEAGGATRAWLLRCSRRARLRRCSRRARLRRGAGSGGGLHQGVRIRAAGGGVAAEARMARRHRRVRARDAAGDRAAGGDPRWVLAAAPSSPPHHPIRSWEHGACTIHHPLPEETRNVSVSEQRVRDSNYGPPL

SEQ ID NO: 6097 - DNA, 999 bp, Zea mays subsp. mays
  misc_feature (1)..(999): Ceres Seq. ID no. 12342921
  misc_feature: MA Experiment ID: 108522 Result: Down-regulated in Transcription
  misc_feature: MA Experiment 108522 PARAMETER Experiment Name: Zm_42deg_Heat_P Parameter: Age (day) Value: 8
  misc_feature: MA Experiment 108522 PARAMETER Experiment Name: Zm_42deg_Heat_P Parameter: Organism Value: Zea mays
  misc_feature: MA Experiment 108522 PARAMETER Experiment Name: Zm_42deg_Heat_P Parameter: Plant Line Value: 35A19
  misc_feature: MA Experiment 108522 PARAMETER Experiment Name: Zm_42deg_Heat_P Parameter: Temperature (deg C) Value: 42 vs. 22
  misc_feature: MA Experiment 108522 PARAMETER Experiment Name: Zm_42deg_Heat_P Parameter: Timepoint (hr) Value: 1
  misc_feature: MA Experiment 108522 PARAMETER Experiment Name: Zm_42deg_Heat_P Parameter: Tissue Value: Aerial
  misc_feature: MA Experiment ID: 108535 Result: Up-regulated in Transcription
  misc_feature: MA Experiment 108535 PARAMETER Experiment Name: Zm_Meristem_P Parameter: Age (day) Value: 8
  misc_feature: MA Experiment 108535 PARAMETER Experiment Name: Zm_Meristem_P Parameter: Organism Value: Zea mays
  misc_feature: MA Experiment 108535 PARAMETER Experiment Name: Zm_Meristem_P Parameter: Plant Line Value: 35A19
  misc_feature: MA Experiment 108535 PARAMETER Experiment Name: Zm_Meristem_P Parameter: Tissue Value: Root Meristem vs. Above Root Meristem
  misc_feature: MA Experiment ID: 108544 Result: Down-regulated in Transcription
  misc_feature: MA Experiment ID: 20000108 Result: Up-regulated in Transcription
  misc_feature: MA Experiment 20000108 PARAMETER Experiment Name: Zm_Root-Tips_P Parameter: Age (day) Value: 12
  misc_feature: MA Experiment 20000108 PARAMETER Experiment Name: Zm_Root-Tips_P Parameter: Organism Value: Zea mays
  misc_feature: MA Experiment 20000108 PARAMETER Experiment Name: Zm_Root-Tips_P Parameter: Tissue Value: Root tips vs. Root mid region    35
  misc_feature: MA Experiment 20000108 PARAMETER Experiment Name: Zm_Root-Tips_P Parameter: Tissue Value: Root tips vs. Root mid region   Sequence Listing-Misc Features (4)
  misc_feature: MA Experiment ID: 20000487 Result: Up-regulated in Transcription
  misc_feature: MA Experiment 20000487 PARAMETER Experiment Name: Zm_50mM_NH4NO3_L_to_H_P Parameter: Organism Value: Zea mays
  misc_feature: MA Experiment 20000487 PARAMETER Experiment Name: Zm_50mM_NH4NO3_L_to_H_P Parameter: Timepoint (hr) Value: 4
  misc_feature: MA Experiment 20000487 PARAMETER Experiment Name: Zm_50mM_NH4NO3_L_to_H_P Parameter: Tissue Value: Leaves
  misc_feature: MA Experiment 20000487 PARAMETER Experiment Name: Zm_50mM_NH4NO3_L_to_H_P Parameter: Treatment Value: 50mM NH4NO3 vs. 100mM Mannitol
  misc_feature: MA Experiment ID: 20000488 Result: Up-regulated in Transcription
  misc_feature: MA Experiment 20000488 PARAMETER Experiment Name: Zm_50mM_NH4NO3_L_to_H_P Parameter: Organism Value: Zea mays
  misc_feature: MA Experiment 20000488 PARAMETER Experiment Name: Zm_50mM_NH4NO3_L_to_H_P Parameter: Timepoint (hr) Value: 8
  misc_feature: MA Experiment 20000488 PARAMETER Experiment Name: Zm_50mM_NH4NO3_L_to_H_P Parameter: Tissue Value: Leaves
  misc_feature: MA Experiment 20000488 PARAMETER Experiment Name: Zm_50mM_NH4NO3_L_to_H_P Parameter: Treatment Value: 50mM NH4NO3 vs. 100mM Mannitol
  misc_feature: MA Experiment ID: 20001612 Result: Up-regulated in Transcription
  misc_feature: MA Experiment 20001612 PARAMETER Experiment Name: Zm_50ppm_KNO3_L-to-H_P Parameter: Age (day) Value: 19
  misc_feature: MA Experiment 20001612 PARAMETER Experiment Name: Zm_50ppm_KNO3_L-to-H_P Parameter: Organism Value: Zea mays
  misc_feature: MA Experiment 20001612 PARAMETER Experiment Name: Zm_50ppm_KNO3_L-to-H_P Parameter: Plant Line Value: 35A19
  misc_feature: MA Experiment 20001612 PARAMETER Experiment Name: Zm_50ppm_KNO3_L-to-H_P Parameter: Timepoint (hr) Value: 8
  misc_feature: MA Experiment 20001612 PARAMETER Experiment Name: Zm_50ppm_KNO3_L-to-H_P Parameter: Tissue Value: Roots
  misc_feature: MA Experiment 20001612 PARAMETER Experiment Name: Zm_50ppm_KNO3_L-to-H_P Parameter: Treatment Value: 50ppm KNO3 vs. 50ppm KCl
aagaaaaaccctacgtgtcacaagcctccgcctcttctcccgtttgcgacgactgggtgggctacgccgccgccgccgccgctgccgctgctctacggtgctgagtcctttgccgatttcttcccggcgaagagcgccaccagccttttgcataaatcatcgggtatacatccatcttcatttagtagatccgcccctgctgaaaacgcactcgatggcgtccgcgacggggggttcctcctcggagatggcggtggaccacgcgacggggctgggcaccgtggagaagccgcggtttgatgctctgatgccgagtgagatgagcggcgggaggacccagttccggaaagtgaccgtgccgcagcaccggttcgcgccgctcaagcgatgctggatggaaatctacacacccgtttacgagcacatgaagatcgacatacgcatgaatctcaaggcgaggagggtggagctaaagacaaggcaagacacaccagatgtcagcaaccttcagaaatgtgctgactttgtgcatgcttttatgctcgggttcgacattgctgatgccgtcgccttgctgcgtcttgatgatctgtatgtggattcctttgagatcaaggacgtgaagaccttgcgaggggagcatctgtcgcgcgctattggccgcttatcagggaaaggaggcaagaccaagtacgccattgagaactcaaccaggacccgcatcgtcatcgctgatacaaagatccacatacttggatccttcgttaacatcaaggtcgcgcgggattcactttgcagtctcatcttgggttctcctgctggcaaagtgtattctaaactaagggctgtatcagctaggttggcggaaaggtattaaattaaatggggtttgcccgcaccgtataagggcatgttcggttcccctcaattcatatggattggagggatttgagtgggattaattccatatcaagtcaaaattcttcataatttttttcc

SEQ ID NO: 6098 - protein, 291 aa, Zea mays subsp. mays
  peptide (1)..(291): Ceres Seq. ID no. 12342922
  misc_feature (72)..(197): Homolog of NCBI NO: 33669476 NR Description: partner of Nob1 [Sorghum bicolor]
  misc_feature (199)..(291): Homolog of NCBI NO: 33669476 NR Description: partner of Nob1 [Sorghum bicolor]
  misc_feature (83)..(291): Homolog of NCBI NO: 34902190 NR Description: Hypothetical protein [Oryza sativa (japonica group)] >gi|27476101|gb|AAO17032.1| Hypothetical protein [Oryza
  misc_feature (73)..(291): Homolog of NCBI NO: 34908792 NR Description: P0415A04.33 [Oryza sativa (japonica
  misc_feature (80)..(289): Homolog of NCBI NO: 18399930 NR Description: expressed protein; protein id: At3g13230.1, by cDNA: 22588. [Arabidopsis thaliana] gb|AAF50915.1~gene_id:MDC11.5~similar to unknown protein
  misc_feature (63)..(290): Homolog of NCBI NO: 20129085 NR Description: CG11738-PA [Drosophila melanogaster]
  misc_feature (79)..(291): Homolog of NCBI NO: 33989460 NR Description: Unknown (protein for MGC:65782) [Danio rerio]
  misc_feature (95)..(291): Homolog of NCBI NO: 27503881 NR Description: Similar to putatative 28 kDa protein [Xenopus
  misc_feature (71)..(291): Homolog of NCBI NO: 40018534 NR Description: putatative 28 kDa protein; partner of Nob1 norvegicus] >gi|33669474|gb|AAQ24834.1| partner of Nob1 [Rattus
  misc_feature (73)..(291): Homolog of NCBI NO: 10047140 NR Description: putatative 28 kDa protein [Homo sapiens]
RKTLRVTSLRLFSRLRRLGGLRRRRRRCRCSTVLSPLPISSRRRAPPAFCINHRVYIHLHLVDPPLLKTHSMASATGGSSSEMAVDHATGLGTVEKPRFDALMPSEMSGGRTQFRKVTVPQHRFAPLKRCWMEIYTPVYEHMKIDIRMNLKARRVELKTRQDTPDVSNLQKCADFVHAFMLGFDIADAVALLRLDDLYVDSFEIKDVKTLRGEHLSRAIGRLSGKGGKTKYAIENSTRTRIVIADTKIHILGSFVNIKVARDSLCSLILGSPAGKVYSKLRAVSARLAERY

SEQ ID NO: 6099 - protein, 220 aa, Zea mays subsp. mays
  peptide (1)..(220): Ceres Seq. ID no. 12342923
  misc_feature (1)..(126): Homolog of NCBI NO: 33669476 NR Description: partner of Nob1 [Sorghum bicolor]
  misc_feature (128)..(220): Homolog of NCBI NO: 33669476 NR Description: partner of Nob1 [Sorghum bicolor]
  misc_feature (12)..(220): Homolog of NCBI NO: 34902190 NR Description: Hypothetical protein [Oryza sativa (japonica group)] >gi|27476101|gb|AAO17032.1| Hypothetical protein [Oryza
  misc_feature (2)..(220): Homolog of NCBI NO: 34908792 NR Description: P0415A04.33 [Oryza sativa (japonica
  misc_feature (9)..(218): Homolog of NCBI NO: 18399930 NR Description: expressed protein; protein id: At3g13230.1, by cDNA: 22588. [Arabidopsis thaliana] gb|AAF50915.1~gene_id:MDC11.5~similar to unknown protein
  misc_feature (1)..(219): Homolog of NCBI NO: 20129085 NR Description: CG11738-PA [Drosophila melanogaster]
  misc_feature (8)..(220): Homolog of NCBI NO: 33989460 NR Description: Unknown (protein for MGC:65782) [Danio rerio]
  misc_feature (24)..(220): Homolog of NCBI NO: 27503881 NR Description: Similar to putatative 28 kDa protein [Xenopus
  misc_feature (1)..(220): Homolog of NCBI NO: 40018534 NR Description: putatative 28 kDa protein; partner of Nob1 norvegicus] >gi|33669474|gb|AAQ24834.1| partner of Nob1 [Rattus
  misc_feature (2)..(220): Homolog of NCBI NO: 10047140 NR Description: putatative 28 kDa protein [Homo sapiens]
MASATGGSSSEMAVDHATGLGTVEKPRFDALMPSEMSGGRTQFRKVTVPQHRFAPLKRCWMEIYTPVYEHMKIDIRMNLKARRVELKTRQDTPDVSNLQKCADFVHAFMLGFDIADAVALLRLDDLYVDSFEIKDVKTLRGEHLSRAIGRLSGKGGKTKYAIENSTRTRIVIADTKIHILGSFVNIKVARDSLCSLILGSPAGKVYSKLRAVSARLAERY

SEQ ID NO: 6100 - protein, 209 aa, Zea mays subsp. mays
  peptide (1)..(209): Ceres Seq. ID no. 12342924
  misc_feature (1)..(115): Homolog of NCBI NO: 33669476 NR Description: partner of Nob1 [Sorghum bicolor]
  misc_feature (117)..(209): Homolog of NCBI NO: 33669476 NR Description: partner of Nob1 [Sorghum bicolor]
  misc_feature (1)..(209): Homolog of NCBI NO: 34902190 NR Description: Hypothetical protein [Oryza sativa (japonica group)] >gi|27476101|gb|AAO17032.1| Hypothetical protein [Oryza
  misc_feature (1)..(209): Homolog of NCBI NO: 34908792 NR Description: P0415A04.33 [Oryza sativa (japonica
  misc_feature (1)..(207): Homolog of NCBI NO: 18399930 NR Description: expressed protein; protein id: At3g13230.1, by cDNA: 22588. [Arabidopsis thaliana] gb|AAF50915.1~gene_id:MDC11.5~similar to unknown protein
  misc_feature (1)..(208): Homolog of NCBI NO: 20129085 NR Description: CG11738-PA [Drosophila melanogaster]
  misc_feature (1)..(209): Homolog of NCBI NO: 33989460 NR Description: Unknown (protein for MGC:65782) [Danio rerio]
  misc_feature (13)..(209): Homolog of NCBI NO: 27503881 NR Description: Similar to putatative 28 kDa protein [Xenopus
  misc_feature (1)..(209): Homolog of NCBI NO: 40018534 NR Description: putatative 28 kDa protein; partner of Nob1 norvegicus] >gi|33669474|gb|AAQ24834.1| partner of Nob1 [Rattus
  misc_feature (1)..(209): Homolog of NCBI NO: 10047140 NR Description: putatative 28 kDa protein [Homo sapiens]
MAVDHATGLGTVEKPRFDALMPSEMSGGRTQFRKVTVPQHRFAPLKRCWMEIYTPVYEHMKIDIRMNLKARRVELKTRQDTPDVSNLQKCADFVHAFMLGFDIADAVALLRLDDLYVDSFEIKDVKTLRGEHLSRAIGRLSGKGGKTKYAIENSTRTRIVIADTKIHILGSFVNIKVARDSLCSLILGSPAGKVYSKLRAVSARLAERY

SEQ ID NO: 6101 - DNA, 1124 bp, Zea mays subsp. mays
  misc_feature (1)..(1124): Ceres Seq. ID no. 12403543
  misc_feature: MA Experiment ID: 108530 Result: Down-regulated in Transcription
  misc_feature: MA Experiment 108530 PARAMETER Experiment Name: Zm_Imbibed_Seeds_P Parameter: Age (day) Value: 6 vs. 2
  misc_feature: MA Experiment 108530 PARAMETER Experiment Name: Zm_Imbibed_Seeds_P Parameter: Organism Value: Zea mays
  misc_feature: MA Experiment 108530 PARAMETER Experiment Name: Zm_Imbibed_Seeds_P Parameter: Plant Line Value: 35A19
  misc_feature: MA Experiment 108530 PARAMETER Experiment Name: Zm_Imbibed_Seeds_P Parameter: Tissue Value: Aerial vs. Embryo
  misc_feature: MA Experiment ID: 108543 Result: Up-regulated in Transcription
  misc_feature: MA Experiment ID: 108544 Result: Down-regulated in Transcription
  misc_feature: MA Experiment ID: 108688 Result: Down-regulated in Transcription
  misc_feature: MA Experiment 108688 PARAMETER Experiment Name: Zm_Embryos-Flowers__P Parameter: Tissue Value: Immature Flowers vs. Aerial+
  misc_feature: MA Experiment ID: 20000477 Result: Down-regulated in Transcription
  misc_feature: MA Experiment 20000477 PARAMETER Experiment Name: Zm_5mM_SA_P Parameter: Age (day) Value: 10
  misc_feature: MA Experiment 20000477 PARAMETER Experiment Name: Zm_5mM_SA_P Parameter: Organism Value: Zea mays
  misc_feature: MA Experiment 20000477 PARAMETER Experiment Name: Zm_5mM_SA_P Parameter: Plant Line Value: 35A19
  misc_feature: MA Experiment 20000477 PARAMETER Experiment Name: Zm_5mM_SA_P Parameter: Timepoint (hr) Value: 48
  misc_feature: MA Experiment 20000477 PARAMETER Experiment Name: Zm_5mM_SA_P Parameter: Tissue Value: Aerial
  misc_feature: MA Experiment 20000477 PARAMETER Experiment Name: Zm_5mM_SA_P Parameter: Treatment Value: 5mM SA vs. No Treatment
  misc_feature: MA Experiment ID: 20000479 Result: Down-regulated in Transcription
  misc_feature: MA Experiment 20000479 PARAMETER Experiment Name: Zm_Drought_P Parameter: Age (day) Value: 10
  misc_feature: MA Experiment 20000479 PARAMETER Experiment Name: Zm_Drought_P Parameter: Organism Value: Zea mays
  misc_feature: MA Experiment 20000479 PARAMETER Experiment Name: Zm_Drought_P Parameter: Plant Line Value: 35A19
  misc_feature: MA Experiment 20000479 PARAMETER Experiment Name: Zm_Drought_P Parameter: Timepoint (hr) Value: 48
  misc_feature: MA Experiment 20000479 PARAMETER Experiment Name: Zm_Drought_P Parameter: Tissue Value: Aerial
  misc_feature: MA Experiment 20000479 PARAMETER Experiment Name: Zm_Drought_P Parameter: Treatment Value: Drought vs. No Drought
  misc_feature: MA Experiment ID: 20000480 Result: Down-regulated in Transcription
  misc_feature: MA Experiment 20000480 PARAMETER Experiment Name: Zm_Drought_P Parameter: Age (day) Value: 11
  misc_feature: MA Experiment 20000480 PARAMETER Experiment Name: Zm_Drought_P Parameter: Organism Value: Zea mays
  misc_feature: MA Experiment 20000480 PARAMETER Experiment Name: Zm_Drought_P Parameter: Plant Line Value: 35A19
  misc_feature: MA Experiment 20000480 PARAMETER Experiment Name: Zm_Drought_P Parameter: Timepoint (hr) Value: 72
  misc_feature: MA Experiment 20000480 PARAMETER Experiment Name: Zm_Drought_P Parameter: Tissue Value: Aerial
  misc_feature: MA Experiment 20000480 PARAMETER Experiment Name: Zm_Drought_P Parameter: Treatment Value: Drought vs. No Drought
actgttgcagctgcaaaatactgttgcagctgcaatcactagagagaaaatactgtagaagccgcagccgcagtcggattaaagccgcagcgaacaagcccatatatcgccgtcagagccatcaccccgatggatccctgcgcttcgtgctcaggttcagcggaaactgagccgtgagcaccgccgccgccaccanntttgcgtttgcggtgacgacacgacaccaataatggcggcggcaaggacaaggagcctgctcgcggcggcgttcctggcgctggcggcggtgccggcggtgctctgccaggcgccaggccccgcggcggcggcgccgnccaacaagggcccgccgaacgttacggcgatcctggagaagnncgggcagtacnngacgttcatncggctgatgaagtngacgcagcagnacacncagctgaacgnccagctgaacaactcgttcggcagcgggtacacggtgttcgcgcccaccgacagcgccttctccagcctcaagcccggcacgctgaacaagctgtcgcagcagnagcaggtgtcgntggtgcagtaccacgtcctgccgcagttctactcgctcgactnnttcgagaccgccagcaaccccgtgcgtacgcaggcgtcnngctcnnacgggccctacacgctcaacatcaccgccgacagcagcggccaggccaacgtgtccacgggcctcgtcgccaccngcgtcnnccannccctgcgcgcgcagcagcccctcgccgtctactccgtcgaccaggtgctgctggccaacgacctgttcggcgtcaagcccccggcgtccgcgccgcccgccgccaggaagccggccaagggcgggtccgtcgccgaggcgcncgccgccggctcgntgacgcgccgccctccgnncggccgcgcgcggcgccagcaggaccgccggatggagctcgctgcnccgctctgctgttcctggccgccgcggcctccttcctgtccctgttgtgagaatgtaaacatggttcgtgcttgtcgagcacaaaagagctcgtcttcttgcggtttgtttctcttctggagttctagtaacctggatctgtccctgaatgttgatgaagccagctgtt

SEQ ID NO: 6102 - protein, 298 aa, Zea mays subsp. mays
  peptide (1)..(298): Ceres Seq. ID no. 12403544
  misc_feature (45)..(186): Pfam Name: Fasciclin domain Pfam Description: Fasciclin domain
  misc_feature (7)..(230): Homolog of NCBI NO: 34910950 NR Description: putative arabinogalactan-like protein [Oryza
  misc_feature (1)..(220): Homolog of NCBI NO: 2129473 NR Description: arabinogalactan-like protein - loblolly pine
  misc_feature (1)..(219): Homolog of NCBI NO: 15242651 NR Description: fasciclin-like arabinogalactan-protein (FLA11); id: At5g03170.1, supported by cDNA: 14950., supported by cDNA:
  misc_feature (4)..(225): Homolog of NCBI NO: 18379157 NR Description: fasciclin-like arabinogalactan-protein (FLA9); id: At1g03870.1, supported by cDNA: 39763., supported by cDNA: [Arabidopsis thaliana] >gi|25350180|pir||D86169 hypothetical
  misc_feature (1)..(219): Homolog of NCBI NO: 21553523 NR Description: arabinogalactan protein-like [Arabidopsis
  misc_feature (4)..(225): Homolog of NCBI NO: 24417458 NR Description: unknown [Arabidopsis thaliana]
  misc_feature (1)..(228): Homolog of NCBI NO: 15241423 NR Description: fasciclin-like arabinogalactan-protein, putative protein id: At5g44130.1, supported by cDNA: gi_16648846, by cDNA: gi_20466118 [Arabidopsis thaliana]
  misc_feature (9)..(222): Homolog of NCBI NO: 5919185 NR Description: arabinogalactan protein Pop14A9 [Populus x
  misc_feature (24)..(215): Homolog of NCBI NO: 30841338 NR Description: arabinogalactan protein [Gossypium hirsutum]
  misc_feature (9)..(208): Homolog of NCBI NO: 15239344 NR Description: fasciclin-like arabinogalactan-protein (FLA12); id: At5g60490.1, supported by cDNA: 15239., supported by cDNA:
  misc_feature (36)..(36): Xaa is any aa, unknown or other
  misc_feature (50)..(50): Xaa is any aa, unknown or other
  misc_feature (54)..(54): Xaa is any aa, unknown or other
  misc_feature (57)..(57): Xaa is any aa, unknown or other
  misc_feature (62)..(62): Xaa is any aa, unknown or other
  misc_feature (66)..(66): Xaa is any aa, unknown or other
  misc_feature (67)..(67): Xaa is any aa, unknown or other
  misc_feature (71)..(71): Xaa is any aa, unknown or other
  misc_feature (106)..(106): Xaa is any aa, unknown or other
  misc_feature (110)..(110): Xaa is any aa, unknown or other
  misc_feature (124)..(124): Xaa is any aa, unknown or other
  misc_feature (137)..(137): Xaa is any aa, unknown or other
  misc_feature (138)..(138): Xaa is any aa, unknown or other
  misc_feature (139)..(139): Xaa is any aa, unknown or other
  misc_feature (140)..(140): Xaa is any aa, unknown or other
  misc_feature (165)..(165): Xaa is any aa, unknown or other
  misc_feature (167)..(167): Xaa is any aa, unknown or other
  misc_feature (168)..(168): Xaa is any aa, unknown or other
  misc_feature (169)..(169): Xaa is any aa, unknown or other
  misc_feature (216)..(216): Xaa is any aa, unknown or other
  misc_feature (221)..(221): Xaa is any aa, unknown or other
  misc_feature (227)..(227): Xaa is any aa, unknown or other
  misc_feature (242)..(242): Xaa is any aa, unknown or other
MAAARTRSLLAAAFLALAAVPAVLCQAPGPAAAAPXNKGPPNVTAILEKXGQYXTFXRLMKXTQQXXQLNXQLNNSFGSGYTVFAPTDSAFSSLKPGTLNKLSQQXQVSXVQYHVLPQFYSLDXFETASNPVRTQAXXXXGPYTLNITADSSGQANVSTGLVATXVXXXLRAQQPLAVYSVDQVLLANDLFGVKPPASAPPAARKPAKGGSVAEAXAAGSXTRRPPXGRARRQQDRRMELAXPLCCSWPPRPPSCPCCENVNMVRACRAQKSSSSCGLFLFWSSSNLDLSLNVDEASC

SEQ ID NO: 6103 - protein, 239 aa, Zea mays subsp. mays
  peptide (1)..(239): Ceres Seq. ID no. 12403545
  misc_feature (1)..(127): Pfam Name: Fasciclin domain Pfam Description: Fasciclin domain
  misc_feature (1)..(171): Homolog of NCBI NO: 34910950 NR Description: putative arabinogalactan-like protein [Oryza
  misc_feature (1)..(161): Homolog of NCBI NO: 2129473 NR Description: arabinogalactan-like protein - loblolly pine
  misc_feature (1)..(160): Homolog of NCBI NO: 15242651 NR Description: fasciclin-like arabinogalactan-protein (FLA11); id: At5g03170.1, supported by cDNA: 14950., supported by cDNA:
  misc_feature (1)..(166): Homolog of NCBI NO: 18379157 NR Description: fasciclin-like arabinogalactan-protein (FLA9); id: At1g03870.1, supported by cDNA: 39763., supported by cDNA: [Arabidopsis thaliana] >gi|25350180|pir||D86169 hypothetical
  misc_feature (1)..(160): Homolog of NCBI NO: 21553523 NR Description: arabinogalactan protein-like [Arabidopsis
  misc_feature (1)..(166): Homolog of NCBI NO: 24417458 NR Description: unknown [Arabidopsis thaliana]
  misc_feature (1)..(169): Homolog of NCBI NO: 15241423 NR Description: fasciclin-like arabinogalactan-protein, putative protein id: At5g44130.1, supported by cDNA: gi_16648846, by cDNA: gi_20466118 [Arabidopsis thaliana]
  misc_feature (1)..(163): Homolog of NCBI NO: 5919185 NR Description: arabinogalactan protein Pop14A9 [Populus x
  misc_feature (1)..(156): Homolog of NCBI NO: 30841338 NR Description: arabinogalactan protein [Gossypium hirsutum]
  misc_feature (1)..(149): Homolog of NCBI NO: 15239344 NR Description: fasciclin-like arabinogalactan-protein (FLA12); id: At5g60490.1, supported by cDNA: 15239., supported by cDNA:
  misc_feature (3)..(3): Xaa is any aa, unknown or other
  misc_feature (7)..(7): Xaa is any aa, unknown or other
  misc_feature (8)..(8): Xaa is any aa, unknown or other
  misc_feature (12)..(12): Xaa is any aa, unknown or other
  misc_feature (47)..(47): Xaa is any aa, unknown or other
  misc_feature (51)..(51): Xaa is any aa, unknown or other
  misc_feature (65)..(65): Xaa is any aa, unknown or other
  misc_feature (78)..(78): Xaa is any aa, unknown or other
  misc_feature (79)..(79): Xaa is any aa, unknown or other
  misc_feature (80)..(80): Xaa is any aa, unknown or other
  misc_feature (81)..(81): Xaa is any aa, unknown or other
  misc_feature (106)..(106): Xaa is any aa, unknown or other
  misc_feature (108)..(108): Xaa is any aa, unknown or other
  misc_feature (109)..(109): Xaa is any aa, unknown or other
  misc_feature (110)..(110): Xaa is any aa, unknown or other
  misc_feature (157)..(157): Xaa is any aa, unknown or other
  misc_feature (162)..(162): Xaa is any aa, unknown or other
  misc_feature (168)..(168): Xaa is any aa, unknown or other
  misc_feature (183)..(183): Xaa is any aa, unknown or other
MKXTQQXXQLNXQLNNSFGSGYTVFAPTDSAFSSLKPGTLNKLSQQXQVSXVQYHVLPQFYSLDXFETASNPVRTQAXXXXGPYTLNITADSSGQANVSTGLVATXVXXXLRAQQPLAVYSVDQVLLANDLFGVKPPASAPPAARKPAKGGSVAEAXAAGSXTRRPPXGRARRQQDRRMELAXPLCCSWPPRPPSCPCCENVNMVRACRAQKSSSSCGLFLFWSSSNLDLSLNVDEASC

SEQ ID NO: 6104 - DNA, 667 bp, Zea mays subsp. mays
  misc_feature (1)..(667): Ceres Seq. ID no. 12353842
  misc_feature: MA Experiment ID: 108527 Result: Up-regulated in Transcription
  misc_feature: MA Experiment 108527 PARAMETER Experiment Name: Zm_5mM_NO_P Parameter: Age (day) Value: 8
  misc_feature: MA Experiment 108527 PARAMETER Experiment Name: Zm_5mM_NO_P Parameter: Organism Value: Zea mays
  misc_feature: MA Experiment 108527 PARAMETER Experiment Name: Zm_5mM_NO_P Parameter: Plant Line Value: 35A19
  misc_feature: MA Experiment 108527 PARAMETER Experiment Name: Zm_5mM_NO_P Parameter: Timepoint (hr) Value: 6
  misc_feature: MA Experiment 108527 PARAMETER Experiment Name: Zm_5mM_NO_P Parameter: Tissue Value: Aerial
  misc_feature: MA Experiment 108527 PARAMETER Experiment Name: Zm_5mM_NO_P Parameter: Treatment Value: 5mM NO vs. No Treatment
  misc_feature: MA Experiment ID: 108534 Result: Up-regulated in Transcription
  misc_feature: MA Experiment 108534 PARAMETER Experiment Name: Zm_4deg_Cold_P Parameter: Age (hr) Value: 8
  misc_feature: MA Experiment 108534 PARAMETER Experiment Name: Zm_4deg_Cold_P Parameter: Organism Value: Zea mays
  misc_feature: MA Experiment 108534 PARAMETER Experiment Name: Zm_4deg_Cold_P Parameter: Plant Line Value: 35A19
  misc_feature: MA Experiment 108534 PARAMETER Experiment Name: Zm_4deg_Cold_P Parameter: Temperature (deg C) Value: 4 vs. 22
  misc_feature: MA Experiment 108534 PARAMETER Experiment Name: Zm_4deg_Cold_P Parameter: Timepoint (hr) Value: 6
  misc_feature: MA Experiment 108534 PARAMETER Experiment Name: Zm_4deg_Cold_P Parameter: Tissue Value: Aerial
  misc_feature: MA Experiment ID: 108536 Result: Up-regulated in Transcription
  misc_feature: MA Experiment 108536 PARAMETER Experiment Name: Zm_Meristem_P Parameter: Age (day) Value: 8
  misc_feature: MA Experiment 108536 PARAMETER Experiment Name: Zm_Meristem_P Parameter: Organism Value: Zea mays
  misc_feature: MA Experiment 108536 PARAMETER Experiment Name: Zm_Meristem_P Parameter: Plant Line Value: 35A19
  misc_feature: MA Experiment 108536 PARAMETER Experiment Name: Zm_Meristem_P Parameter: Tissue Value: Shoot Meristem vs. Above Shoot Meristem
  misc_feature: MA Experiment ID: 108559 Result: Up-regulated in Transcription
  misc_feature: MA Experiment 108559 PARAMETER Experiment Name: Zm_5mM_NO_P Parameter: Age (day) Value: 8
  misc_feature: MA Experiment 108559 PARAMETER Experiment Name: Zm_5mM_NO_P Parameter: Organism Value: Zea mays
  misc_feature: MA Experiment 108559 PARAMETER Experiment Name: Zm_5mM_NO_P Parameter: Plant Line Value: 35A19
  misc_feature: MA Experiment 108559 PARAMETER Experiment Name: Zm_5mM_NO_P Parameter: Timepoint (hr) Value: 12
  misc_feature: MA Experiment 108559 PARAMETER Experiment Name: Zm_5mM_NO_P Parameter: Tissue Value: Aerial
  misc_feature: MA Experiment 108559 PARAMETER Experiment Name: Zm_5mM_NO_P Parameter: Treatment Value: 5mM NO vs. No Treatment
  misc_feature: MA Experiment ID: 20000535 Result: Down-regulated in Transcription
  misc_feature: MA Experiment 20000535 PARAMETER Experiment Name: Zm_Hybrid_Seed_Dev_P Parameter: DAP Value: 30 vs. 12
  misc_feature: MA Experiment 20000535 PARAMETER Experiment Name: Zm_Hybrid_Seed_Dev_P Parameter: Organism Value: Zea mays
  misc_feature: MA Experiment 20000535 PARAMETER Experiment Name: Zm_Hybrid_Seed_Dev_P Parameter: Plant Line Value: 35A19
  misc_feature: MA Experiment 20000535 PARAMETER Experiment Name: Zm_Hybrid_Seed_Dev_P Parameter: Tissue Value: Embryo vs. Unfert Floret
  misc_feature: MA Experiment ID: 20001608 Result: Down-regulated in Transcription
  misc_feature: MA Experiment 20001608 PARAMETER Experiment Name: Zm_50ppm_KNO3_L-to-H_P Parameter: Age (day) Value: 21
  misc_feature: MA Experiment 20001608 PARAMETER Experiment Name: Zm_50ppm_KNO3_L-to-H_P Parameter: Organism Value: Zea mays
  misc_feature: MA Experiment 20001608 PARAMETER Experiment Name: Zm_50ppm_KNO3_L-to-H_P Parameter: Plant Line Value: 35A19
  misc_feature: MA Experiment 20001608 PARAMETER Experiment Name: Zm_50ppm_KNO3_L-to-H_P Parameter: Timepoint (hr) Value: 48
  misc_feature: MA Experiment 20001608 PARAMETER Experiment Name: Zm_50ppm_KNO3_L-to-H_P Parameter: Tissue Value: Shoots
  misc_feature: MA Experiment 20001608 PARAMETER Experiment Name: Zm_50ppm_KNO3_L-to-H_P Parameter: Treatment Value: 50ppm KNO3 vs. 50ppm KCl
aatcgtccatccgtatttccgtcacaactcacaacccgagccccccaaacccgaagcagcaggagctcccctgaccttgctccgcctccgatcaaggaaaaggaagatgagctactacggccagcagccccccgtcggcgtcccgccgcagcaaggctacccggggaaggacggctacccgccagcggggtacccgccggccggctaccccccgccggcgcagggctacccgcagcagggttacccacagcagggctacccgccgcagtacgcgcagccgcctccacagcagcagcagagcagcgggccttccttcatggaaggatgcttggctgccctctgctgctgctgcctcctggacgcctgcttctgacggatccatccgtgccgggttcaacacggctgcaagtgaagcaacaagcttacggaagagctggaactgggccgtgctattctagctttgtcctgcgttatcgccctcttttcttttcttttcttttttttttctctctctctctctctctgttataagactactggtactctgtcgatgtcgattggattagactagggctggtgtgtattctgtggatgctccgtgtttctggtgggattcaagttcaaacctgggattattgtatttcttctacctgttactctgttgccg

SEQ ID NO: 6105 - protein, 176 aa, Zea mays subsp. mays
  peptide (1)..(176): Ceres Seq. ID no. 12353843
NRPSVFPSQLTTRAPQTRSSRSSPDLAPPPIKEKEDELLRPAAPRRRPAAARLPGEGRLPASGVPAGRLPPAGAGLPAAGLPTAGLPAAVRAAASTAAAEQRAFLHGRMLGCPLLLLPPGRLLLTDPSVPGSTRLQVKQQAYGRAGTGPCYSSFVLRYRPLFFSFLFFFSLSLSLL

SEQ ID NO: 6106 - protein, 123 aa, Zea mays subsp. mays
  peptide (1)..(123): Ceres Seq. ID no. 12353844
  misc_feature (8)..(103): Pfam Name: Extensin-like region Pfam Description: Extensin-like region
  misc_feature (36)..(123): Homolog of NCBI NO: 34393718 NR Description: adhesive/proline-rich protein homolog-like
  misc_feature (36)..(123): Homolog of NCBI NO: 1808688 NR Description: hypothetical protein [Sporobolus stapfianus]
  misc_feature (36)..(123): Homolog of NCBI NO: 40538901 NR Description: expressed protein [Oryza sativa (japonica
  misc_feature (36)..(108): Homolog of NCBI NO: 34901106 NR Description: contains ESTs
  misc_feature (36)..(123): Homolog of NCBI NO: 15227350 NR Description: unknown protein; protein id: At2g41420.1
  misc_feature (38)..(123): Homolog of NCBI NO: 18425209 NR Description: expressed protein; protein id: At5g67600.1, by cDNA: 9946., supported by cDNA: gi_14532793, supported by gi_21281248 [Arabidopsis thaliana] >gi|9757881|dbj|BAB08468.1|
  misc_feature (38)..(123): Homolog of NCBI NO: 21618167 NR Description: adhesive/proline-rich protein homolog
  misc_feature (16)..(123): Homolog of NCBI NO: 21554421 NR Description: unknown [Arabidopsis thaliana]
  misc_feature (40)..(123): Homolog of NCBI NO: 15229624 NR Description: putative protein; protein id: At3g49840.1
  misc_feature (29)..(105): Homolog of NCBI NO: 15229624 NR Description: putative protein; protein id: At3g49840.1
IVHPYFRHNSQPEPPKPEAAGAPLTLLRLRSRKRKMSYYGQQPPVGVPPQQGYPGKDGYPPAGYPPAGYPPPAQGYPQQGYPQQGYPPQYAQPPPQQQQSSGPSFMEGCLAALCCCCLLDACF

SEQ ID NO: 6107 - protein, 88 aa, Zea mays subsp. mays
  peptide (1)..(88): Ceres Seq. ID no. 12353845
  misc_feature (1)..(68): Pfam Name: Extensin-like region Pfam Description: Extensin-like region
  misc_feature (1)..(88): Homolog of NCBI NO: 34393718 NR Description: adhesive/proline-rich protein homolog-like
  misc_feature (1)..(88): Homolog of NCBI NO: 1808688 NR Description: hypothetical protein [Sporobolus stapfianus]
  misc_feature (1)..(88): Homolog of NCBI NO: 40538901 NR Description: expressed protein [Oryza sativa (japonica
  misc_feature (1)..(73): Homolog of NCBI NO: 34901106 NR Description: contains ESTs
  misc_feature (1)..(88): Homolog of NCBI NO: 15227350 NR Description: unknown protein; protein id: At2g41420.1
  misc_feature (3)..(88): Homolog of NCBI NO: 18425209 NR Description: expressed protein; protein id: At5g67600.1, by cDNA: 9946., supported by cDNA: gi_14532793, supported by gi_21281248 [Arabidopsis thaliana] >gi|9757881|dbj|BAB08468.1|
  misc_feature (3)..(88): Homolog of NCBI NO: 21618167 NR Description: adhesive/proline-rich protein homolog
  misc_feature (1)..(88): Homolog of NCBI NO: 21554421 NR Description: unknown [Arabidopsis thaliana]
  misc_feature (5)..(88): Homolog of NCBI NO: 15229624 NR Description: putative protein; protein id: At3g49840.1
  misc_feature (1)..(70): Homolog of NCBI NO: 15229624 NR Description: putative protein; protein id: At3g49840.1
MSYYGQQPPVGVPPQQGYPGKDGYPPAGYPPAGYPPPAQGYPQQGYPQQGYPPQYAQPPPQQQQSSGPSFMEGCLAALCCCCLLDACF

SEQ ID NO: 6108 - DNA, 1341 bp, Zea mays subsp. mays
  misc_feature (1)..(1341): Ceres Seq. ID no. 12356334
  misc_feature: MA Experiment ID: 108527 Result: Down-regulated in Transcription
  misc_feature: MA Experiment 108527 PARAMETER Experiment Name: Zm_5mM_NO_P Parameter: Age (day) Value: 8
  misc_feature: MA Experiment 108527 PARAMETER Experiment Name: Zm_5mM_NO_P Parameter: Organism Value: Zea mays
  misc_feature: MA Experiment 108527 PARAMETER Experiment Name: Zm_5mM_NO_P Parameter: Plant Line Value: 35A19
  misc_feature: MA Experiment 108527 PARAMETER Experiment Name: Zm_5mM_NO_P Parameter: Timepoint (hr) Value: 6
  misc_feature: MA Experiment 108527 PARAMETER Experiment Name: Zm_5mM_NO_P Parameter: Tissue Value: Aerial
  misc_feature: MA Experiment 108527 PARAMETER Experiment Name: Zm_5mM_NO_P Parameter: Treatment Value: 5mM NO vs. No Treatment
  misc_feature: MA Experiment ID: 108528 Result: Up-regulated in Transcription
  misc_feature: MA Experiment 108528 PARAMETER Experiment Name: Zm_Imbibed_Seeds_P Parameter: Age (day) Value: 5 vs. 2
  misc_feature: MA Experiment 108528 PARAMETER Experiment Name: Zm_Imbibed_Seeds_P Parameter: Organism Value: Zea mays
  misc_feature: MA Experiment 108528 PARAMETER Experiment Name: Zm_Imbibed_Seeds_P Parameter: Plant Line Value: 35A19
  misc_feature: MA Experiment 108528 PARAMETER Experiment Name: Zm_Imbibed_Seeds_P Parameter: Tissue Value: Aerial vs. Embryo
  misc_feature: MA Experiment ID: 108530 Result: Up-regulated in Transcription
  misc_feature: MA Experiment 108530 PARAMETER Experiment Name: Zm_Imbibed_Seeds_P Parameter: Age (day) Value: 6 vs. 2
  misc_feature: MA Experiment 108530 PARAMETER Experiment Name: Zm_Imbibed_Seeds_P Parameter: Organism Value: Zea mays
  misc_feature: MA Experiment 108530 PARAMETER Experiment Name: Zm_Imbibed_Seeds_P Parameter: Plant Line Value: 35A19
  misc_feature: MA Experiment 108530 PARAMETER Experiment Name: Zm_Imbibed_Seeds_P Parameter: Tissue Value: Aerial vs. Embryo
  misc_feature: MA Experiment ID: 108547 Result: Up-regulated in Transcription
  misc_feature: MA Experiment 108547 PARAMETER Experiment Name: Zm_Imbibed_Seeds_P Parameter: Age (day) Value: 4 vs. 2
  misc_feature: MA Experiment 108547 PARAMETER Experiment Name: Zm_Imbibed_Seeds_P Parameter: Organism Value: Zea mays
  misc_feature: MA Experiment 108547 PARAMETER Experiment Name: Zm_Imbibed_Seeds_P Parameter: Plant Line Value: 35A19
  misc_feature: MA Experiment 108547 PARAMETER Experiment Name: Zm_Imbibed_Seeds_P Parameter: Tissue Value: Aerial vs. Embryo
  misc_feature: MA Experiment ID: 108559 Result: Down-regulated in Transcription
  misc_feature: MA Experiment 108559 PARAMETER Experiment Name: Zm_5mM_NO_P Parameter: Age (day) Value: 8
  misc_feature: MA Experiment 108559 PARAMETER Experiment Name: Zm_5mM_NO_P Parameter: Organism Value: Zea mays
  misc_feature: MA Experiment 108559 PARAMETER Experiment Name: Zm_5mM_NO_P Parameter: Plant Line Value: 35A19
  misc_feature: MA Experiment 108559 PARAMETER Experiment Name: Zm_5mM_NO_P Parameter: Timepoint (hr) Value: 12
  misc_feature: MA Experiment 108559 PARAMETER Experiment Name: Zm_5mM_NO_P Parameter: Tissue Value: Aerial
  misc_feature: MA Experiment 108559 PARAMETER Experiment Name: Zm_5mM_NO_P Parameter: Treatment Value: 5mM NO vs. No Treatment
  misc_feature: MA Experiment ID: 20000492 Result: Down-regulated in Transcription
  misc_feature: MA Experiment 20000492 PARAMETER Experiment Name: Zm_Hybrid_Seed_Dev_P Parameter: DAP Value: 12
  misc_feature: MA Experiment 20000492 PARAMETER Experiment Name: Zm_Hybrid_Seed_Dev_P Parameter: Organism Value: Zea mays
  misc_feature: MA Experiment 20000492 PARAMETER Experiment Name: Zm_Hybrid_Seed_Dev_P Parameter: Plant Line Value: 35A19
  misc_feature: MA Experiment 20000492 PARAMETER Experiment Name: Zm_Hybrid_Seed_Dev_P Parameter: Tissue Value: Fert Kernel vs. Unfert Floret
atccctcccaactccagcgccgctaggggtcaaatcgaaaaatggcgttgctgagcccgcgcgtgccgcggctgccgccctccaccttcacctccgttgccggtgcccggtgctttggccctgccgcgaggtgccaggcgacggcggcgggcggcgtggcggccgcggggcccccgtcgtcggagctggaggccatccggtggggcagcgccaagctgcagggcgctcgcgacgagatggaggatgaggtcttgctccgccccggggctccctcctcgatggcttctccttcgccgccgtcttggatggacacgccggcttctccgccgtccagttcctcagggatgagctgtacaaggagtgcgcagctgcgttggacggcggcgcggtgctcagcactaagaatctcgacgctatcacggcctccatccagcgtgccttcgccgctgtcgacgccaagctctccacctggctcgagcaaacggacaaggacgactctggtgctacggccactgtcatgtttctcaggagcgatgtgcttgttgtctcgcacattggggactcttgcttggtgatatcacgtggtggaagatctgaagctttgactggctctcatcgaccgtatgggaacaacaaaacgtcccttgaagaggtcaagaggatcagagcagcaggtggatggattgttgatgggcgcatatgtggagacatatctgtatctcgtgcttttggggacataagatttaagacacaaaagaatgaaatgctggtgaaaggagttaaacaaggaaggtggactgataagttcatctcacgaatacaatttaaagatgatatagtaatctcgtcacctgatgtatctctggtagagcttggaccagacgtggaatttgttctgttggcaatggtctttgggactacataaaaagctctgaagctgtagcttttgtcagagatcaactccgtcagcatggtgatgtccagttggcctgcgaggcacttggtcagaaagctctggatcaacggtcccaagacaatattagcatagtcatagctgacttggggaggacaaactggaaggcgttgcccgatgaaaggccgaacttgttcttgtaactaagtcaagcagtcgcgactgtaggggttgtctcaataggaatttgggtctcgtcgttccttgggttacagtagaactagctactccgtccggatgtgtatattacctactgagtttacatctttctgctagcagtagcagctgcaaaatatatgtatattcgtatatagtgtgtgaattgatagggtaatctgtttgggtaatactgagtgaacgtgtgaagt

SEQ ID NO: 6109 - protein, 177 aa, Zea mays subsp. mays
  peptide (1)..(177): Ceres Seq. ID no. 12356335
  misc_feature (1)..(72): Homolog of NCBI NO: 3643090 NR Description: protein phosphatase-2C; PP2C [Mesembryanthemum
  misc_feature (30)..(81): Homolog of NCBI NO: 15234274 NR Description: protein phosphatase homolog (PPH1); protein id: supported by cDNA: gi_19423900, supported by cDNA: gi_21281244 thaliana] >gi|12643420|sp|P49599|P2C3_ARATH Protein phosphatase
  misc_feature (30)..(81): Homolog of NCBI NO: 7488010 NR Description: phosphoprotein phosphatase homolog T27E11.40 - thaliana >gi|4972111|emb|CAB43968.1| protein phosphatase homolog
  misc_feature (30)..(81): Homolog of NCBI NO: 30687733 NR Description: Protein phosphatase 2C PPH1 (PPH1) (PP2C)
  misc_feature (30)..(81): Homolog of NCBI NO: 30687740 NR Description: Protein phosphatase 2C PPH1 (PPH1) (PP2C)
  misc_feature (1)..(76): Homolog of NCBI NO: 34913920 NR Description: putative protein phosphatase-2C [Oryza sativa
MALLSPRVPRLPPSTFTSVAGARCFGPAARCQATAAGGVAAAGPPSSELEAIRWGSAKLQGARDEMEDEVLLRPGAPSSMASPSPPSWMDTPASPPSSSSGMSCTRSAQLRWTAARCSALRISTLSRPPSSVPSPLSTPSSPPGSSKRTRTTLVLRPLSCFSGAMCLLSRTLGTLAW

SEQ ID NO: 6110 - protein, 135 aa, Zea mays subsp. mays
  peptide (1)..(135): Ceres Seq. ID no. 12356336
  misc_feature (1)..(129): Pfam Name: Protein phosphatase 2C Pfam Description: Protein phosphatase 2C
  misc_feature (1)..(129): Homolog of NCBI NO: 15234274 NR Description: protein phosphatase homolog (PPH1); protein id: supported by cDNA: gi_19423900, supported by cDNA: gi_21281244 thaliana] >gi|12643420|sp|P49599|P2C3_ARATH Protein phosphatase
  misc_feature (1)..(129): Homolog of NCBI NO: 7488010 NR Description: phosphoprotein phosphatase homolog T27E11.40 - thaliana >gi|4972111|emb|CAB43968.1| protein phosphatase homolog
  misc_feature (1)..(129): Homolog of NCBI NO: 995839 NR Description: protein phosphatase homolog
  misc_feature (1)..(129): Homolog of NCBI NO: 30687733 NR Description: Protein phosphatase 2C PPH1 (PPH1) (PP2C)
  misc_feature (1)..(129): Homolog of NCBI NO: 30687740 NR Description: Protein phosphatase 2C PPH1 (PPH1) (PP2C)
  misc_feature (1)..(129): Homolog of NCBI NO: 3643090 NR Description: protein phosphatase-2C; PP2C [Mesembryanthemum
  misc_feature (1)..(60): Homolog of NCBI NO: 34913920 NR Description: putative protein phosphatase-2C [Oryza sativa
  misc_feature (1)..(77): Homolog of NCBI NO: 25355102 NR Description: protein T23F11.1 [imported] - Caenorhabditis
  misc_feature (1)..(77): Homolog of NCBI NO: 17555234 NR Description: Protein phosphatase PP2C, possibly (39.1 kD) [Caenorhabditis elegans] Probable protein phosphatase 2C T23F11.1 (PP2C)
  misc_feature (1)..(77): Homolog of NCBI NO: 39591591 NR Description: Hypothetical protein CBG18025 [Caenorhabditis
MFLRSDVLVVSHIGDSCLVISRGGRSEALTGSHRPYGNNKTSLEEVKRIRAAGGWIVDGRICGDISVSRAFGDIRFKTQKNEMLVKGVKQGRWTDKFISRIQFKDDIVISSPDVSLVELGPDVEFVLLAMVFGTT

SEQ ID NO: 6111 - protein, 112 aa, Zea mays subsp. mays
  peptide (1)..(112): Ceres Seq. ID no. 12356337
  misc_feature (1)..(16): Homolog of NCBI NO: 15234274 NR Description: protein phosphatase homolog (PPH1); protein id: supported by cDNA: gi_19423900, supported by cDNA: gi_21281244 thaliana] >gi|12643420|sp|P49599|P2C3_ARATH Protein phosphatase
  misc_feature (1)..(16): Homolog of NCBI NO: 7488010 NR Description: phosphoprotein phosphatase homolog T27E11.40 - thaliana >gi|4972111|emb|CAB43968.1| protein phosphatase homolog
  misc_feature (1)..(16): Homolog of NCBI NO: 30687733 NR Description: Protein phosphatase 2C PPH1 (PPH1) (PP2C)
  misc_feature (1)..(16): Homolog of NCBI NO: 30687740 NR Description: Protein phosphatase 2C PPH1 (PPH1) (PP2C)
  misc_feature (1)..(11): Homolog of NCBI NO: 34913920 NR Description: putative protein phosphatase-2C [Oryza sativa
MEDEVLLRPGAPSSMASPSPPSWMDTPASPPSSSSGMSCTRSAQLRWTAARCSALRISTLSRPPSSVPSPLSTPSSPPGSSKRTRTTLVLRPLSCFSGAMCLLSRTLGTLAW

SEQ ID NO: 6112 - DNA, 867 bp, Zea mays subsp. mays
  misc_feature (1)..(867): Ceres Seq. ID no. 12402556
  misc_feature: MA Experiment ID: 108522 Result: Up-regulated in Transcription
  misc_feature: MA Experiment 108522 PARAMETER Experiment Name: Zm_42deg_Heat_P Parameter: Age (day) Value: 8
  misc_feature: MA Experiment 108522 PARAMETER Experiment Name: Zm_42deg_Heat_P Parameter: Organism Value: Zea mays
  misc_feature: MA Experiment 108522 PARAMETER Experiment Name: Zm_42deg_Heat_P Parameter: Plant Line Value: 35A19
  misc_feature: MA Experiment 108522 PARAMETER Experiment Name: Zm_42deg_Heat_P Parameter: Temperature (deg C) Value: 42 vs. 22
  misc_feature: MA Experiment 108522 PARAMETER Experiment Name: Zm_42deg_Heat_P Parameter: Timepoint (hr) Value: 1
  misc_feature: MA Experiment 108522 PARAMETER Experiment Name: Zm_42deg_Heat_P Parameter: Tissue Value: Aerial
  misc_feature: MA Experiment ID: 108527 Result: Up-regulated in Transcription
  misc_feature: MA Experiment 108527 PARAMETER Experiment Name: Zm_5mM_NO_P Parameter: Age (day) Value: 8
  misc_feature: MA Experiment 108527 PARAMETER Experiment Name: Zm_5mM_NO_P Parameter: Organism Value: Zea mays
  misc_feature: MA Experiment 108527 PARAMETER Experiment Name: Zm_5mM_NO_P Parameter: Plant Line Value: 35A19
  misc_feature: MA Experiment 108527 PARAMETER Experiment Name: Zm_5mM_NO_P Parameter: Timepoint (hr) Value: 6
  misc_feature: MA Experiment 108527 PARAMETER Experiment Name: Zm_5mM_NO_P Parameter: Tissue Value: Aerial
  misc_feature: MA Experiment 108527 PARAMETER Experiment Name: Zm_5mM_NO_P Parameter: Treatment Value: 5mM NO vs. No Treatment
  misc_feature: MA Experiment ID: 108688 Result: Down-regulated in Transcription
  misc_feature: MA Experiment 108688 PARAMETER Experiment Name: Zm_Embryos-Flowers__P Parameter: Tissue Value: Immature Flowers vs. Aerial+
  misc_feature: MA Experiment ID: 20000492 Result: Down-regulated in Transcription
  misc_feature: MA Experiment 20000492 PARAMETER Experiment Name: Zm_Hybrid_Seed_Dev_P Parameter: DAP Value: 12
  misc_feature: MA Experiment 20000492 PARAMETER Experiment Name: Zm_Hybrid_Seed_Dev_P Parameter: Organism Value: Zea mays
  misc_feature: MA Experiment 20000492 PARAMETER Experiment Name: Zm_Hybrid_Seed_Dev_P Parameter: Plant Line Value: 35A19
  misc_feature: MA Experiment 20000492 PARAMETER Experiment Name: Zm_Hybrid_Seed_Dev_P Parameter: Tissue Value: Fert Kernel vs. Unfert Floret
actcgaagtcgaagccgcagcagctagctagctagcatggccgggaaagagcttacgctgctggggttatgggcgagcccgttcgtgctccgggcgcgcatcgcgctcagcctcaaaggcctcacctacgcatactccgaggagaacctcgacgacaagagcgagcttctcctcagctccaaccccgtgctcaagaaggtgcccgtgctcatccaccacggcaagcccgtctgcgagtcccagatcatcgtgcagtacgtcgacgaggctttccccgccgccgcacctaatttccttccatccgacccctacgaccgcgccattgctcgcttctgggcctcctacgtcgacgacaagttctacagcgcgtggatacccgtgttcaggggcaggacggcggaggagatggcggaggcggcgaggcaggccgtcgcggcgctggagacgctggagcaggcgttcagggagtgctccaaggggaaggccttcttcggaggggacagcgtggggctcgtcgacgtcgtgctcggcggccttgttgggtggctgtacgccaccgaggccatctgcggggtgaaggccctcgacgccggcaggacgccgctgctggcggcgtgggcggagcggttctgcgcgctggagggtgtcaaggggctgatcccggacgtggacaggcttctggagtataccaaggccaggcgggccgtatttggcctgccgccgctccgtccttaggcatagtggacatgtttcttttctttttttttcttttttaaaaaattatatgttctatgtttgtttgaaataaagtactgttatggtgttacacatgtattccaacgtcaactctacgtgctgctatttggc

SEQ ID NO: 6113 - protein, 232 aa, Zea mays subsp. mays
  peptide (1)..(232): Ceres Seq. ID no. 12402557
  misc_feature (4)..(232): Homolog of NCBI NO: 11385495 NR Description: glutathione S-transferase GST 22 [Zea mays]
  misc_feature (5)..(228): Homolog of NCBI NO: 11385525 NR Description: glutathione S-transferase GST 37 [Zea mays]
  misc_feature (3)..(223): Homolog of NCBI NO: 37536250 NR Description: putative glutathione S-transferase [Oryza sativa
  misc_feature (3)..(223): Homolog of NCBI NO: 37536280 NR Description: putative glutathione S-transferase [Oryza sativa
  misc_feature (2)..(223): Homolog of NCBI NO: 37536308 NR Description: putative glutathione S-transferase [Oryza sativa
  misc_feature (3)..(223): Homolog of NCBI NO: 37536328 NR Description: putative glutathione S-transferase [Oryza sativa
  misc_feature (3)..(223): Homolog of NCBI NO: 11385535 NR Description: glutathione S-transferase GST 42 [Zea mays]
  misc_feature (2)..(223): Homolog of NCBI NO: 33304610 NR Description: tau class GST protein 4 [Oryza sativa (indica
  misc_feature (3)..(223): Homolog of NCBI NO: 15430711 NR Description: putative glutathione S-transferase OsGSTU7 [Oryza
  misc_feature (2)..(223): Homolog of NCBI NO: 37536310 NR Description: putative glutathione S-transferase [Oryza sativa
MAGKELTLLGLWASPFVLRARIALSLKGLTYAYSEENLDDKSELLLSSNPVLKKVPVLIHHGKPVCESQIIVQYVDEAFPAAAPNFLPSDPYDRAIARFWASYVDDKFYSAWIPVFRGRTAEEMAEAARQAVAALETLEQAFRECSKGKAFFGGDSVGLVDVVLGGLVGWLYATEAICGVKALDAGRTPLLAAWAERFCALEGVKGLIPDVDRLLEYTKARRAVFGLPPLRP

SEQ ID NO: 6114 - DNA, 771 bp, Zea mays subsp. mays
  misc_feature (1)..(771): Ceres Seq. ID no. 12343659
  misc_feature: MA Experiment ID: 108527 Result: Up-regulated in Transcription
  misc_feature: MA Experiment 108527 PARAMETER Experiment Name: Zm_5mM_NO_P Parameter: Age (day) Value: 8
  misc_feature: MA Experiment 108527 PARAMETER Experiment Name: Zm_5mM_NO_P Parameter: Organism Value: Zea mays
  misc_feature: MA Experiment 108527 PARAMETER Experiment Name: Zm_5mM_NO_P Parameter: Plant Line Value: 35A19
  misc_feature: MA Experiment 108527 PARAMETER Experiment Name: Zm_5mM_NO_P Parameter: Timepoint (hr) Value: 6
  misc_feature: MA Experiment 108527 PARAMETER Experiment Name: Zm_5mM_NO_P Parameter: Tissue Value: Aerial
  misc_feature: MA Experiment 108527 PARAMETER Experiment Name: Zm_5mM_NO_P Parameter: Treatment Value: 5mM NO vs. No Treatment
  misc_feature: MA Experiment ID: 108529 Result: Up-regulated in Transcription
  misc_feature: MA Experiment 108529 PARAMETER Experiment Name: Zm_Imbibed_Seeds_P Parameter: Age (day) Value: 5 vs. 2
  misc_feature: MA Experiment 108529 PARAMETER Experiment Name: Zm_Imbibed_Seeds_P Parameter: Organism Value: Zea mays
  misc_feature: MA Experiment 108529 PARAMETER Experiment Name: Zm_Imbibed_Seeds_P Parameter: Plant Line Value: 35A19
  misc_feature: MA Experiment 108529 PARAMETER Experiment Name: Zm_Imbibed_Seeds_P Parameter: Tissue Value: Roots vs. Embryo
  misc_feature: MA Experiment ID: 108535 Result: Down-regulated in Transcription
  misc_feature: MA Experiment 108535 PARAMETER Experiment Name: Zm_Meristem_P Parameter: Age (day) Value: 8
  misc_feature: MA Experiment 108535 PARAMETER Experiment Name: Zm_Meristem_P Parameter: Organism Value: Zea mays
  misc_feature: MA Experiment 108535 PARAMETER Experiment Name: Zm_Meristem_P Parameter: Plant Line Value: 35A19
  misc_feature: MA Experiment 108535 PARAMETER Experiment Name: Zm_Meristem_P Parameter: Tissue Value: Root Meristem vs. Above Root Meristem
  misc_feature: MA Experiment ID: 108546 Result: Up-regulated in Transcription
  misc_feature: MA Experiment 108546 PARAMETER Experiment Name: Zm_Imbibed_Seeds_P Parameter: Age (day) Value: 3 vs. 2
  misc_feature: MA Experiment 108546 PARAMETER Experiment Name: Zm_Imbibed_Seeds_P Parameter: Organism Value: Zea mays
  misc_feature: MA Experiment 108546 PARAMETER Experiment Name: Zm_Imbibed_Seeds_P Parameter: Plant Line Value: 35A19
  misc_feature: MA Experiment 108546 PARAMETER Experiment Name: Zm_Imbibed_Seeds_P Parameter: Tissue Value: Roots vs. Embryo
  misc_feature: MA Experiment ID: 20000108 Result: Down-regulated in Transcription
  misc_feature: MA Experiment 20000108 PARAMETER Experiment Name: Zm_Root-Tips_P Parameter: Age (day) Value: 12
  misc_feature: MA Experiment 20000108 PARAMETER Experiment Name: Zm_Root-Tips_P Parameter: Organism Value: Zea mays
  misc_feature: MA Experiment 20000108 PARAMETER Experiment Name: Zm_Root-Tips_P Parameter: Tissue Value: Root tips vs. Root mid region    35
  misc_feature: MA Experiment 20000108 PARAMETER Experiment Name: Zm_Root-Tips_P Parameter: Tissue Value: Root tips vs. Root mid region   Sequence Listing-Misc Features (4)
  misc_feature: MA Experiment ID: 20000478 Result: Up-regulated in Transcription
  misc_feature: MA Experiment 20000478 PARAMETER Experiment Name: Zm_5mM_SA_P Parameter: Age (day) Value: 11
  misc_feature: MA Experiment 20000478 PARAMETER Experiment Name: Zm_5mM_SA_P Parameter: Organism Value: Zea mays
  misc_feature: MA Experiment 20000478 PARAMETER Experiment Name: Zm_5mM_SA_P Parameter: Plant Line Value: 35A19
  misc_feature: MA Experiment 20000478 PARAMETER Experiment Name: Zm_5mM_SA_P Parameter: Timepoint (hr) Value: 72
  misc_feature: MA Experiment 20000478 PARAMETER Experiment Name: Zm_5mM_SA_P Parameter: Tissue Value: Aerial
  misc_feature: MA Experiment 20000478 PARAMETER Experiment Name: Zm_5mM_SA_P Parameter: Treatment Value: 5mM SA vs. No Treatment
  misc_feature: MA Experiment ID: 20000480 Result: Up-regulated in Transcription
  misc_feature: MA Experiment 20000480 PARAMETER Experiment Name: Zm_Drought_P Parameter: Age (day) Value: 11
  misc_feature: MA Experiment 20000480 PARAMETER Experiment Name: Zm_Drought_P Parameter: Organism Value: Zea mays
  misc_feature: MA Experiment 20000480 PARAMETER Experiment Name: Zm_Drought_P Parameter: Plant Line Value: 35A19
  misc_feature: MA Experiment 20000480 PARAMETER Experiment Name: Zm_Drought_P Parameter: Timepoint (hr) Value: 72
  misc_feature: MA Experiment 20000480 PARAMETER Experiment Name: Zm_Drought_P Parameter: Tissue Value: Aerial
  misc_feature: MA Experiment 20000480 PARAMETER Experiment Name: Zm_Drought_P Parameter: Treatment Value: Drought vs. No Drought
acctgcgcattttgtaaaggtacgaggagctaggtgaggcaccaccaccaaccgggctccgactccgagttcatcacgcacgcatggaaggctcggcggcacaggcgccggggaagaccgtcctgagggtggtggcgatctccggctcgctgcgcagggcgtcggccaacaccggcctcatccgcgccgccgcggagatctgcagggagtcgatcccggggctggaggtggagcacgtggacatctcggagctgccgctgctgaacaccgacctggagggcccgggccccggcgcgttcccggcggccgtcgaggcgttccgcggcaaggtgcgcgccgccgactgcttcctgttcgcgtcgcccgagtacaactactccatctcgggcccgctgaagaacgcgctggactgggggtcgcgcccgcccaactgctggggcgacagggccgccgccatcctcagcgcgtcgggcgggtcggggggcagccgctcgcagtaccacgtccgccaggtcggcgttttcctcgacctccacttcgtcaacaagcccgaggtgttcaccagggcgcaccagccgcccagaaagttcgaccacgacggcaacctcgtcgacccggacaccaaggaccaggtcaccaaggtgctcctggcgctgcaggctctcgcgctcaggctgcagctggggaagctcgctgttgctgcacactcttcttgaacgtcgtcgtcgtcgggggtgcactaaactacactacacatcgtcgccgagctcc

SEQ ID NO: 6115 - protein, 210 aa, Zea mays subsp. mays
  peptide (1)..(210): Ceres Seq. ID no. 12343660
  misc_feature (14)..(184): Pfam Name: NADPH-dependent FMN reductase Pfam Description: NADPH-dependent FMN reductase
  misc_feature (1)..(210): Homolog of NCBI NO: 34906652 NR Description: putative NADPH:quinone oxidoreductase [Oryza
  misc_feature (1)..(199): Homolog of NCBI NO: 34906648 NR Description: putative NADPH:quinone oxidoreductase [Oryza
  misc_feature (13)..(202): Homolog of NCBI NO: 24745889 NR Description: NAD(P)H:quinone oxidoreductase [Solanum tuberosum]
  misc_feature (11)..(202): Homolog of NCBI NO: 5002232 NR Description: NADPH:quinone oxidoreductase [Arabidopsis
  misc_feature (11)..(202): Homolog of NCBI NO: 15232856 NR Description: NADPH:quinone oxidoreductase (NQR); protein id: supported by cDNA: gi_5002231 [Arabidopsis thaliana]
  misc_feature (14)..(199): Homolog of NCBI NO: 15596401 NR Description: conserved hypothetical protein [Pseudomonas
  misc_feature (14)..(199): Homolog of NCBI NO: 32041222 NR Description: hypothetical protein [Pseudomonas aeruginosa
  misc_feature (14)..(199): Homolog of NCBI NO: 22406524 NR Description: hypothetical protein [Ferroplasma acidarmanus]
  misc_feature (14)..(200): Homolog of NCBI NO: 26250454 NR Description: Hypothetical protein yieF [Escherichia coli >gi|26110884|gb|AAN83068.1|AE016769_183 Hypothetical protein yieF
  misc_feature (13)..(175): Homolog of NCBI NO: 23061144 NR Description: hypothetical protein [Pseudomonas fluorescens
MEGSAAQAPGKTVLRVVAISGSLRRASANTGLIRAAAEICRESIPGLEVEHVDISELPLLNTDLEGPGPGAFPAAVEAFRGKVRAADCFLFASPEYNYSISGPLKNALDWGSRPPNCWGDRAAAILSASGGSGGSRSQYHVRQVGVFLDLHFVNKPEVFTRAHQPPRKFDHDGNLVDPDTKDQVTKVLLALQALALRLQLGKLAVAAHSS

SEQ ID NO: 6116 - DNA, 1509 bp, Zea mays subsp. mays
  misc_feature (1)..(1509): Ceres Seq. ID no. 12373608
  misc_feature: MA Experiment ID: 108528 Result: Up-regulated in Transcription
  misc_feature: MA Experiment 108528 PARAMETER Experiment Name: Zm_Imbibed_Seeds_P Parameter: Age (day) Value: 5 vs. 2
  misc_feature: MA Experiment 108528 PARAMETER Experiment Name: Zm_Imbibed_Seeds_P Parameter: Organism Value: Zea mays
  misc_feature: MA Experiment 108528 PARAMETER Experiment Name: Zm_Imbibed_Seeds_P Parameter: Plant Line Value: 35A19
  misc_feature: MA Experiment 108528 PARAMETER Experiment Name: Zm_Imbibed_Seeds_P Parameter: Tissue Value: Aerial vs. Embryo
  misc_feature: MA Experiment ID: 108529 Result: Up-regulated in Transcription
  misc_feature: MA Experiment 108529 PARAMETER Experiment Name: Zm_Imbibed_Seeds_P Parameter: Age (day) Value: 5 vs. 2
  misc_feature: MA Experiment 108529 PARAMETER Experiment Name: Zm_Imbibed_Seeds_P Parameter: Organism Value: Zea mays
  misc_feature: MA Experiment 108529 PARAMETER Experiment Name: Zm_Imbibed_Seeds_P Parameter: Plant Line Value: 35A19
  misc_feature: MA Experiment 108529 PARAMETER Experiment Name: Zm_Imbibed_Seeds_P Parameter: Tissue Value: Roots vs. Embryo
  misc_feature: MA Experiment ID: 108530 Result: Up-regulated in Transcription
  misc_feature: MA Experiment 108530 PARAMETER Experiment Name: Zm_Imbibed_Seeds_P Parameter: Age (day) Value: 6 vs. 2
  misc_feature: MA Experiment 108530 PARAMETER Experiment Name: Zm_Imbibed_Seeds_P Parameter: Organism Value: Zea mays
  misc_feature: MA Experiment 108530 PARAMETER Experiment Name: Zm_Imbibed_Seeds_P Parameter: Plant Line Value: 35A19
  misc_feature: MA Experiment 108530 PARAMETER Experiment Name: Zm_Imbibed_Seeds_P Parameter: Tissue Value: Aerial vs. Embryo
  misc_feature: MA Experiment ID: 108534 Result: Up-regulated in Transcription
  misc_feature: MA Experiment 108534 PARAMETER Experiment Name: Zm_4deg_Cold_P Parameter: Age (hr) Value: 8
  misc_feature: MA Experiment 108534 PARAMETER Experiment Name: Zm_4deg_Cold_P Parameter: Organism Value: Zea mays
  misc_feature: MA Experiment 108534 PARAMETER Experiment Name: Zm_4deg_Cold_P Parameter: Plant Line Value: 35A19
  misc_feature: MA Experiment 108534 PARAMETER Experiment Name: Zm_4deg_Cold_P Parameter: Temperature (deg C) Value: 4 vs. 22
  misc_feature: MA Experiment 108534 PARAMETER Experiment Name: Zm_4deg_Cold_P Parameter: Timepoint (hr) Value: 6
  misc_feature: MA Experiment 108534 PARAMETER Experiment Name: Zm_4deg_Cold_P Parameter: Tissue Value: Aerial
  misc_feature: MA Experiment ID: 108535 Result: Down-regulated in Transcription
  misc_feature: MA Experiment 108535 PARAMETER Experiment Name: Zm_Meristem_P Parameter: Age (day) Value: 8
  misc_feature: MA Experiment 108535 PARAMETER Experiment Name: Zm_Meristem_P Parameter: Organism Value: Zea mays
  misc_feature: MA Experiment 108535 PARAMETER Experiment Name: Zm_Meristem_P Parameter: Plant Line Value: 35A19
  misc_feature: MA Experiment 108535 PARAMETER Experiment Name: Zm_Meristem_P Parameter: Tissue Value: Root Meristem vs. Above Root Meristem
  misc_feature: MA Experiment ID: 108547 Result: Up-regulated in Transcription
  misc_feature: MA Experiment 108547 PARAMETER Experiment Name: Zm_Imbibed_Seeds_P Parameter: Age (day) Value: 4 vs. 2
  misc_feature: MA Experiment 108547 PARAMETER Experiment Name: Zm_Imbibed_Seeds_P Parameter: Organism Value: Zea mays
  misc_feature: MA Experiment 108547 PARAMETER Experiment Name: Zm_Imbibed_Seeds_P Parameter: Plant Line Value: 35A19
  misc_feature: MA Experiment 108547 PARAMETER Experiment Name: Zm_Imbibed_Seeds_P Parameter: Tissue Value: Aerial vs. Embryo
  misc_feature: MA Experiment ID: 108688 Result: Down-regulated in Transcription
  misc_feature: MA Experiment 108688 PARAMETER Experiment Name: Zm_Embryos-Flowers__P Parameter: Tissue Value: Immature Flowers vs. Aerial+
  misc_feature: MA Experiment ID: 20000108 Result: Down-regulated in Transcription
  misc_feature: MA Experiment 20000108 PARAMETER Experiment Name: Zm_Root-Tips_P Parameter: Age (day) Value: 12
  misc_feature: MA Experiment 20000108 PARAMETER Experiment Name: Zm_Root-Tips_P Parameter: Organism Value: Zea mays
  misc_feature: MA Experiment 20000108 PARAMETER Experiment Name: Zm_Root-Tips_P Parameter: Tissue Value: Root tips vs. Root mid region    35
  misc_feature: MA Experiment 20000108 PARAMETER Experiment Name: Zm_Root-Tips_P Parameter: Tissue Value: Root tips vs. Root mid region   Sequence Listing-Misc Features (4)
  misc_feature: MA Experiment ID: 20000535 Result: Down-regulated in Transcription
  misc_feature: MA Experiment 20000535 PARAMETER Experiment Name: Zm_Hybrid_Seed_Dev_P Parameter: DAP Value: 30 vs. 12
  misc_feature: MA Experiment 20000535 PARAMETER Experiment Name: Zm_Hybrid_Seed_Dev_P Parameter: Organism Value: Zea mays
  misc_feature: MA Experiment 20000535 PARAMETER Experiment Name: Zm_Hybrid_Seed_Dev_P Parameter: Plant Line Value: 35A19
  misc_feature: MA Experiment 20000535 PARAMETER Experiment Name: Zm_Hybrid_Seed_Dev_P Parameter: Tissue Value: Embryo vs. Unfert Floret
gcacgagaccattacctagaacatcctaatcgaaaattttgcaatccgtatcatcatcttggcctcgtcaatccaccaccaccgtcgtcgctgagctcctcctccggcttcgcttcgcttcgctgtcttgcctcctcctcggtcgaagaagaagaagaaaacatgtgtccgggatccgtggagtcgtcgtcggcggcggcggcgggcaagagcgtgtgcgtgatggacgccgcggggccgctgggccacgcgctcgtggaccgcctcctccggcgcgggtacacagtccacgccgccacgtacgcccgcgacggggaggagggcgcggctgccgccgcgctgctcggccacctgtcgcgcgccgccgacgcgtgcaggcaccggctgaagctgttccgcgccgacccgttcgactaccacgccatcgccgacgccgtgcggggctgcgccggcgtcttctgcatgttcaacacgcccgaggatcaggcccaatgcgatgagtcgacggtggagacggaggtgcgcgcggcgcacaacgtgctggaggcgtgcgcgcagacggacgccatggagcgggtcgtcttcacctcctccgtcaccgccgtcgtctggagcggcgccggcgccggcgtcggcgcccacagggaggaggtcgccgacgagaggagctggagcgacctcgccttctgcaggaagttcaagctgtggcacgccctggccaagacgctgtcggagaagacggcgtgggcgctggccatggaccggggcgtcgacatggtggccatcaacgccggcctgctgctgtccgcccccgggcccgggctcgggctcaccgccgcgcacccctacctcaagggcgcccccgacatgtacgacggcggcgtcctcgccaccgtcgacgtcggcttcctggccgacgcgcacgtcgccgcctacgagtcccccaccgcctacggccgctacctctgcttcagcgacgccgtctgccgtcccgaggacgccgtcaagctcgcccagatgctctcgccggccgcgccacgctcgccgccgccaagcgacgaactgaaggtgataccacagaggatccagggcaagaaactgaacaagctcatgctggagttcgccagcggggtatacggggagctggactaggaaggaactgccaggccacagatgatgcgatgcgactagggctgttgtattcttttgtacgtagtactatttgtagttttcgcccccctcacaaaaaaaaggagggaaatctgtttggttggccaaaatgtgccatacgctcgctgtacatggccaaacacgccacgtgtgtagcccctgccagcagcaggggtgggtggggagagcatttcagtgatcggttgccaaagaaataccatatcgtatctaggttcgtgagttacatcccatgcatgtgttacgtgacgcttatattgaactctgacaaacttgtagcgcacaattacaaacatgattacggaagaatcgtttcagggt

SEQ ID NO: 6117 - protein, 383 aa, Zea mays subsp. mays
  peptide (1)..(383): Ceres Seq. ID no. 12373609
  misc_feature (70)..(383): Homolog of NCBI NO: 37537132 NR Description: putative cinnamoyl-CoA reductase [Oryza sativa
  misc_feature (73)..(371): Homolog of NCBI NO: 25412171 NR Description: probable cinnamoyl CoA reductase [imported] -
  misc_feature (73)..(371): Homolog of NCBI NO: 18400407 NR Description: putative cinnamoyl CoA reductase; protein id: supported by cDNA: 14133. [Arabidopsis thaliana]
  misc_feature (73)..(371): Homolog of NCBI NO: 21553382 NR Description: putative cinnamoyl CoA reductase [Arabidopsis
  misc_feature (73)..(371): Homolog of NCBI NO: 15234751 NR Description: cinnamoyl-CoA reductase - like protein; protein At4g30470.1, supported by cDNA: 150515., supported by cDNA:
  misc_feature (73)..(371): Homolog of NCBI NO: 21553548 NR Description: cinnamoyl-CoA reductase-like protein [Arabidopsis
  misc_feature (69)..(374): Homolog of NCBI NO: 3341511 NR Description: cinnamoyl-CoA reductase [Saccharum officinarum]
  misc_feature (69)..(374): Homolog of NCBI NO: 25140432 NR Description: cinnamoyl CoA reductase [Hordeum vulgare]
  misc_feature (57)..(374): Homolog of NCBI NO: 3242328 NR Description: cinnamoyl-CoA reductase [Zea mays]
  misc_feature (69)..(374): Homolog of NCBI NO: 9964087 NR Description: cinnamoyl CoA reductase [Lolium perenne]
ARDHYLEHPNRKFCNPYHHLGLVNPPPPSSLSSSSGFASLRCLASSSVEEEEENMCPGSVESSSAAAAGKSVCVMDAAGPLGHALVDRLLRRGYTVHAATYARDGEEGAAAAALLGHLSRAADACRHRLKLFRADPFDYHAIADAVRGCAGVFCMFNTPEDQAQCDESTVETEVRAAHNVLEACAQTDAMERVVFTSSVTAVVWSGAGAGVGAHREEVADERSWSDLAFCRKFKLWHALAKTLSEKTAWALAMDRGVDMVAINAGLLLSAPGPGLGLTAAHPYLKGAPDMYDGGVLATVDVGFLADAHVAAYESPTAYGRYLCFSDAVCRPEDAVKLAQMLSPAAPRSPPPSDELKVIPQRIQGKKLNKLMLEFASGVYGELD

SEQ ID NO: 6118 - protein, 329 aa, Zea mays subsp. mays
  peptide (1)..(329): Ceres Seq. ID no. 12373610
  misc_feature (16)..(329): Homolog of NCBI NO: 37537132 NR Description: putative cinnamoyl-CoA reductase [Oryza sativa
  misc_feature (19)..(317): Homolog of NCBI NO: 25412171 NR Description: probable cinnamoyl CoA reductase [imported] -
  misc_feature (19)..(317): Homolog of NCBI NO: 18400407 NR Description: putative cinnamoyl CoA reductase; protein id: supported by cDNA: 14133. [Arabidopsis thaliana]
  misc_feature (19)..(317): Homolog of NCBI NO: 21553382 NR Description: putative cinnamoyl CoA reductase [Arabidopsis
  misc_feature (19)..(317): Homolog of NCBI NO: 15234751 NR Description: cinnamoyl-CoA reductase - like protein; protein At4g30470.1, supported by cDNA: 150515., supported by cDNA:
  misc_feature (19)..(317): Homolog of NCBI NO: 21553548 NR Description: cinnamoyl-CoA reductase-like protein [Arabidopsis
  misc_feature (15)..(320): Homolog of NCBI NO: 3341511 NR Description: cinnamoyl-CoA reductase [Saccharum officinarum]
  misc_feature (15)..(320): Homolog of NCBI NO: 25140432 NR Description: cinnamoyl CoA reductase [Hordeum vulgare]
  misc_feature (3)..(320): Homolog of NCBI NO: 3242328 NR Description: cinnamoyl-CoA reductase [Zea mays]
  misc_feature (15)..(320): Homolog of NCBI NO: 9964087 NR Description: cinnamoyl CoA reductase [Lolium perenne]
MCPGSVESSSAAAAGKSVCVMDAAGPLGHALVDRLLRRGYTVHAATYARDGEEGAAAAALLGHLSRAADACRHRLKLFRADPFDYHAIADAVRGCAGVFCMFNTPEDQAQCDESTVETEVRAAHNVLEACAQTDAMERVVFTSSVTAVVWSGAGAGVGAHREEVADERSWSDLAFCRKFKLWHALAKTLSEKTAWALAMDRGVDMVAINAGLLLSAPGPGLGLTAAHPYLKGAPDMYDGGVLATVDVGFLADAHVAAYESPTAYGRYLCFSDAVCRPEDAVKLAQMLSPAAPRSPPPSDELKVIPQRIQGKKLNKLMLEFASGVYGELD

SEQ ID NO: 6119 - protein, 309 aa, Zea mays subsp. mays
  peptide (1)..(309): Ceres Seq. ID no. 12373611
  misc_feature (1)..(309): Homolog of NCBI NO: 37537132 NR Description: putative cinnamoyl-CoA reductase [Oryza sativa
  misc_feature (1)..(297): Homolog of NCBI NO: 25412171 NR Description: probable cinnamoyl CoA reductase [imported] -
  misc_feature (1)..(297): Homolog of NCBI NO: 18400407 NR Description: putative cinnamoyl CoA reductase; protein id: supported by cDNA: 14133. [Arabidopsis thaliana]
  misc_feature (1)..(297): Homolog of NCBI NO: 21553382 NR Description: putative cinnamoyl CoA reductase [Arabidopsis
  misc_feature (1)..(297): Homolog of NCBI NO: 15234751 NR Description: cinnamoyl-CoA reductase - like protein; protein At4g30470.1, supported by cDNA: 150515., supported by cDNA:
  misc_feature (1)..(297): Homolog of NCBI NO: 21553548 NR Description: cinnamoyl-CoA reductase-like protein [Arabidopsis
  misc_feature (1)..(300): Homolog of NCBI NO: 3341511 NR Description: cinnamoyl-CoA reductase [Saccharum officinarum]
  misc_feature (1)..(300): Homolog of NCBI NO: 25140432 NR Description: cinnamoyl CoA reductase [Hordeum vulgare]
  misc_feature (1)..(300): Homolog of NCBI NO: 3242328 NR Description: cinnamoyl-CoA reductase [Zea mays]
  misc_feature (1)..(300): Homolog of NCBI NO: 9964087 NR Description: cinnamoyl CoA reductase [Lolium perenne]
MDAAGPLGHALVDRLLRRGYTVHAATYARDGEEGAAAAALLGHLSRAADACRHRLKLFRADPFDYHAIADAVRGCAGVFCMFNTPEDQAQCDESTVETEVRAAHNVLEACAQTDAMERVVFTSSVTAVVWSGAGAGVGAHREEVADERSWSDLAFCRKFKLWHALAKTLSEKTAWALAMDRGVDMVAINAGLLLSAPGPGLGLTAAHPYLKGAPDMYDGGVLATVDVGFLADAHVAAYESPTAYGRYLCFSDAVCRPEDAVKLAQMLSPAAPRSPPPSDELKVIPQRIQGKKLNKLMLEFASGVYGELD

SEQ ID NO: 6120 - DNA, 1574 bp, Zea mays subsp. mays
  misc_feature (1)..(1574): Ceres Seq. ID no. 12367619
  misc_feature: MA Experiment ID: 108535 Result: Up-regulated in Transcription
  misc_feature: MA Experiment 108535 PARAMETER Experiment Name: Zm_Meristem_P Parameter: Age (day) Value: 8
  misc_feature: MA Experiment 108535 PARAMETER Experiment Name: Zm_Meristem_P Parameter: Organism Value: Zea mays
  misc_feature: MA Experiment 108535 PARAMETER Experiment Name: Zm_Meristem_P Parameter: Plant Line Value: 35A19
  misc_feature: MA Experiment 108535 PARAMETER Experiment Name: Zm_Meristem_P Parameter: Tissue Value: Root Meristem vs. Above Root Meristem
  misc_feature: MA Experiment ID: 20000108 Result: Up-regulated in Transcription
  misc_feature: MA Experiment 20000108 PARAMETER Experiment Name: Zm_Root-Tips_P Parameter: Age (day) Value: 12
  misc_feature: MA Experiment 20000108 PARAMETER Experiment Name: Zm_Root-Tips_P Parameter: Organism Value: Zea mays
  misc_feature: MA Experiment 20000108 PARAMETER Experiment Name: Zm_Root-Tips_P Parameter: Tissue Value: Root tips vs. Root mid region    35
  misc_feature: MA Experiment 20000108 PARAMETER Experiment Name: Zm_Root-Tips_P Parameter: Tissue Value: Root tips vs. Root mid region   Sequence Listing-Misc Features (4)
  misc_feature: MA Experiment ID: 20000477 Result: Down-regulated in Transcription
  misc_feature: MA Experiment 20000477 PARAMETER Experiment Name: Zm_5mM_SA_P Parameter: Age (day) Value: 10
  misc_feature: MA Experiment 20000477 PARAMETER Experiment Name: Zm_5mM_SA_P Parameter: Organism Value: Zea mays
  misc_feature: MA Experiment 20000477 PARAMETER Experiment Name: Zm_5mM_SA_P Parameter: Plant Line Value: 35A19
  misc_feature: MA Experiment 20000477 PARAMETER Experiment Name: Zm_5mM_SA_P Parameter: Timepoint (hr) Value: 48
  misc_feature: MA Experiment 20000477 PARAMETER Experiment Name: Zm_5mM_SA_P Parameter: Tissue Value: Aerial
  misc_feature: MA Experiment 20000477 PARAMETER Experiment Name: Zm_5mM_SA_P Parameter: Treatment Value: 5mM SA vs. No Treatment
  misc_feature: MA Experiment ID: 20000478 Result: Down-regulated in Transcription
  misc_feature: MA Experiment 20000478 PARAMETER Experiment Name: Zm_5mM_SA_P Parameter: Age (day) Value: 11
  misc_feature: MA Experiment 20000478 PARAMETER Experiment Name: Zm_5mM_SA_P Parameter: Organism Value: Zea mays
  misc_feature: MA Experiment 20000478 PARAMETER Experiment Name: Zm_5mM_SA_P Parameter: Plant Line Value: 35A19
  misc_feature: MA Experiment 20000478 PARAMETER Experiment Name: Zm_5mM_SA_P Parameter: Timepoint (hr) Value: 72
  misc_feature: MA Experiment 20000478 PARAMETER Experiment Name: Zm_5mM_SA_P Parameter: Tissue Value: Aerial
  misc_feature: MA Experiment 20000478 PARAMETER Experiment Name: Zm_5mM_SA_P Parameter: Treatment Value: 5mM SA vs. No Treatment
  misc_feature: MA Experiment ID: 20000479 Result: Down-regulated in Transcription
  misc_feature: MA Experiment 20000479 PARAMETER Experiment Name: Zm_Drought_P Parameter: Age (day) Value: 10
  misc_feature: MA Experiment 20000479 PARAMETER Experiment Name: Zm_Drought_P Parameter: Organism Value: Zea mays
  misc_feature: MA Experiment 20000479 PARAMETER Experiment Name: Zm_Drought_P Parameter: Plant Line Value: 35A19
  misc_feature: MA Experiment 20000479 PARAMETER Experiment Name: Zm_Drought_P Parameter: Timepoint (hr) Value: 48
  misc_feature: MA Experiment 20000479 PARAMETER Experiment Name: Zm_Drought_P Parameter: Tissue Value: Aerial
  misc_feature: MA Experiment 20000479 PARAMETER Experiment Name: Zm_Drought_P Parameter: Treatment Value: Drought vs. No Drought
agaggcacagtgacagacagagagagagcgcgcgcggggggagcccagcacagcacctacactagctagccaccaccaccaccaccaccgaccgaatcgggtgcgcgcggcgcgctgctcgtcagctccggccggccgcccggccgctttataaagccacccacccagccccgcccgatcgccatcgccatacccccgcctccgtccacggacacacacccgccttgccagccggcaccctcccggcctcccccacctgtgtcctccggcctcgccgccgcaaaacccgccgcgcaggccggttgctccgattgggagtgccaatcggagccaacagcgagggaagcacatgctgccgttcgtcctagagttcctcattgatgtcgcctgtgatcagtgagatcctcctctcggggtttatgatcaactccacactccggcgccgcacccacctggtccagtccttctccgtcgtcttcctctactggttctatgtcttctcatgaactactcgcccccatcatagccacgcccctcctctcccactcctcctcctcctctttcccttccatctagtagcatctaccgtcctcctcttctctccgtgtcagtctctgccttcgtcgtcgccgtttcagtcgtttcctaaaccttctttagcttgcatgcacttccctactgctgctagcaaagacctttattagtagtgtcaattaagttacgaaagaagaagaaagaaagaaaatttcgaggccgagaaaaaagacggctttgatctctctgctagtgtggtgtggtagtgtgtgcttctagtaagtaagcgagccagggatcaagaagcagagagctgctttgtctcttttgtctcttgcaagaatggcttcctccagcgggagcgggagctcgggctccctctcggcggcaacggcggccctggccgccgcggcgggcacggaggaggagctgcgcgcgctcatggagcagcgccgcgcgaagcggatgctgtccaaccgcgagtccgcgcggcggtcgcggatgcgcaagcagcgccacctcgacgagctgaccgcgcaggcggcgcacctgcgccgcgagaacgcgcacgtggccaccgcgctcggcctcaccgcgcagggcctcctcgccgtggacgccgagaacgccgtcctccgcacccaggccgccgagctcgccgcgcgcctcggctccctcaacgacatcctcgcctgcatgaacaccaacgccgtcggcgccgtcgccgtcttcctcacagccgccgccgccgccgccgccgcttcctccgacccctgcctcgccttcgacggcgccaccgccctggacgacctcctcagatcctgccccgagaacatgttccagtaccagctctgctagctccagaccgcgcgaagtcaccatggcagcgcaaaacaccttcttttcttttcttttgttttttttttttttttcttcttcttcttctggtgtttcaggtttagtaatctgctagtgagatggaagaactgaggtcagatcagacgtggtggtgactagccatgaaagtgaactttactgtt

SEQ ID NO: 6121 - protein, 171 aa, Zea mays subsp. mays
  peptide (1)..(171): Ceres Seq. ID no. 12367620
  misc_feature (33)..(97): Pfam Name: bZIP transcription factor Pfam Description: bZIP transcription factor
MASSSGSGSSGSLSAATAALAAAAGTEEELRALMEQRRAKRMLSNRESARRSRMRKQRHLDELTAQAAHLRRENAHVATALGLTAQGLLAVDAENAVLRTQAAELAARLGSLNDILACMNTNAVGAVAVFLTAAAAAAAASSDPCLAFDGATALDDLLRSCPENMFQYQLC

SEQ ID NO: 6122 - protein, 138 aa, Zea mays subsp. mays
  peptide (1)..(138): Ceres Seq. ID no. 12367621
  misc_feature (1)..(64): Pfam Name: bZIP transcription factor Pfam Description: bZIP transcription factor
MEQRRAKRMLSNRESARRSRMRKQRHLDELTAQAAHLRRENAHVATALGLTAQGLLAVDAENAVLRTQAAELAARLGSLNDILACMNTNAVGAVAVFLTAAAAAAAASSDPCLAFDGATALDDLLRSCPENMFQYQLC

SEQ ID NO: 6123 - protein, 130 aa, Zea mays subsp. mays
  peptide (1)..(130): Ceres Seq. ID no. 12367622
  misc_feature (1)..(56): Pfam Name: bZIP transcription factor Pfam Description: bZIP transcription factor
MLSNRESARRSRMRKQRHLDELTAQAAHLRRENAHVATALGLTAQGLLAVDAENAVLRTQAAELAARLGSLNDILACMNTNAVGAVAVFLTAAAAAAAASSDPCLAFDGATALDDLLRSCPENMFQYQLC

SEQ ID NO: 6124 - DNA, 1466 bp, Zea mays subsp. mays
  misc_feature (1)..(1466): Ceres Seq. ID no. 13577847
  misc_feature: MA Experiment ID: 108534 Result: Up-regulated in Transcription
  misc_feature: MA Experiment 108534 PARAMETER Experiment Name: Zm_4deg_Cold_P Parameter: Age (hr) Value: 8
  misc_feature: MA Experiment 108534 PARAMETER Experiment Name: Zm_4deg_Cold_P Parameter: Organism Value: Zea mays
  misc_feature: MA Experiment 108534 PARAMETER Experiment Name: Zm_4deg_Cold_P Parameter: Plant Line Value: 35A19
  misc_feature: MA Experiment 108534 PARAMETER Experiment Name: Zm_4deg_Cold_P Parameter: Temperature (deg C) Value: 4 vs. 22
  misc_feature: MA Experiment 108534 PARAMETER Experiment Name: Zm_4deg_Cold_P Parameter: Timepoint (hr) Value: 6
  misc_feature: MA Experiment 108534 PARAMETER Experiment Name: Zm_4deg_Cold_P Parameter: Tissue Value: Aerial
  misc_feature: MA Experiment ID: 108687 Result: Up-regulated in Transcription
  misc_feature: MA Experiment 108687 PARAMETER Experiment Name: Zm_Embryos-Flowers__P Parameter: Tissue Value: Embryo vs. Aerial+
atgtaaaaccgtccgacgcgagccccacctccgcgctcgcacgcggaaggagagggacgagcgagccaccgtcaccgagcgcggttacaagaaaatccaatctctcccccacgctcgtttcgactcgcgccatggaggcgcaggcgcaggacaatagggcggaggatggggacggcgcgcggcaacacgtagccggcggcgtcgcggcgacggggatggctatgggcgcgatccccatgcacgggttcatggtcccgaagccagagccggtggagttcttcggcgggatggccgtggtgcggagcaagccgccgccgcggaaccgcgaccggcacaccaaggtggaggggcgggggcggcggatccgcatgcccgcggcgtgcgcggccaggatcttccagctgacgcgggagctagggcacaagtccgacggcgagaccatccggtggctgctgcagcagtcggagcccgccatcatcgccgccaccggcaccggcacggtcccggcgatcgcgaccacggtcgacggcgtgctccgcatccccacgcagtcctcgtcgtcctccagcccctcgtccctcaccaccgtggtcgacggcgacgaggcgtccgccaagcgccgccgcaagctgcagccgacgcgagcggccgccggcgcgtccccgctcgccaccgccgcgcccgcggcgtactacccggtcctcgccgacccgctcctgcagggcaccggtggagcggccatctcggtgccgagcggcctcgcccccatcgccgcgtcgggcgcccctcaagggctcgtcccggtcttcgcggtccctgcggccggcagccccggcggcggcaaccgcatgattccgcaggccaccgccgtgtggatggtgccccagcctggcgccgcggccgcccagcccacgcaattctgggccatccagcccgcgccgcagctcatcaacctcggcggcgcgcaggccgccgtgttccccgcggcggtgaacgtcgccgacttccagggccagcagcccatctctagcttgtctcacaacagcaactcggagcatctgcacctggggtccgggtcccacgagcagcagcgcggcggtcgcagcgacgtcaaccatccggaggaggaagaagacgacgacgacgacgacgagccggtgtccgactccagcccagaagagtaacgcaccnccgtacccccagaaagtccaaccccaaagcttaggttccttttgctctaatttaatcgccccccctcgttttcccccttttcgcaatcctccttatgatgaactacatgatgctttctgtcgtagctcacgttcagttcagtgacccccagtgttagtggtagagagaagaagatgatgatnaaagaggtagtggaactgtanaagcagcgtgtaatgcaaatcaaaacgagcagctgatttgttattgagttaattaattgacgaccttttgcc

SEQ ID NO: 6125 - protein, 393 aa, Zea mays subsp. mays
  peptide (1)..(393): Ceres Seq. ID no. 13577848
  misc_feature (98)..(254): Pfam Name: TCP family transcription factor Pfam Description: TCP family transcription factor
  misc_feature (44)..(393): Homolog of NCBI NO: 7489534 NR Description: probable DNA binding protein PCF2 - rice
  misc_feature (85)..(359): Homolog of NCBI NO: 15225538 NR Description: TCP family transcription factor, putative
  misc_feature (81)..(276): Homolog of NCBI NO: 15242216 NR Description: TCP family transcription factor, putative thaliana] >gi|30696122|ref|NP_851173.1| TCP family transcription putative [Arabidopsis thaliana] >gi|8809685|dbj|BAA97226.1|
  misc_feature (94)..(276): Homolog of NCBI NO: 21592496 NR Description: unknown [Arabidopsis thaliana]
  misc_feature (98)..(391): Homolog of NCBI NO: 15219640 NR Description: TCP family transcription factor, putative
  misc_feature (96)..(358): Homolog of NCBI NO: 15218305 NR Description: TCP family transcription factor, putative
  misc_feature (102)..(258): Homolog of NCBI NO: 18409345 NR Description: TCP family transcription factor, putative
  misc_feature (103)..(212): Homolog of NCBI NO: 5731257 NR Description: auxin-induced basic helix-loop-helix
  misc_feature (97)..(237): Homolog of NCBI NO: 15237274 NR Description: TCP family transcription factor, putative thaliana] >gi|10177817|dbj|BAB11183.1| gene_id:MKD15.14~unknown
  misc_feature (97)..(237): Homolog of NCBI NO: 26452377 NR Description: unknown protein [Arabidopsis thaliana]
VKPSDASPTSALARGRRGTSEPPSPSAVTRKSNLSPTLVSTRAMEAQAQDNRAEDGDGARQHVAGGVAATGMAMGAIPMHGFMVPKPEPVEFFGGMAVVRSKPPPRNRDRHTKVEGRGRRIRMPAACAARIFQLTRELGHKSDGETIRWLLQQSEPAIIAATGTGTVPAIATTVDGVLRIPTQSSSSSSPSSLTTVVDGDEASAKRRRKLQPTRAAAGASPLATAAPAAYYPVLADPLLQGTGGAAISVPSGLAPIAASGAPQGLVPVFAVPAAGSPGGGNRMIPQATAVWMVPQPGAAAAQPTQFWAIQPAPQLINLGGAQAAVFPAAVNVADFQGQQPISSLSHNSNSEHLHLGSGSHEQQRGGRSDVNHPEEEEDDDDDDEPVSDSSPEE

SEQ ID NO: 6126 - protein, 350 aa, Zea mays subsp. mays
  peptide (1)..(350): Ceres Seq. ID no. 13577849
  misc_feature (55)..(211): Pfam Name: TCP family transcription factor Pfam Description: TCP family transcription factor
  misc_feature (1)..(350): Homolog of NCBI NO: 7489534 NR Description: probable DNA binding protein PCF2 - rice
  misc_feature (42)..(316): Homolog of NCBI NO: 15225538 NR Description: TCP family transcription factor, putative
  misc_feature (38)..(233): Homolog of NCBI NO: 15242216 NR Description: TCP family transcription factor, putative thaliana] >gi|30696122|ref|NP_851173.1| TCP family transcription putative [Arabidopsis thaliana] >gi|8809685|dbj|BAA97226.1|
  misc_feature (51)..(233): Homolog of NCBI NO: 21592496 NR Description: unknown [Arabidopsis thaliana]
  misc_feature (55)..(348): Homolog of NCBI NO: 15219640 NR Description: TCP family transcription factor, putative
  misc_feature (53)..(315): Homolog of NCBI NO: 15218305 NR Description: TCP family transcription factor, putative
  misc_feature (59)..(215): Homolog of NCBI NO: 18409345 NR Description: TCP family transcription factor, putative
  misc_feature (60)..(169): Homolog of NCBI NO: 5731257 NR Description: auxin-induced basic helix-loop-helix
  misc_feature (54)..(194): Homolog of NCBI NO: 15237274 NR Description: TCP family transcription factor, putative thaliana] >gi|10177817|dbj|BAB11183.1| gene_id:MKD15.14~unknown
  misc_feature (54)..(194): Homolog of NCBI NO: 26452377 NR Description: unknown protein [Arabidopsis thaliana]
MEAQAQDNRAEDGDGARQHVAGGVAATGMAMGAIPMHGFMVPKPEPVEFFGGMAVVRSKPPPRNRDRHTKVEGRGRRIRMPAACAARIFQLTRELGHKSDGETIRWLLQQSEPAIIAATGTGTVPAIATTVDGVLRIPTQSSSSSSPSSLTTVVDGDEASAKRRRKLQPTRAAAGASPLATAAPAAYYPVLADPLLQGTGGAAISVPSGLAPIAASGAPQGLVPVFAVPAAGSPGGGNRMIPQATAVWMVPQPGAAAAQPTQFWAIQPAPQLINLGGAQAAVFPAAVNVADFQGQQPISSLSHNSNSEHLHLGSGSHEQQRGGRSDVNHPEEEEDDDDDDEPVSDSSPEE

SEQ ID NO: 6127 - protein, 322 aa, Zea mays subsp. mays
  peptide (1)..(322): Ceres Seq. ID no. 13577850
  misc_feature (27)..(183): Pfam Name: TCP family transcription factor Pfam Description: TCP family transcription factor
  misc_feature (1)..(322): Homolog of NCBI NO: 7489534 NR Description: probable DNA binding protein PCF2 - rice
  misc_feature (14)..(288): Homolog of NCBI NO: 15225538 NR Description: TCP family transcription factor, putative
  misc_feature (10)..(205): Homolog of NCBI NO: 15242216 NR Description: TCP family transcription factor, putative thaliana] >gi|30696122|ref|NP_851173.1| TCP family transcription putative [Arabidopsis thaliana] >gi|8809685|dbj|BAA97226.1|
  misc_feature (23)..(205): Homolog of NCBI NO: 21592496 NR Description: unknown [Arabidopsis thaliana]
  misc_feature (27)..(320): Homolog of NCBI NO: 15219640 NR Description: TCP family transcription factor, putative
  misc_feature (25)..(287): Homolog of NCBI NO: 15218305 NR Description: TCP family transcription factor, putative
  misc_feature (31)..(187): Homolog of NCBI NO: 18409345 NR Description: TCP family transcription factor, putative
  misc_feature (32)..(141): Homolog of NCBI NO: 5731257 NR Description: auxin-induced basic helix-loop-helix
  misc_feature (26)..(166): Homolog of NCBI NO: 15237274 NR Description: TCP family transcription factor, putative thaliana] >gi|10177817|dbj|BAB11183.1| gene_id:MKD15.14~unknown
  misc_feature (26)..(166): Homolog of NCBI NO: 26452377 NR Description: unknown protein [Arabidopsis thaliana]
MAMGAIPMHGFMVPKPEPVEFFGGMAVVRSKPPPRNRDRHTKVEGRGRRIRMPAACAARIFQLTRELGHKSDGETIRWLLQQSEPAIIAATGTGTVPAIATTVDGVLRIPTQSSSSSSPSSLTTVVDGDEASAKRRRKLQPTRAAAGASPLATAAPAAYYPVLADPLLQGTGGAAISVPSGLAPIAASGAPQGLVPVFAVPAAGSPGGGNRMIPQATAVWMVPQPGAAAAQPTQFWAIQPAPQLINLGGAQAAVFPAAVNVADFQGQQPISSLSHNSNSEHLHLGSGSHEQQRGGRSDVNHPEEEEDDDDDDEPVSDSSPEE

SEQ ID NO: 6128 - DNA, 1633 bp, Zea mays subsp. mays
  misc_feature (1)..(1633): Ceres Seq. ID no. 12373222
  misc_feature: MA Experiment ID: 108522 Result: Down-regulated in Transcription
  misc_feature: MA Experiment 108522 PARAMETER Experiment Name: Zm_42deg_Heat_P Parameter: Age (day) Value: 8
  misc_feature: MA Experiment 108522 PARAMETER Experiment Name: Zm_42deg_Heat_P Parameter: Organism Value: Zea mays
  misc_feature: MA Experiment 108522 PARAMETER Experiment Name: Zm_42deg_Heat_P Parameter: Plant Line Value: 35A19
  misc_feature: MA Experiment 108522 PARAMETER Experiment Name: Zm_42deg_Heat_P Parameter: Temperature (deg C) Value: 42 vs. 22
  misc_feature: MA Experiment 108522 PARAMETER Experiment Name: Zm_42deg_Heat_P Parameter: Timepoint (hr) Value: 1
  misc_feature: MA Experiment 108522 PARAMETER Experiment Name: Zm_42deg_Heat_P Parameter: Tissue Value: Aerial
  misc_feature: MA Experiment ID: 108523 Result: Down-regulated in Transcription
  misc_feature: MA Experiment 108523 PARAMETER Experiment Name: Zm_42deg_Heat_P Parameter: Age (day) Value: 8
  misc_feature: MA Experiment 108523 PARAMETER Experiment Name: Zm_42deg_Heat_P Parameter: Organism Value: Zea mays
  misc_feature: MA Experiment 108523 PARAMETER Experiment Name: Zm_42deg_Heat_P Parameter: Plant Line Value: 35A19
  misc_feature: MA Experiment 108523 PARAMETER Experiment Name: Zm_42deg_Heat_P Parameter: Temperature (deg C) Value: 42 vs. 22
  misc_feature: MA Experiment 108523 PARAMETER Experiment Name: Zm_42deg_Heat_P Parameter: Timepoint (hr) Value: 6
  misc_feature: MA Experiment 108523 PARAMETER Experiment Name: Zm_42deg_Heat_P Parameter: Tissue Value: Aerial
  misc_feature: MA Experiment ID: 108526 Result: Up-regulated in Transcription
  misc_feature: MA Experiment 108526 PARAMETER Experiment Name: Zm_5mM_NO_P Parameter: Age (day) Value: 8
  misc_feature: MA Experiment 108526 PARAMETER Experiment Name: Zm_5mM_NO_P Parameter: Organism Value: Zea mays
  misc_feature: MA Experiment 108526 PARAMETER Experiment Name: Zm_5mM_NO_P Parameter: Plant Line Value: 35A19
  misc_feature: MA Experiment 108526 PARAMETER Experiment Name: Zm_5mM_NO_P Parameter: Timepoint (hr) Value: 1
  misc_feature: MA Experiment 108526 PARAMETER Experiment Name: Zm_5mM_NO_P Parameter: Tissue Value: Aerial
  misc_feature: MA Experiment 108526 PARAMETER Experiment Name: Zm_5mM_NO_P Parameter: Treatment Value: 5mM NO vs. No Treatment
  misc_feature: MA Experiment ID: 108533 Result: Down-regulated in Transcription
  misc_feature: MA Experiment 108533 PARAMETER Experiment Name: Zm_4deg_Cold_P Parameter: Age (hr) Value: 8
  misc_feature: MA Experiment 108533 PARAMETER Experiment Name: Zm_4deg_Cold_P Parameter: Organism Value: Zea mays
  misc_feature: MA Experiment 108533 PARAMETER Experiment Name: Zm_4deg_Cold_P Parameter: Plant Line Value: 35A19
  misc_feature: MA Experiment 108533 PARAMETER Experiment Name: Zm_4deg_Cold_P Parameter: Temperature (deg C) Value: 4 vs. 22
  misc_feature: MA Experiment 108533 PARAMETER Experiment Name: Zm_4deg_Cold_P Parameter: Timepoint (hr) Value: 1
  misc_feature: MA Experiment 108533 PARAMETER Experiment Name: Zm_4deg_Cold_P Parameter: Tissue Value: Aerial
  misc_feature: MA Experiment ID: 108536 Result: Down-regulated in Transcription
  misc_feature: MA Experiment 108536 PARAMETER Experiment Name: Zm_Meristem_P Parameter: Age (day) Value: 8
  misc_feature: MA Experiment 108536 PARAMETER Experiment Name: Zm_Meristem_P Parameter: Organism Value: Zea mays
  misc_feature: MA Experiment 108536 PARAMETER Experiment Name: Zm_Meristem_P Parameter: Plant Line Value: 35A19
  misc_feature: MA Experiment 108536 PARAMETER Experiment Name: Zm_Meristem_P Parameter: Tissue Value: Shoot Meristem vs. Above Shoot Meristem
  misc_feature: MA Experiment ID: 108556 Result: Down-regulated in Transcription
  misc_feature: MA Experiment 108556 PARAMETER Experiment Name: Zm_Drought_P Parameter: Age (day) Value: 9
  misc_feature: MA Experiment 108556 PARAMETER Experiment Name: Zm_Drought_P Parameter: Organism Value: Zea mays
  misc_feature: MA Experiment 108556 PARAMETER Experiment Name: Zm_Drought_P Parameter: Plant Line Value: 35A19
  misc_feature: MA Experiment 108556 PARAMETER Experiment Name: Zm_Drought_P Parameter: Timepoint (hr) Value: 24
  misc_feature: MA Experiment 108556 PARAMETER Experiment Name: Zm_Drought_P Parameter: Tissue Value: Aerial
  misc_feature: MA Experiment 108556 PARAMETER Experiment Name: Zm_Drought_P Parameter: Treatment Value: Drought vs. No Drought
  misc_feature: MA Experiment ID: 108688 Result: Down-regulated in Transcription
  misc_feature: MA Experiment 108688 PARAMETER Experiment Name: Zm_Embryos-Flowers__P Parameter: Tissue Value: Immature Flowers vs. Aerial+
  misc_feature: MA Experiment ID: 108689 Result: Down-regulated in Transcription
  misc_feature: MA Experiment 108689 PARAMETER Experiment Name: Zm_Drought_Roots_P Parameter: Age (day) Value: 9
  misc_feature: MA Experiment 108689 PARAMETER Experiment Name: Zm_Drought_Roots_P Parameter: Organism Value: Zea mays
  misc_feature: MA Experiment 108689 PARAMETER Experiment Name: Zm_Drought_Roots_P Parameter: Plant Line Value: 35A19
  misc_feature: MA Experiment 108689 PARAMETER Experiment Name: Zm_Drought_Roots_P Parameter: Timepoint (hr) Value: 24
  misc_feature: MA Experiment 108689 PARAMETER Experiment Name: Zm_Drought_Roots_P Parameter: Tissue Value: Roots
  misc_feature: MA Experiment 108689 PARAMETER Experiment Name: Zm_Drought_Roots_P Parameter: Treatment Value: Drought vs. No Drought
  misc_feature: MA Experiment ID: 20000535 Result: Up-regulated in Transcription
  misc_feature: MA Experiment 20000535 PARAMETER Experiment Name: Zm_Hybrid_Seed_Dev_P Parameter: DAP Value: 30 vs. 12
  misc_feature: MA Experiment 20000535 PARAMETER Experiment Name: Zm_Hybrid_Seed_Dev_P Parameter: Organism Value: Zea mays
  misc_feature: MA Experiment 20000535 PARAMETER Experiment Name: Zm_Hybrid_Seed_Dev_P Parameter: Plant Line Value: 35A19
  misc_feature: MA Experiment 20000535 PARAMETER Experiment Name: Zm_Hybrid_Seed_Dev_P Parameter: Tissue Value: Embryo vs. Unfert Floret
atcaagcgtgcaaggtctcaatctcgcggtaatggcgaggccacacgtcgtggttgtgccgtacccatgctccggcaacatcaacccagcgctgcagatcgccaggctgctccaccgccacggcgtctacgtcaccttcgtcaacaccgagcacaaccaccggcgcgtgcaggccaccgagggcgccggagccgtgcgcggcggggaggggttccgcttcgaggcaatcccggacggcctgtccgaggccgagcggggcaagcaggactacgggcgcagcctggctgtgtccacgagcacgcgctgcgctgcgccgctcagggacctcatcgcgcggctcaacggcacgccgggcgtgccgccggtcacctgcgtgctgcccaccatgctgatgagcttcgcgctgggcgtggcgcgggagctcgggatcccgaccatgtcgttctggacggccagcgcggcctcgctgatgacgcacatgaggctccgcgagctgcaggaaagagggtacgtgccactcaaggatgagagtttcttgacgaacggctacctcgagacgacggtcatcgactggatccccggggtgccgccgatccgcctcggcgacttctcgagcttcctccgcaccaccgacccggacgacttcggtctgcgcttcaacgagtcggaggcgaacagctgcgccaaggccggcgccctcatcctcaacaccttagacggcctcgaggccgacgtgctcgccgcgctgcgcgccgagtacccgcgcgtgtacaccgtcgggcccctgggcctgctcctcagccaggacgacgaccgagacagcagcgcctccgccagcggcagcaccgagtcgaccggcctgagcctgtggaagaaggacgccgagtgcctcgcctggctggacgcgcaagagcggggctccgtcgtgtacgtcaacttcggcagccacacggtggtgacgccggagcagctgaacgagttcgcgtggggcctcgcggcgagcggccaccggttcctctggtccatgagggacaacctcgtccgcggcggcggcggcgccggcgccggcctggacgcgatgccctcgaccttcaaggctgagacggcggggcggtgccacgtggccgcgtggtgtccccaggagcaggtgctgcggcacccggccgtcggctgcttcctgacccacagcggatggaactcgacgtgcgagagtctggccgccggcgtgcccatggtgtgctggccgggcttctcggaccagtacaccaactgcaagtacagctgcgaggtctggggtgtcggcgtccggctggaggcaacggtggagagggagcaggtcgccatgcacgtcaggaaggtgatggcaagcgaggagatgcggaagagcgcggccaagtggaaggaggaggcggaggctgcggccggccccggcggttcgtcacgcgagaacctgctgagcatggtgagagcgctcagccccgcacccaactcgtcagatgcagaagagcccaaagataagtagtcacactagaacggaatctaatgaagcaattgttcatgatcgacgccagtaaagtttgtgttcagttgattgattttctgtgagtaaattggagtagcggtcctcagccgg

SEQ ID NO: 6129 - protein, 506 aa, Zea mays subsp. mays
  peptide (1)..(506): Ceres Seq. ID no. 12373223
  misc_feature (17)..(489): Pfam Name: UDP-glucoronosyl and UDP-glucosyl transferase Pfam Description: UDP-glucoronosyl and UDP-glucosyl transferase
  misc_feature (13)..(496): Homolog of NCBI NO: 19911203 NR Description: glucosyltransferase-10 [Vigna angularis]
  misc_feature (13)..(499): Homolog of NCBI NO: 15219876 NR Description: UDP-glucose glucosyltransferase, putative; id: At1g22400.1, supported by cDNA: gi_19698984 [Arabidopsis
  misc_feature (13)..(488): Homolog of NCBI NO: 15219867 NR Description: UDP-glucose glucosyltransferase, putative;
  misc_feature (10)..(488): Homolog of NCBI NO: 17065006 NR Description: UDP-glucose glucosyltransferase [Arabidopsis
  misc_feature (10)..(488): Homolog of NCBI NO: 15219870 NR Description: UDP-glucose glucosyltransferase; protein id: supported by cDNA: gi_12083243, supported by cDNA: gi_17065005,
  misc_feature (11)..(488): Homolog of NCBI NO: 38569140 NR Description: OSJNBb0033P05.8 [Oryza sativa (japonica
  misc_feature (13)..(488): Homolog of NCBI NO: 38569188 NR Description: OSJNBa0086B14.13 [Oryza sativa (japonica
  misc_feature (13)..(488): Homolog of NCBI NO: 15218268 NR Description: UDP-glucose glucosyltransferase, putative; id: At1g78270.1, supported by cDNA: gi_20466351 [Arabidopsis >gi|8052539|gb|AAF71803.1|AC013430_12 F3F9.19 [Arabidopsis
  misc_feature (14)..(484): Homolog of NCBI NO: 38347667 NR Description: OSJNBa0054D14.2 [Oryza sativa (japonica
  misc_feature (15)..(478): Homolog of NCBI NO: 38344776 NR Description: OSJNBb0026L04.7 [Oryza sativa (japonica
SSVQGLNLAVMARPHVVVVPYPCSGNINPALQIARLLHRHGVYVTFVNTEHNHRRVQATEGAGAVRGGEGFRFEAIPDGLSEAERGKQDYGRSLAVSTSTRCAAPLRDLIARLNGTPGVPPVTCVLPTMLMSFALGVARELGIPTMSFWTASAASLMTHMRLRELQERGYVPLKDESFLTNGYLETTVIDWIPGVPPIRLGDFSSFLRTTDPDDFGLRFNESEANSCAKAGALILNTLDGLEADVLAALRAEYPRVYTVGPLGLLLSQDDDRDSSASASGSTESTGLSLWKKDAECLAWLDAQERGSVVYVNFGSHTVVTPEQLNEFAWGLAASGHRFLWSMRDNLVRGGGGAGAGLDAMPSTFKAETAGRCHVAAWCPQEQVLRHPAVGCFLTHSGWNSTCESLAAGVPMVCWPGFSDQYTNCKYSCEVWGVGVRLEATVEREQVAMHVRKVMASEEMRKSAAKWKEEAEAAAGPGGSSRENLLSMVRALSPAPNSSDAEEPKDK

SEQ ID NO: 6130 - protein, 496 aa, Zea mays subsp. mays
  peptide (1)..(496): Ceres Seq. ID no. 12373224
  misc_feature (7)..(479): Pfam Name: UDP-glucoronosyl and UDP-glucosyl transferase Pfam Description: UDP-glucoronosyl and UDP-glucosyl transferase
  misc_feature (3)..(486): Homolog of NCBI NO: 19911203 NR Description: glucosyltransferase-10 [Vigna angularis]
  misc_feature (3)..(489): Homolog of NCBI NO: 15219876 NR Description: UDP-glucose glucosyltransferase, putative; id: At1g22400.1, supported by cDNA: gi_19698984 [Arabidopsis
  misc_feature (3)..(478): Homolog of NCBI NO: 15219867 NR Description: UDP-glucose glucosyltransferase, putative;
  misc_feature (1)..(478): Homolog of NCBI NO: 17065006 NR Description: UDP-glucose glucosyltransferase [Arabidopsis
  misc_feature (1)..(478): Homolog of NCBI NO: 15219870 NR Description: UDP-glucose glucosyltransferase; protein id: supported by cDNA: gi_12083243, supported by cDNA: gi_17065005,
  misc_feature (1)..(478): Homolog of NCBI NO: 38569140 NR Description: OSJNBb0033P05.8 [Oryza sativa (japonica
  misc_feature (3)..(478): Homolog of NCBI NO: 38569188 NR Description: OSJNBa0086B14.13 [Oryza sativa (japonica
  misc_feature (3)..(478): Homolog of NCBI NO: 15218268 NR Description: UDP-glucose glucosyltransferase, putative; id: At1g78270.1, supported by cDNA: gi_20466351 [Arabidopsis >gi|8052539|gb|AAF71803.1|AC013430_12 F3F9.19 [Arabidopsis
  misc_feature (4)..(474): Homolog of NCBI NO: 38347667 NR Description: OSJNBa0054D14.2 [Oryza sativa (japonica
  misc_feature (5)..(468): Homolog of NCBI NO: 38344776 NR Description: OSJNBb0026L04.7 [Oryza sativa (japonica
MARPHVVVVPYPCSGNINPALQIARLLHRHGVYVTFVNTEHNHRRVQATEGAGAVRGGEGFRFEAIPDGLSEAERGKQDYGRSLAVSTSTRCAAPLRDLIARLNGTPGVPPVTCVLPTMLMSFALGVARELGIPTMSFWTASAASLMTHMRLRELQERGYVPLKDESFLTNGYLETTVIDWIPGVPPIRLGDFSSFLRTTDPDDFGLRFNESEANSCAKAGALILNTLDGLEADVLAALRAEYPRVYTVGPLGLLLSQDDDRDSSASASGSTESTGLSLWKKDAECLAWLDAQERGSVVYVNFGSHTVVTPEQLNEFAWGLAASGHRFLWSMRDNLVRGGGGAGAGLDAMPSTFKAETAGRCHVAAWCPQEQVLRHPAVGCFLTHSGWNSTCESLAAGVPMVCWPGFSDQYTNCKYSCEVWGVGVRLEATVEREQVAMHVRKVMASEEMRKSAAKWKEEAEAAAGPGGSSRENLLSMVRALSPAPNSSDAEEPKDK

SEQ ID NO: 6131 - protein, 378 aa, Zea mays subsp. mays
  peptide (1)..(378): Ceres Seq. ID no. 12373225
  misc_feature (1)..(361): Pfam Name: UDP-glucoronosyl and UDP-glucosyl transferase Pfam Description: UDP-glucoronosyl and UDP-glucosyl transferase
  misc_feature (1)..(360): Homolog of NCBI NO: 15219870 NR Description: UDP-glucose glucosyltransferase; protein id: supported by cDNA: gi_12083243, supported by cDNA: gi_17065005,
  misc_feature (1)..(360): Homolog of NCBI NO: 38569140 NR Description: OSJNBb0033P05.8 [Oryza sativa (japonica
  misc_feature (1)..(360): Homolog of NCBI NO: 38569188 NR Description: OSJNBa0086B14.13 [Oryza sativa (japonica
  misc_feature (1)..(368): Homolog of NCBI NO: 19911203 NR Description: glucosyltransferase-10 [Vigna angularis]
  misc_feature (1)..(360): Homolog of NCBI NO: 15219867 NR Description: UDP-glucose glucosyltransferase, putative;
  misc_feature (1)..(360): Homolog of NCBI NO: 17065006 NR Description: UDP-glucose glucosyltransferase [Arabidopsis
  misc_feature (1)..(371): Homolog of NCBI NO: 15219876 NR Description: UDP-glucose glucosyltransferase, putative; id: At1g22400.1, supported by cDNA: gi_19698984 [Arabidopsis
  misc_feature (1)..(360): Homolog of NCBI NO: 15218268 NR Description: UDP-glucose glucosyltransferase, putative; id: At1g78270.1, supported by cDNA: gi_20466351 [Arabidopsis >gi|8052539|gb|AAF71803.1|AC013430_12 F3F9.19 [Arabidopsis
  misc_feature (1)..(356): Homolog of NCBI NO: 38347667 NR Description: OSJNBa0054D14.2 [Oryza sativa (japonica
  misc_feature (1)..(350): Homolog of NCBI NO: 38344776 NR Description: OSJNBb0026L04.7 [Oryza sativa (japonica
MLMSFALGVARELGIPTMSFWTASAASLMTHMRLRELQERGYVPLKDESFLTNGYLETTVIDWIPGVPPIRLGDFSSFLRTTDPDDFGLRFNESEANSCAKAGALILNTLDGLEADVLAALRAEYPRVYTVGPLGLLLSQDDDRDSSASASGSTESTGLSLWKKDAECLAWLDAQERGSVVYVNFGSHTVVTPEQLNEFAWGLAASGHRFLWSMRDNLVRGGGGAGAGLDAMPSTFKAETAGRCHVAAWCPQEQVLRHPAVGCFLTHSGWNSTCESLAAGVPMVCWPGFSDQYTNCKYSCEVWGVGVRLEATVEREQVAMHVRKVMASEEMRKSAAKWKEEAEAAAGPGGSSRENLLSMVRALSPAPNSSDAEEPKDK

SEQ ID NO: 6132 - DNA, 1318 bp, Zea mays subsp. mays
  misc_feature (1)..(1318): Ceres Seq. ID no. 12349119
  misc_feature: MA Experiment ID: 108527 Result: Down-regulated in Transcription
  misc_feature: MA Experiment 108527 PARAMETER Experiment Name: Zm_5mM_NO_P Parameter: Age (day) Value: 8
  misc_feature: MA Experiment 108527 PARAMETER Experiment Name: Zm_5mM_NO_P Parameter: Organism Value: Zea mays
  misc_feature: MA Experiment 108527 PARAMETER Experiment Name: Zm_5mM_NO_P Parameter: Plant Line Value: 35A19
  misc_feature: MA Experiment 108527 PARAMETER Experiment Name: Zm_5mM_NO_P Parameter: Timepoint (hr) Value: 6
  misc_feature: MA Experiment 108527 PARAMETER Experiment Name: Zm_5mM_NO_P Parameter: Tissue Value: Aerial
  misc_feature: MA Experiment 108527 PARAMETER Experiment Name: Zm_5mM_NO_P Parameter: Treatment Value: 5mM NO vs. No Treatment
  misc_feature: MA Experiment ID: 108535 Result: Down-regulated in Transcription
  misc_feature: MA Experiment 108535 PARAMETER Experiment Name: Zm_Meristem_P Parameter: Age (day) Value: 8
  misc_feature: MA Experiment 108535 PARAMETER Experiment Name: Zm_Meristem_P Parameter: Organism Value: Zea mays
  misc_feature: MA Experiment 108535 PARAMETER Experiment Name: Zm_Meristem_P Parameter: Plant Line Value: 35A19
  misc_feature: MA Experiment 108535 PARAMETER Experiment Name: Zm_Meristem_P Parameter: Tissue Value: Root Meristem vs. Above Root Meristem
  misc_feature: MA Experiment ID: 108543 Result: Up-regulated in Transcription
  misc_feature: MA Experiment ID: 108544 Result: Down-regulated in Transcription
  misc_feature: MA Experiment ID: 108545 Result: Down-regulated in Transcription
  misc_feature: MA Experiment 108545 PARAMETER Experiment Name: Zm_Imbibed_Seeds_P Parameter: Age (day) Value: 3 vs. 2
  misc_feature: MA Experiment 108545 PARAMETER Experiment Name: Zm_Imbibed_Seeds_P Parameter: Organism Value: Zea mays
  misc_feature: MA Experiment 108545 PARAMETER Experiment Name: Zm_Imbibed_Seeds_P Parameter: Plant Line Value: 35A19
  misc_feature: MA Experiment 108545 PARAMETER Experiment Name: Zm_Imbibed_Seeds_P Parameter: Tissue Value: Aerial vs. Embryo
  misc_feature: MA Experiment ID: 20000477 Result: Down-regulated in Transcription
  misc_feature: MA Experiment 20000477 PARAMETER Experiment Name: Zm_5mM_SA_P Parameter: Age (day) Value: 10
  misc_feature: MA Experiment 20000477 PARAMETER Experiment Name: Zm_5mM_SA_P Parameter: Organism Value: Zea mays
  misc_feature: MA Experiment 20000477 PARAMETER Experiment Name: Zm_5mM_SA_P Parameter: Plant Line Value: 35A19
  misc_feature: MA Experiment 20000477 PARAMETER Experiment Name: Zm_5mM_SA_P Parameter: Timepoint (hr) Value: 48
  misc_feature: MA Experiment 20000477 PARAMETER Experiment Name: Zm_5mM_SA_P Parameter: Tissue Value: Aerial
  misc_feature: MA Experiment 20000477 PARAMETER Experiment Name: Zm_5mM_SA_P Parameter: Treatment Value: 5mM SA vs. No Treatment
  misc_feature: MA Experiment ID: 20000478 Result: Down-regulated in Transcription
  misc_feature: MA Experiment 20000478 PARAMETER Experiment Name: Zm_5mM_SA_P Parameter: Age (day) Value: 11
  misc_feature: MA Experiment 20000478 PARAMETER Experiment Name: Zm_5mM_SA_P Parameter: Organism Value: Zea mays
  misc_feature: MA Experiment 20000478 PARAMETER Experiment Name: Zm_5mM_SA_P Parameter: Plant Line Value: 35A19
  misc_feature: MA Experiment 20000478 PARAMETER Experiment Name: Zm_5mM_SA_P Parameter: Timepoint (hr) Value: 72
  misc_feature: MA Experiment 20000478 PARAMETER Experiment Name: Zm_5mM_SA_P Parameter: Tissue Value: Aerial
  misc_feature: MA Experiment 20000478 PARAMETER Experiment Name: Zm_5mM_SA_P Parameter: Treatment Value: 5mM SA vs. No Treatment
  misc_feature: MA Experiment ID: 20000480 Result: Down-regulated in Transcription
  misc_feature: MA Experiment 20000480 PARAMETER Experiment Name: Zm_Drought_P Parameter: Age (day) Value: 11
  misc_feature: MA Experiment 20000480 PARAMETER Experiment Name: Zm_Drought_P Parameter: Organism Value: Zea mays
  misc_feature: MA Experiment 20000480 PARAMETER Experiment Name: Zm_Drought_P Parameter: Plant Line Value: 35A19
  misc_feature: MA Experiment 20000480 PARAMETER Experiment Name: Zm_Drought_P Parameter: Timepoint (hr) Value: 72
  misc_feature: MA Experiment 20000480 PARAMETER Experiment Name: Zm_Drought_P Parameter: Tissue Value: Aerial
  misc_feature: MA Experiment 20000480 PARAMETER Experiment Name: Zm_Drought_P Parameter: Treatment Value: Drought vs. No Drought
  misc_feature: MA Experiment ID: 20000488 Result: Down-regulated in Transcription
  misc_feature: MA Experiment 20000488 PARAMETER Experiment Name: Zm_50mM_NH4NO3_L_to_H_P Parameter: Organism Value: Zea mays
  misc_feature: MA Experiment 20000488 PARAMETER Experiment Name: Zm_50mM_NH4NO3_L_to_H_P Parameter: Timepoint (hr) Value: 8
  misc_feature: MA Experiment 20000488 PARAMETER Experiment Name: Zm_50mM_NH4NO3_L_to_H_P Parameter: Tissue Value: Leaves
  misc_feature: MA Experiment 20000488 PARAMETER Experiment Name: Zm_50mM_NH4NO3_L_to_H_P Parameter: Treatment Value: 50mM NH4NO3 vs. 100mM Mannitol
  misc_feature: MA Experiment ID: 20000492 Result: Down-regulated in Transcription
  misc_feature: MA Experiment 20000492 PARAMETER Experiment Name: Zm_Hybrid_Seed_Dev_P Parameter: DAP Value: 12
  misc_feature: MA Experiment 20000492 PARAMETER Experiment Name: Zm_Hybrid_Seed_Dev_P Parameter: Organism Value: Zea mays
  misc_feature: MA Experiment 20000492 PARAMETER Experiment Name: Zm_Hybrid_Seed_Dev_P Parameter: Plant Line Value: 35A19
  misc_feature: MA Experiment 20000492 PARAMETER Experiment Name: Zm_Hybrid_Seed_Dev_P Parameter: Tissue Value: Fert Kernel vs. Unfert Floret
  misc_feature: MA Experiment ID: 20000535 Result: Down-regulated in Transcription
  misc_feature: MA Experiment 20000535 PARAMETER Experiment Name: Zm_Hybrid_Seed_Dev_P Parameter: DAP Value: 30 vs. 12
  misc_feature: MA Experiment 20000535 PARAMETER Experiment Name: Zm_Hybrid_Seed_Dev_P Parameter: Organism Value: Zea mays
  misc_feature: MA Experiment 20000535 PARAMETER Experiment Name: Zm_Hybrid_Seed_Dev_P Parameter: Plant Line Value: 35A19
  misc_feature: MA Experiment 20000535 PARAMETER Experiment Name: Zm_Hybrid_Seed_Dev_P Parameter: Tissue Value: Embryo vs. Unfert Floret
  misc_feature: MA Experiment ID: 20000626 Result: Down-regulated in Transcription
  misc_feature: MA Experiment 20000626 PARAMETER Experiment Name: Zm_Herbicide-Treatments_P Parameter: Timepoint (hr) Value: 12
  misc_feature: MA Experiment 20000626 PARAMETER Experiment Name: Zm_Herbicide-Treatments_P Parameter: Tissue Value: Aerial
  misc_feature: MA Experiment 20000626 PARAMETER Experiment Name: Zm_Herbicide-Treatments_P Parameter: Treatment Value: Roundup vs. No Treatment
  misc_feature: MA Experiment ID: 20000630 Result: Down-regulated in Transcription
  misc_feature: MA Experiment 20000630 PARAMETER Experiment Name: Zm_Herbicide-Treatments_P Parameter: Timepoint (hr) Value: 4
  misc_feature: MA Experiment 20000630 PARAMETER Experiment Name: Zm_Herbicide-Treatments_P Parameter: Tissue Value: Aerial
  misc_feature: MA Experiment 20000630 PARAMETER Experiment Name: Zm_Herbicide-Treatments_P Parameter: Treatment Value: Roundup vs. No Treatment
gagacgcacacgggcagtgacacgcgcgcataccgacggacttggtagctgctcaccagctatccagatcattggctcattgctgcttccattccattccccccctcggcatcggccgcgcccgcccgtgtcgggcggaggcggacgcgcgcgggaatgggacgccacgcggcctccggcggcggcgtgcagcagaagctgcgcaagggcctctggtcgcccgaggaagacgagaagctctacaaccacatcatccgctacggggtcgggtgctggagctccgtgcccaagctcgcagggctgcagaggtgcggcaagagctgccggcttcggtggatcaactacctacgccccgacctgaagcggggcagcttctcgcagcaggaggaggacgcgatcgtcggcctccaccagatcctggggaacaggtggtcgcagatcgcgtcgcacttgccgggccggacggataacgagatcaagaacttctggaacagctgcctcaagaagaagctgcgtcagcgcggcatcgaccccagcacccacaagcccgcggtctccgccaacgtgccggcggcatcggagcagccggcgtcgaaggaccgcaagccgtttgccacagccgccgctgatggcggctccgacatgaagcaccagcaggtgttcgacccgttcccgctgaccgacagcttcggcggcggcttcggcgccgcactgtacggccacacgggcggcaagcaggacgcggccgcgttcgtggactacagcagcgtgctggacgtgtcggagaacctgggctacggcggcgagagctccagcaacagcagcaactggaactgcgcgccggaggtgcacaacaatgcggtcgacggcgacgcgccgctgcactgggcctccgagagcaaggccacgcccttcgccggctacggcggcgaggagcaatcactcctcgggcacaggttctcgctgccctgccacggccagcaggagcagagccctccgcgttttgacttcgacatcggccggggcgccgtggtcggcgagttcagcctcgagttcttctgaaggtccagcttgggaatttcagcaatctagataccgcgtagcgcgtatatatatactgtgtattaaaggcatttcacacggaacaacaattgagagatcgtgcttcgttaatttcctctagtcgaccttactccttaacaatgtcttgcgtttcttttgttttttttatgttttatgtatgtctaaaataaaggcatagacatatatatgtaaacacggtgtagtgtaatagctatacattaaagtttttgtatgc

SEQ ID NO: 6133 - protein, 301 aa, Zea mays subsp. mays
  peptide (1)..(301): Ceres Seq. ID no. 12349120
  misc_feature (17)..(64): Pfam Name: Myb-like DNA-binding domain Pfam Description: Myb-like DNA-binding domain
  misc_feature (1)..(301): Homolog of NCBI NO: 34911526 NR Description: putative myb-related protein [Oryza sativa
  misc_feature (1)..(287): Homolog of NCBI NO: 547958 NR Description: Myb-related protein Hv33 >gi|421981|pir||S31818
  misc_feature (1)..(287): Homolog of NCBI NO: 19059 NR Description: MybHv33 [Hordeum vulgare subsp. vulgare]
  misc_feature (36)..(296): Homolog of NCBI NO: 227031 NR Description: myb-related gene Hv33
  misc_feature (1)..(301): Homolog of NCBI NO: 25458597 NR Description: probable myb-related protein [imported] - rice
  misc_feature (1)..(196): Homolog of NCBI NO: 34913750 NR Description: OSJNBa0051H17.23 [Oryza sativa (japonica
  misc_feature (1)..(149): Homolog of NCBI NO: 34902542 NR Description: putative transcription factor (myb) [Oryza sativa
  misc_feature (1)..(150): Homolog of NCBI NO: 28628949 NR Description: MYB2 [Dendrobium sp. XMW-2002-2]
  misc_feature (5)..(174): Homolog of NCBI NO: 34913340 NR Description: contains ESTs to Oryza sativa chromosome 1, OSJNBa0026J14.1~unknown protein
  misc_feature (1)..(134): Homolog of NCBI NO: 2280530 NR Description: ATMYB4 [Arabidopsis thaliana]
MGRHAASGGGVQQKLRKGLWSPEEDEKLYNHIIRYGVGCWSSVPKLAGLQRCGKSCRLRWINYLRPDLKRGSFSQQEEDAIVGLHQILGNRWSQIASHLPGRTDNEIKNFWNSCLKKKLRQRGIDPSTHKPAVSANVPAASEQPASKDRKPFATAAADGGSDMKHQQVFDPFPLTDSFGGGFGAALYGHTGGKQDAAAFVDYSSVLDVSENLGYGGESSSNSSNWNCAPEVHNNAVDGDAPLHWASESKATPFAGYGGEEQSLLGHRFSLPCHGQQEQSPPRFDFDIGRGAVVGEFSLEFF

SEQ ID NO: 6134 - DNA, 1005 bp, Zea mays subsp. mays
  misc_feature (1)..(1005): Ceres Seq. ID no. 12401368
  misc_feature: MA Experiment ID: 108523 Result: Down-regulated in Transcription
  misc_feature: MA Experiment 108523 PARAMETER Experiment Name: Zm_42deg_Heat_P Parameter: Age (day) Value: 8
  misc_feature: MA Experiment 108523 PARAMETER Experiment Name: Zm_42deg_Heat_P Parameter: Organism Value: Zea mays
  misc_feature: MA Experiment 108523 PARAMETER Experiment Name: Zm_42deg_Heat_P Parameter: Plant Line Value: 35A19
  misc_feature: MA Experiment 108523 PARAMETER Experiment Name: Zm_42deg_Heat_P Parameter: Temperature (deg C) Value: 42 vs. 22
  misc_feature: MA Experiment 108523 PARAMETER Experiment Name: Zm_42deg_Heat_P Parameter: Timepoint (hr) Value: 6
  misc_feature: MA Experiment 108523 PARAMETER Experiment Name: Zm_42deg_Heat_P Parameter: Tissue Value: Aerial
  misc_feature: MA Experiment ID: 108529 Result: Down-regulated in Transcription
  misc_feature: MA Experiment 108529 PARAMETER Experiment Name: Zm_Imbibed_Seeds_P Parameter: Age (day) Value: 5 vs. 2
  misc_feature: MA Experiment 108529 PARAMETER Experiment Name: Zm_Imbibed_Seeds_P Parameter: Organism Value: Zea mays
  misc_feature: MA Experiment 108529 PARAMETER Experiment Name: Zm_Imbibed_Seeds_P Parameter: Plant Line Value: 35A19
  misc_feature: MA Experiment 108529 PARAMETER Experiment Name: Zm_Imbibed_Seeds_P Parameter: Tissue Value: Roots vs. Embryo
  misc_feature: MA Experiment ID: 108543 Result: Up-regulated in Transcription
  misc_feature: MA Experiment ID: 108544 Result: Up-regulated in Transcription
  misc_feature: MA Experiment ID: 108545 Result: Up-regulated in Transcription
  misc_feature: MA Experiment 108545 PARAMETER Experiment Name: Zm_Imbibed_Seeds_P Parameter: Age (day) Value: 3 vs. 2
  misc_feature: MA Experiment 108545 PARAMETER Experiment Name: Zm_Imbibed_Seeds_P Parameter: Organism Value: Zea mays
  misc_feature: MA Experiment 108545 PARAMETER Experiment Name: Zm_Imbibed_Seeds_P Parameter: Plant Line Value: 35A19
  misc_feature: MA Experiment 108545 PARAMETER Experiment Name: Zm_Imbibed_Seeds_P Parameter: Tissue Value: Aerial vs. Embryo
  misc_feature: MA Experiment ID: 108546 Result: Down-regulated in Transcription
  misc_feature: MA Experiment 108546 PARAMETER Experiment Name: Zm_Imbibed_Seeds_P Parameter: Age (day) Value: 3 vs. 2
  misc_feature: MA Experiment 108546 PARAMETER Experiment Name: Zm_Imbibed_Seeds_P Parameter: Organism Value: Zea mays
  misc_feature: MA Experiment 108546 PARAMETER Experiment Name: Zm_Imbibed_Seeds_P Parameter: Plant Line Value: 35A19
  misc_feature: MA Experiment 108546 PARAMETER Experiment Name: Zm_Imbibed_Seeds_P Parameter: Tissue Value: Roots vs. Embryo
  misc_feature: MA Experiment ID: 20000478 Result: Down-regulated in Transcription
  misc_feature: MA Experiment 20000478 PARAMETER Experiment Name: Zm_5mM_SA_P Parameter: Age (day) Value: 11
  misc_feature: MA Experiment 20000478 PARAMETER Experiment Name: Zm_5mM_SA_P Parameter: Organism Value: Zea mays
  misc_feature: MA Experiment 20000478 PARAMETER Experiment Name: Zm_5mM_SA_P Parameter: Plant Line Value: 35A19
  misc_feature: MA Experiment 20000478 PARAMETER Experiment Name: Zm_5mM_SA_P Parameter: Timepoint (hr) Value: 72
  misc_feature: MA Experiment 20000478 PARAMETER Experiment Name: Zm_5mM_SA_P Parameter: Tissue Value: Aerial
  misc_feature: MA Experiment 20000478 PARAMETER Experiment Name: Zm_5mM_SA_P Parameter: Treatment Value: 5mM SA vs. No Treatment
  misc_feature: MA Experiment ID: 20000480 Result: Down-regulated in Transcription
  misc_feature: MA Experiment 20000480 PARAMETER Experiment Name: Zm_Drought_P Parameter: Age (day) Value: 11
  misc_feature: MA Experiment 20000480 PARAMETER Experiment Name: Zm_Drought_P Parameter: Organism Value: Zea mays
  misc_feature: MA Experiment 20000480 PARAMETER Experiment Name: Zm_Drought_P Parameter: Plant Line Value: 35A19
  misc_feature: MA Experiment 20000480 PARAMETER Experiment Name: Zm_Drought_P Parameter: Timepoint (hr) Value: 72
  misc_feature: MA Experiment 20000480 PARAMETER Experiment Name: Zm_Drought_P Parameter: Tissue Value: Aerial
  misc_feature: MA Experiment 20000480 PARAMETER Experiment Name: Zm_Drought_P Parameter: Treatment Value: Drought vs. No Drought
  misc_feature: MA Experiment ID: 20000535 Result: Down-regulated in Transcription
  misc_feature: MA Experiment 20000535 PARAMETER Experiment Name: Zm_Hybrid_Seed_Dev_P Parameter: DAP Value: 30 vs. 12
  misc_feature: MA Experiment 20000535 PARAMETER Experiment Name: Zm_Hybrid_Seed_Dev_P Parameter: Organism Value: Zea mays
  misc_feature: MA Experiment 20000535 PARAMETER Experiment Name: Zm_Hybrid_Seed_Dev_P Parameter: Plant Line Value: 35A19
  misc_feature: MA Experiment 20000535 PARAMETER Experiment Name: Zm_Hybrid_Seed_Dev_P Parameter: Tissue Value: Embryo vs. Unfert Floret
  misc_feature: MA Experiment ID: 20000626 Result: Down-regulated in Transcription
  misc_feature: MA Experiment 20000626 PARAMETER Experiment Name: Zm_Herbicide-Treatments_P Parameter: Timepoint (hr) Value: 12
  misc_feature: MA Experiment 20000626 PARAMETER Experiment Name: Zm_Herbicide-Treatments_P Parameter: Tissue Value: Aerial
  misc_feature: MA Experiment 20000626 PARAMETER Experiment Name: Zm_Herbicide-Treatments_P Parameter: Treatment Value: Roundup vs. No Treatment
  misc_feature: MA Experiment ID: 20000630 Result: Down-regulated in Transcription
  misc_feature: MA Experiment 20000630 PARAMETER Experiment Name: Zm_Herbicide-Treatments_P Parameter: Timepoint (hr) Value: 4
  misc_feature: MA Experiment 20000630 PARAMETER Experiment Name: Zm_Herbicide-Treatments_P Parameter: Tissue Value: Aerial
  misc_feature: MA Experiment 20000630 PARAMETER Experiment Name: Zm_Herbicide-Treatments_P Parameter: Treatment Value: Roundup vs. No Treatment
actcactcactcgcatcactgactgactggactgctgctcactccttccttcccctggcagagaatctgcagtgcttgccggccggccctgcagagcgcggggatctgcaggcatcatggtgcaatcaaagaagaagttccgcggcgtcaggcagcgccactggggctcctgggtctccgagatcaggcacccgctgcttaagaggagggtgtggctggctcaccttcgagacggcagaggaggcggcgcgggcgtacgacgaggccgccgtcctcatgagcggccgcaacgccaagaccaacttccccgtgccaaggagcggcaccggggagctgctggcccctgcagtgccggccgcacggggaggcgcgtggtggcggtggcggcggcaccagcctgtcgcagatcctcagcgccaagctccgcaggtgctgcaagacgccgtcgccgtcgctcacctgcctccgcctcgacccggagaagtcccacattggcgtctggcagaagcgcgccggcgcgcgcgccgactccagctgggtcatgaccgtcgagctcaacaaggacgcgccgccgccaccgtcctccggcgaggagccggcgcccagctacggcggcgcggccaccacgtccacgtccacgcccacgtcgtccactatcacggccggctcgcctccacctgagatgatggacgacgaggagagtgttgcgctgcagatgatcgaggagctgctgggatcacatgggatgatgctccaggtccagggtgcagcaggcagcctcgtcatctgaaggaaaccgcatggttcaacaagctattatgatatgatcaggacatcatcatcaggtcactgtcccagatcagaccaagcagttaagattgcatcatatatataatataggtacacctctattactacatcaagcttaggaaaaaaccatatagtaagatgaatcactactgtgtgaagctctgtaattatatatattaaaggcttttacttgtg

SEQ ID NO: 6135 - protein, 226 aa, Zea mays subsp. mays
  peptide (1)..(226): Ceres Seq. ID no. 12401369
  misc_feature (73)..(111): Homolog of NCBI NO: 15218134 NR Description: putative ethylene responsive element; protein id:
  misc_feature (73)..(110): Homolog of NCBI NO: 15238976 NR Description: putative protein; protein id: At5g11190.1 thaliana] >gi|8953381|emb|CAB96654.1| putative protein
  misc_feature (73)..(112): Homolog of NCBI NO: 15239413 NR Description: AP2 domain containing protein; protein id:
  misc_feature (73)..(112): Homolog of NCBI NO: 30689846 NR Description: AP2 domain transcription factor, putative thaliana] >gi|26452577|dbj|BAC43373.1| putative AP2 domain protein [Arabidopsis thaliana] >gi|28973113|gb|AAO63881.1|
  misc_feature (73)..(119): Homolog of NCBI NO: 18650662 NR Description: ethylene response factor 1 [Lycopersicon
  misc_feature (73)..(119): Homolog of NCBI NO: 15238727 NR Description: ethylene-responsive element - like protein; id: At5g25190.1, supported by cDNA: gi_15010715, supported by gi_16974344 [Arabidopsis thaliana] >gi|15010716|gb|AAK74017.1|
  misc_feature (75)..(119): Homolog of NCBI NO: 131754 NR Description: PPLZ02 PROTEIN >gi|99973|pir||S11881 hypothetical
  misc_feature (73)..(103): Homolog of NCBI NO: 2281637 NR Description: AP2 domain containing protein RAP2.6 [Arabidopsis
  misc_feature (73)..(111): Homolog of NCBI NO: 4699791 NR Description: Solution Structure Of The Gcc-Box Binding Domain,
  misc_feature (73)..(103): Homolog of NCBI NO: 15218275 NR Description: AP2 domain protein RAP2.6; protein id: supported by cDNA: gi_17065541 [Arabidopsis thaliana]
THSLASLTDWTAAHSFLPLAENLQCLPAGPAERGDLQASWCNQRRSSAASGSATGAPGSPRSGTRCLRGGCGWLTFETAEEAARAYDEAAVLMSGRNAKTNFPVPRSGTGELLAPAVPAARGGAWWRWRRHQPVADPQRQAPQVLQDAVAVAHLPPPRPGEVPHWRLAEARRRARRLQLGHDRRAQQGRAAATVLRRGAGAQLRRRGHHVHVHAHVVHYHGRLAST

SEQ ID NO: 6136 - protein, 142 aa, Zea mays subsp. mays
  peptide (1)..(142): Ceres Seq. ID no. 12401370
  misc_feature (1)..(34): Homolog of NCBI NO: 15218134 NR Description: putative ethylene responsive element; protein id:
  misc_feature (1)..(34): Homolog of NCBI NO: 15238976 NR Description: putative protein; protein id: At5g11190.1 thaliana] >gi|8953381|emb|CAB96654.1| putative protein
  misc_feature (1)..(34): Homolog of NCBI NO: 15239413 NR Description: AP2 domain containing protein; protein id:
  misc_feature (1)..(34): Homolog of NCBI NO: 30689846 NR Description: AP2 domain transcription factor, putative thaliana] >gi|26452577|dbj|BAC43373.1| putative AP2 domain protein [Arabidopsis thaliana] >gi|28973113|gb|AAO63881.1|
  misc_feature (1)..(34): Homolog of NCBI NO: 18650662 NR Description: ethylene response factor 1 [Lycopersicon
  misc_feature (1)..(34): Homolog of NCBI NO: 15238727 NR Description: ethylene-responsive element - like protein; id: At5g25190.1, supported by cDNA: gi_15010715, supported by gi_16974344 [Arabidopsis thaliana] >gi|15010716|gb|AAK74017.1|
  misc_feature (1)..(33): Homolog of NCBI NO: 131754 NR Description: PPLZ02 PROTEIN >gi|99973|pir||S11881 hypothetical
  misc_feature (1)..(34): Homolog of NCBI NO: 2281637 NR Description: AP2 domain containing protein RAP2.6 [Arabidopsis
  misc_feature (1)..(120): Homolog of NCBI NO: 21553845 NR Description: putative ethylene responsive element [Arabidopsis
  misc_feature (6)..(34): Homolog of NCBI NO: 4699791 NR Description: Solution Structure Of The Gcc-Box Binding Domain,
MVQSKKKFRGVRQRHWGSWVSEIRHPLLKRRVWLAHLRDGRGGGAGVRRGRRPHERPQRQDQLPRAKERHRGAAGPCSAGRTGRRVVAVAAAPACRRSSAPSSAGAARRRRRRSPASASTRRSPTLASGRSAPARAPTPAGS

SEQ ID NO: 6137 - protein, 134 aa, Zea mays subsp. mays
  peptide (1)..(134): Ceres Seq. ID no. 12401371
  misc_feature (1)..(19): Homolog of NCBI NO: 15218134 NR Description: putative ethylene responsive element; protein id:
  misc_feature (1)..(18): Homolog of NCBI NO: 15238976 NR Description: putative protein; protein id: At5g11190.1 thaliana] >gi|8953381|emb|CAB96654.1| putative protein
  misc_feature (1)..(20): Homolog of NCBI NO: 15239413 NR Description: AP2 domain containing protein; protein id:
  misc_feature (1)..(20): Homolog of NCBI NO: 30689846 NR Description: AP2 domain transcription factor, putative thaliana] >gi|26452577|dbj|BAC43373.1| putative AP2 domain protein [Arabidopsis thaliana] >gi|28973113|gb|AAO63881.1|
  misc_feature (1)..(27): Homolog of NCBI NO: 18650662 NR Description: ethylene response factor 1 [Lycopersicon
  misc_feature (1)..(27): Homolog of NCBI NO: 15238727 NR Description: ethylene-responsive element - like protein; id: At5g25190.1, supported by cDNA: gi_15010715, supported by gi_16974344 [Arabidopsis thaliana] >gi|15010716|gb|AAK74017.1|
  misc_feature (1)..(27): Homolog of NCBI NO: 131754 NR Description: PPLZ02 PROTEIN >gi|99973|pir||S11881 hypothetical
  misc_feature (1)..(11): Homolog of NCBI NO: 2281637 NR Description: AP2 domain containing protein RAP2.6 [Arabidopsis
  misc_feature (1)..(19): Homolog of NCBI NO: 4699791 NR Description: Solution Structure Of The Gcc-Box Binding Domain,
  misc_feature (1)..(11): Homolog of NCBI NO: 15218275 NR Description: AP2 domain protein RAP2.6; protein id: supported by cDNA: gi_17065541 [Arabidopsis thaliana]
MSGRNAKTNFPVPRSGTGELLAPAVPAARGGAWWRWRRHQPVADPQRQAPQVLQDAVAVAHLPPPRPGEVPHWRLAEARRRARRLQLGHDRRAQQGRAAATVLRRGAGAQLRRRGHHVHVHAHVVHYHGRLAST

SEQ ID NO: 6138 - DNA, 802 bp, Zea mays subsp. mays
  misc_feature (1)..(802): Ceres Seq. ID no. 12403537
  misc_feature: MA Experiment ID: 108528 Result: Up-regulated in Transcription
  misc_feature: MA Experiment 108528 PARAMETER Experiment Name: Zm_Imbibed_Seeds_P Parameter: Age (day) Value: 5 vs. 2
  misc_feature: MA Experiment 108528 PARAMETER Experiment Name: Zm_Imbibed_Seeds_P Parameter: Organism Value: Zea mays
  misc_feature: MA Experiment 108528 PARAMETER Experiment Name: Zm_Imbibed_Seeds_P Parameter: Plant Line Value: 35A19
  misc_feature: MA Experiment 108528 PARAMETER Experiment Name: Zm_Imbibed_Seeds_P Parameter: Tissue Value: Aerial vs. Embryo
  misc_feature: MA Experiment ID: 108530 Result: Up-regulated in Transcription
  misc_feature: MA Experiment 108530 PARAMETER Experiment Name: Zm_Imbibed_Seeds_P Parameter: Age (day) Value: 6 vs. 2
  misc_feature: MA Experiment 108530 PARAMETER Experiment Name: Zm_Imbibed_Seeds_P Parameter: Organism Value: Zea mays
  misc_feature: MA Experiment 108530 PARAMETER Experiment Name: Zm_Imbibed_Seeds_P Parameter: Plant Line Value: 35A19
  misc_feature: MA Experiment 108530 PARAMETER Experiment Name: Zm_Imbibed_Seeds_P Parameter: Tissue Value: Aerial vs. Embryo
  misc_feature: MA Experiment ID: 108535 Result: Down-regulated in Transcription
  misc_feature: MA Experiment 108535 PARAMETER Experiment Name: Zm_Meristem_P Parameter: Age (day) Value: 8
  misc_feature: MA Experiment 108535 PARAMETER Experiment Name: Zm_Meristem_P Parameter: Organism Value: Zea mays
  misc_feature: MA Experiment 108535 PARAMETER Experiment Name: Zm_Meristem_P Parameter: Plant Line Value: 35A19
  misc_feature: MA Experiment 108535 PARAMETER Experiment Name: Zm_Meristem_P Parameter: Tissue Value: Root Meristem vs. Above Root Meristem
  misc_feature: MA Experiment ID: 108544 Result: Up-regulated in Transcription
  misc_feature: MA Experiment ID: 108546 Result: Up-regulated in Transcription
  misc_feature: MA Experiment 108546 PARAMETER Experiment Name: Zm_Imbibed_Seeds_P Parameter: Age (day) Value: 3 vs. 2
  misc_feature: MA Experiment 108546 PARAMETER Experiment Name: Zm_Imbibed_Seeds_P Parameter: Organism Value: Zea mays
  misc_feature: MA Experiment 108546 PARAMETER Experiment Name: Zm_Imbibed_Seeds_P Parameter: Plant Line Value: 35A19
  misc_feature: MA Experiment 108546 PARAMETER Experiment Name: Zm_Imbibed_Seeds_P Parameter: Tissue Value: Roots vs. Embryo
  misc_feature: MA Experiment ID: 108559 Result: Down-regulated in Transcription
  misc_feature: MA Experiment 108559 PARAMETER Experiment Name: Zm_5mM_NO_P Parameter: Age (day) Value: 8
  misc_feature: MA Experiment 108559 PARAMETER Experiment Name: Zm_5mM_NO_P Parameter: Organism Value: Zea mays
  misc_feature: MA Experiment 108559 PARAMETER Experiment Name: Zm_5mM_NO_P Parameter: Plant Line Value: 35A19
  misc_feature: MA Experiment 108559 PARAMETER Experiment Name: Zm_5mM_NO_P Parameter: Timepoint (hr) Value: 12
  misc_feature: MA Experiment 108559 PARAMETER Experiment Name: Zm_5mM_NO_P Parameter: Tissue Value: Aerial
  misc_feature: MA Experiment 108559 PARAMETER Experiment Name: Zm_5mM_NO_P Parameter: Treatment Value: 5mM NO vs. No Treatment
  misc_feature: MA Experiment ID: 108687 Result: Down-regulated in Transcription
  misc_feature: MA Experiment 108687 PARAMETER Experiment Name: Zm_Embryos-Flowers__P Parameter: Tissue Value: Embryo vs. Aerial+
  misc_feature: MA Experiment ID: 20000492 Result: Down-regulated in Transcription
  misc_feature: MA Experiment 20000492 PARAMETER Experiment Name: Zm_Hybrid_Seed_Dev_P Parameter: DAP Value: 12
  misc_feature: MA Experiment 20000492 PARAMETER Experiment Name: Zm_Hybrid_Seed_Dev_P Parameter: Organism Value: Zea mays
  misc_feature: MA Experiment 20000492 PARAMETER Experiment Name: Zm_Hybrid_Seed_Dev_P Parameter: Plant Line Value: 35A19
  misc_feature: MA Experiment 20000492 PARAMETER Experiment Name: Zm_Hybrid_Seed_Dev_P Parameter: Tissue Value: Fert Kernel vs. Unfert Floret
  misc_feature: MA Experiment ID: 20000532 Result: Up-regulated in Transcription
  misc_feature: MA Experiment 20000532 PARAMETER Experiment Name: Zm_0.001percent_MeJA_P Parameter: Age (day) Value: 10
  misc_feature: MA Experiment 20000532 PARAMETER Experiment Name: Zm_0.001percent_MeJA_P Parameter: Organism Value: Zea mays
  misc_feature: MA Experiment 20000532 PARAMETER Experiment Name: Zm_0.001percent_MeJA_P Parameter: Plant Line Value: 35A19
  misc_feature: MA Experiment 20000532 PARAMETER Experiment Name: Zm_0.001percent_MeJA_P Parameter: Timepoint (hr) Value: 48
  misc_feature: MA Experiment 20000532 PARAMETER Experiment Name: Zm_0.001percent_MeJA_P Parameter: Tissue Value: Aerial
  misc_feature: MA Experiment 20000532 PARAMETER Experiment Name: Zm_0.001percent_MeJA_P Parameter: Treatment Value: 0.001percent MeJA vs. No Treatment
  misc_feature: MA Experiment ID: 20000535 Result: Down-regulated in Transcription
  misc_feature: MA Experiment 20000535 PARAMETER Experiment Name: Zm_Hybrid_Seed_Dev_P Parameter: DAP Value: 30 vs. 12
  misc_feature: MA Experiment 20000535 PARAMETER Experiment Name: Zm_Hybrid_Seed_Dev_P Parameter: Organism Value: Zea mays
  misc_feature: MA Experiment 20000535 PARAMETER Experiment Name: Zm_Hybrid_Seed_Dev_P Parameter: Plant Line Value: 35A19
  misc_feature: MA Experiment 20000535 PARAMETER Experiment Name: Zm_Hybrid_Seed_Dev_P Parameter: Tissue Value: Embryo vs. Unfert Floret
atacctgaaacttcactgcctttttgtcaggcacgctggtcaggaaatcagtagcctgttttggctgctgttgctaatcagttgggagagggggagatggccaggaggaacatcggagtcgcagtggacttctcgtcgtgcagcaaagcggctttgcggtgggcgtcgacgaaccttgcgaggaacggcgacaggctcatactcatccacgtgaacagctcctgccagaacgagcggggcgccgttcatctctgggagcagagcggttccccattgatccctctggccgagttttcagacgtcgccaggacatacggtgtgtcaccggacaaggagacgatcgagatcctcactcaagcggcaaatcatagagggatcgaagtctttgcaaaggtgttctacggcgacccggcaaagaagctgtacgaagcagccgacatggtcccgcttagctgcatggtggtcgggagcagaggactaagcacgctcaagagggctctgatggggagcgtgagcacgtatgttgtgaaccacgcggcctgccccgtgacggttgtgaaggagatggtgtagcgtgttgaacaccgctggttacaagcttcaccctagccagattgaataagcgtgcttgataagcactgatcaggggggatcttgctacttatacgacattttgtgcttgaaatttgggtaactaggaccgggcagaacatatctatgtcttgggctcatggcactgacatctgaacatatgccctaagtctgttgtaatcgcaaaatatttttgcttataaaatcagtt

SEQ ID NO: 6139 - protein, 158 aa, Zea mays subsp. mays
  peptide (1)..(158): Ceres Seq. ID no. 12403538
  misc_feature (4)..(155): Pfam Name: Universal stress protein family Pfam Description: Universal stress protein family
  misc_feature (1)..(158): Homolog of NCBI NO: 15528707 NR Description: P0583G08.8 [Oryza sativa (japonica
  misc_feature (1)..(155): Homolog of NCBI NO: 18401345 NR Description: expressed protein; protein id: At3g17020.1, by cDNA: gi_14190420, supported by cDNA: gi_15215898 [Arabidopsis >gi|7670026|dbj|BAA94980.1|
  misc_feature (4)..(155): Homolog of NCBI NO: 30678807 NR Description: expressed protein [Arabidopsis thaliana]
  misc_feature (4)..(156): Homolog of NCBI NO: 11602747 NR Description: early nodulin ENOD18 [Vicia faba]
  misc_feature (4)..(156): Homolog of NCBI NO: 11602751 NR Description: ENOD18 protein [Vicia faba]
  misc_feature (4)..(156): Homolog of NCBI NO: 11602749 NR Description: early nodulin ENOD18 [Vicia faba]
  misc_feature (4)..(156): Homolog of NCBI NO: 30693971 NR Description: expressed protein [Arabidopsis thaliana]
  misc_feature (4)..(155): Homolog of NCBI NO: 20160561 NR Description: P0414E03.3 [Oryza sativa (japonica
  misc_feature (4)..(133): Homolog of NCBI NO: 18396497 NR Description: expressed protein; protein id: At3g03270.1, by cDNA: 118261. [Arabidopsis thaliana] unknown [Arabidopsis thaliana] >gi|27754280|gb|AAO22593.1|
  misc_feature (1)..(155): Homolog of NCBI NO: 18408994 NR Description: expressed protein; protein id: At1g68300.1, by cDNA: 27109. [Arabidopsis thaliana] >gi|25404724|pir||F96706
MARRNIGVAVDFSSCSKAALRWASTNLARNGDRLILIHVNSSCQNERGAVHLWEQSGSPLIPLAEFSDVARTYGVSPDKETIEILTQAANHRGIEVFAKVFYGDPAKKLYEAADMVPLSCMVVGSRGLSTLKRALMGSVSTYVVNHAACPVTVVKEMV

SEQ ID NO: 6140 - DNA, 832 bp, Zea mays subsp. mays; identical to SEQ ID NO: 4008
  misc_feature (1)..(832): Ceres Seq. ID no. 12366950
  misc_feature: MA Experiment ID: 108528 Result: Down-regulated in Transcription
  misc_feature: MA Experiment 108528 PARAMETER Experiment Name: Zm_Imbibed_Seeds_P Parameter: Age (day) Value: 5 vs. 2
  misc_feature: MA Experiment 108528 PARAMETER Experiment Name: Zm_Imbibed_Seeds_P Parameter: Organism Value: Zea mays
  misc_feature: MA Experiment 108528 PARAMETER Experiment Name: Zm_Imbibed_Seeds_P Parameter: Plant Line Value: 35A19
  misc_feature: MA Experiment 108528 PARAMETER Experiment Name: Zm_Imbibed_Seeds_P Parameter: Tissue Value: Aerial vs. Embryo
  misc_feature: MA Experiment ID: 108530 Result: Down-regulated in Transcription
  misc_feature: MA Experiment 108530 PARAMETER Experiment Name: Zm_Imbibed_Seeds_P Parameter: Age (day) Value: 6 vs. 2
  misc_feature: MA Experiment 108530 PARAMETER Experiment Name: Zm_Imbibed_Seeds_P Parameter: Organism Value: Zea mays
  misc_feature: MA Experiment 108530 PARAMETER Experiment Name: Zm_Imbibed_Seeds_P Parameter: Plant Line Value: 35A19
  misc_feature: MA Experiment 108530 PARAMETER Experiment Name: Zm_Imbibed_Seeds_P Parameter: Tissue Value: Aerial vs. Embryo
  misc_feature: MA Experiment ID: 108535 Result: Up-regulated in Transcription
  misc_feature: MA Experiment 108535 PARAMETER Experiment Name: Zm_Meristem_P Parameter: Age (day) Value: 8
  misc_feature: MA Experiment 108535 PARAMETER Experiment Name: Zm_Meristem_P Parameter: Organism Value: Zea mays
  misc_feature: MA Experiment 108535 PARAMETER Experiment Name: Zm_Meristem_P Parameter: Plant Line Value: 35A19
  misc_feature: MA Experiment 108535 PARAMETER Experiment Name: Zm_Meristem_P Parameter: Tissue Value: Root Meristem vs. Above Root Meristem
  misc_feature: MA Experiment ID: 20000488 Result: Up-regulated in Transcription
  misc_feature: MA Experiment 20000488 PARAMETER Experiment Name: Zm_50mM_NH4NO3_L_to_H_P Parameter: Organism Value: Zea mays
  misc_feature: MA Experiment 20000488 PARAMETER Experiment Name: Zm_50mM_NH4NO3_L_to_H_P Parameter: Timepoint (hr) Value: 8
  misc_feature: MA Experiment 20000488 PARAMETER Experiment Name: Zm_50mM_NH4NO3_L_to_H_P Parameter: Tissue Value: Leaves
  misc_feature: MA Experiment 20000488 PARAMETER Experiment Name: Zm_50mM_NH4NO3_L_to_H_P Parameter: Treatment Value: 50mM NH4NO3 vs. 100mM Mannitol
  misc_feature: MA Experiment ID: 20001606 Result: Up-regulated in Transcription
  misc_feature: MA Experiment 20001606 PARAMETER Experiment Name: Zm_50ppm_KNO3_L-to-H_P Parameter: Age (day) Value: 19
  misc_feature: MA Experiment 20001606 PARAMETER Experiment Name: Zm_50ppm_KNO3_L-to-H_P Parameter: Organism Value: Zea mays
  misc_feature: MA Experiment 20001606 PARAMETER Experiment Name: Zm_50ppm_KNO3_L-to-H_P Parameter: Plant Line Value: 35A19
  misc_feature: MA Experiment 20001606 PARAMETER Experiment Name: Zm_50ppm_KNO3_L-to-H_P Parameter: Timepoint (hr) Value: 8
  misc_feature: MA Experiment 20001606 PARAMETER Experiment Name: Zm_50ppm_KNO3_L-to-H_P Parameter: Tissue Value: Shoots
  misc_feature: MA Experiment 20001606 PARAMETER Experiment Name: Zm_50ppm_KNO3_L-to-H_P Parameter: Treatment Value: 50ppm KNO3 vs. 50ppm KCl
  misc_feature: MA Experiment ID: 20001612 Result: Up-regulated in Transcription
  misc_feature: MA Experiment 20001612 PARAMETER Experiment Name: Zm_50ppm_KNO3_L-to-H_P Parameter: Age (day) Value: 19
  misc_feature: MA Experiment 20001612 PARAMETER Experiment Name: Zm_50ppm_KNO3_L-to-H_P Parameter: Organism Value: Zea mays
  misc_feature: MA Experiment 20001612 PARAMETER Experiment Name: Zm_50ppm_KNO3_L-to-H_P Parameter: Plant Line Value: 35A19
  misc_feature: MA Experiment 20001612 PARAMETER Experiment Name: Zm_50ppm_KNO3_L-to-H_P Parameter: Timepoint (hr) Value: 8
  misc_feature: MA Experiment 20001612 PARAMETER Experiment Name: Zm_50ppm_KNO3_L-to-H_P Parameter: Tissue Value: Roots
  misc_feature: MA Experiment 20001612 PARAMETER Experiment Name: Zm_50ppm_KNO3_L-to-H_P Parameter: Treatment Value: 50ppm KNO3 vs. 50ppm KCl

SEQ ID NO: 6141 - protein, 161 aa, Zea mays subsp. mays; identical to SEQ ID NO: 1700
  peptide (1)..(161): Ceres Seq. ID no. 12366951
  misc_feature (3)..(73): Pfam Name: Ribosomal protein L24e Pfam Description: Ribosomal protein L24e
  misc_feature (3)..(73): Pfam Name: Ribosomal protein L24e Pfam Description: Ribosomal protein L24e
  misc_feature (1)..(161): Homolog of NCBI NO: 1710521 NR Description: 60S RIBOSOMAL PROTEIN L24 >gi|7440778|pir||T06178
  misc_feature (4)..(161): Homolog of NCBI NO: 34900364 NR Description: putative 60S ribosomal protein L24 [Oryza sativa
  misc_feature (1)..(160): Homolog of NCBI NO: 6094040 NR Description: 60S ribosomal protein L24
  misc_feature (1)..(156): Homolog of NCBI NO: 10180025 NR Description: 60S ribosomal protein L24 [Prunus avium]
  misc_feature (1)..(161): Homolog of NCBI NO: 18404176 NR Description: 60S ribosomal protein L24; protein id: supported by cDNA: 14564., supported by cDNA: gi_16604375, by cDNA: gi_18252830 [Arabidopsis thaliana]
  misc_feature (4)..(161): Homolog of NCBI NO: 34900364 NR Description: putative 60S ribosomal protein L24 [Oryza sativa
  misc_feature (1)..(156): Homolog of NCBI NO: 10180025 NR Description: 60S ribosomal protein L24 [Prunus avium]
  misc_feature (10)..(154): Homolog of NCBI NO: 40741063 NR Description: conserved hypothetical protein [Aspergillus
  misc_feature (3)..(150): Homolog of NCBI NO: 19115030 NR Description: 60S ribosomal protein L24 [Schizosaccharomyces
  misc_feature (3)..(150): Homolog of NCBI NO: 19075214 NR Description: 60s ribosomal protein L24 [Schizosaccharomyces
  misc_feature (5)..(161): Homolog of NCBI NO: 25295112 NR Description: 60S ribosomal protein L24 [imported] -
  misc_feature (1)..(161): Homolog of NCBI NO: 15231730 NR Description: 60S ribosomal protein - like; protein id: supported by cDNA: gi_16648705, supported by cDNA: gi_20260561 thaliana] >gi|26454659|sp|P38666|RL24_ARATH 60S ribosomal protein
  misc_feature (1)..(161): Homolog of NCBI NO: 18404176 NR Description: 60S ribosomal protein L24; protein id: supported by cDNA: 14564., supported by cDNA: gi_16604375, by cDNA: gi_18252830 [Arabidopsis thaliana]
  misc_feature (1)..(160): Homolog of NCBI NO: 6094040 NR Description: 60S ribosomal protein L24
  misc_feature (1)..(161): Homolog of NCBI NO: 1710521 NR Description: 60S RIBOSOMAL PROTEIN L24 >gi|7440778|pir||T06178
  misc_feature (1)..(161): Homolog of NCBI NO: 15231730 NR Description: 60S ribosomal protein - like; protein id: supported by cDNA: gi_16648705, supported by cDNA: gi_20260561 thaliana] >gi|26454659|sp|P38666|RL24_ARATH 60S ribosomal protein
  misc_feature (5)..(161): Homolog of NCBI NO: 25295112 NR Description: 60S ribosomal protein L24 [imported] -
  misc_feature (3)..(150): Homolog of NCBI NO: 19075214 NR Description: 60s ribosomal protein L24 [Schizosaccharomyces
  misc_feature (3)..(150): Homolog of NCBI NO: 19115030 NR Description: 60S ribosomal protein L24 [Schizosaccharomyces
  misc_feature (10)..(154): Homolog of NCBI NO: 40741063 NR Description: conserved hypothetical protein [Aspergillus

SEQ ID NO: 6142 - protein, 106 aa, Zea mays subsp. mays; identical to SEQ ID NO: 1701
  peptide (1)..(106): Ceres Seq. ID no. 12366952
  misc_feature (1)..(106): Homolog of NCBI NO: 1710521 NR Description: 60S RIBOSOMAL PROTEIN L24 >gi|7440778|pir||T06178
  misc_feature (1)..(106): Homolog of NCBI NO: 34900364 NR Description: putative 60S ribosomal protein L24 [Oryza sativa
  misc_feature (1)..(105): Homolog of NCBI NO: 6094040 NR Description: 60S ribosomal protein L24
  misc_feature (1)..(101): Homolog of NCBI NO: 10180025 NR Description: 60S ribosomal protein L24 [Prunus avium]
  misc_feature (1)..(106): Homolog of NCBI NO: 18404176 NR Description: 60S ribosomal protein L24; protein id: supported by cDNA: 14564., supported by cDNA: gi_16604375, by cDNA: gi_18252830 [Arabidopsis thaliana]
  misc_feature (1)..(106): Homolog of NCBI NO: 15231730 NR Description: 60S ribosomal protein - like; protein id: supported by cDNA: gi_16648705, supported by cDNA: gi_20260561 thaliana] >gi|26454659|sp|P38666|RL24_ARATH 60S ribosomal protein
  misc_feature (1)..(106): Homolog of NCBI NO: 25295112 NR Description: 60S ribosomal protein L24 [imported] -
  misc_feature (1)..(95): Homolog of NCBI NO: 19075214 NR Description: 60s ribosomal protein L24 [Schizosaccharomyces
  misc_feature (1)..(95): Homolog of NCBI NO: 19115030 NR Description: 60S ribosomal protein L24 [Schizosaccharomyces
  misc_feature (1)..(99): Homolog of NCBI NO: 40741063 NR Description: conserved hypothetical protein [Aspergillus
  misc_feature (1)..(106): Homolog of NCBI NO: 1710521 NR Description: 60S RIBOSOMAL PROTEIN L24 >gi|7440778|pir||T06178
  misc_feature (1)..(106): Homolog of NCBI NO: 34900364 NR Description: putative 60S ribosomal protein L24 [Oryza sativa
  misc_feature (1)..(105): Homolog of NCBI NO: 6094040 NR Description: 60S ribosomal protein L24
  misc_feature (1)..(101): Homolog of NCBI NO: 10180025 NR Description: 60S ribosomal protein L24 [Prunus avium]
  misc_feature (1)..(106): Homolog of NCBI NO: 18404176 NR Description: 60S ribosomal protein L24; protein id: supported by cDNA: 14564., supported by cDNA: gi_16604375, by cDNA: gi_18252830 [Arabidopsis thaliana]
  misc_feature (1)..(106): Homolog of NCBI NO: 15231730 NR Description: 60S ribosomal protein - like; protein id: supported by cDNA: gi_16648705, supported by cDNA: gi_20260561 thaliana] >gi|26454659|sp|P38666|RL24_ARATH 60S ribosomal protein
  misc_feature (1)..(106): Homolog of NCBI NO: 25295112 NR Description: 60S ribosomal protein L24 [imported] -
  misc_feature (1)..(95): Homolog of NCBI NO: 19075214 NR Description: 60s ribosomal protein L24 [Schizosaccharomyces
  misc_feature (1)..(95): Homolog of NCBI NO: 19115030 NR Description: 60S ribosomal protein L24 [Schizosaccharomyces
  misc_feature (1)..(99): Homolog of NCBI NO: 40741063 NR Description: conserved hypothetical protein [Aspergillus

SEQ ID NO: 6143 - DNA, 1256 bp, Zea mays subsp. mays
  misc_feature (1)..(1256): Ceres Seq. ID no. 12405546
  misc_feature: MA Experiment ID: 108536 Result: Down-regulated in Transcription
  misc_feature: MA Experiment 108536 PARAMETER Experiment Name: Zm_Meristem_P Parameter: Age (day) Value: 8
  misc_feature: MA Experiment 108536 PARAMETER Experiment Name: Zm_Meristem_P Parameter: Organism Value: Zea mays
  misc_feature: MA Experiment 108536 PARAMETER Experiment Name: Zm_Meristem_P Parameter: Plant Line Value: 35A19
  misc_feature: MA Experiment 108536 PARAMETER Experiment Name: Zm_Meristem_P Parameter: Tissue Value: Shoot Meristem vs. Above Shoot Meristem
  misc_feature: MA Experiment ID: 108543 Result: Up-regulated in Transcription
  misc_feature: MA Experiment ID: 20000480 Result: Down-regulated in Transcription
  misc_feature: MA Experiment 20000480 PARAMETER Experiment Name: Zm_Drought_P Parameter: Age (day) Value: 11
  misc_feature: MA Experiment 20000480 PARAMETER Experiment Name: Zm_Drought_P Parameter: Organism Value: Zea mays
  misc_feature: MA Experiment 20000480 PARAMETER Experiment Name: Zm_Drought_P Parameter: Plant Line Value: 35A19
  misc_feature: MA Experiment 20000480 PARAMETER Experiment Name: Zm_Drought_P Parameter: Timepoint (hr) Value: 72
  misc_feature: MA Experiment 20000480 PARAMETER Experiment Name: Zm_Drought_P Parameter: Tissue Value: Aerial
  misc_feature: MA Experiment 20000480 PARAMETER Experiment Name: Zm_Drought_P Parameter: Treatment Value: Drought vs. No Drought
  misc_feature: MA Experiment ID: 20000535 Result: Down-regulated in Transcription
  misc_feature: MA Experiment 20000535 PARAMETER Experiment Name: Zm_Hybrid_Seed_Dev_P Parameter: DAP Value: 30 vs. 12
  misc_feature: MA Experiment 20000535 PARAMETER Experiment Name: Zm_Hybrid_Seed_Dev_P Parameter: Organism Value: Zea mays
  misc_feature: MA Experiment 20000535 PARAMETER Experiment Name: Zm_Hybrid_Seed_Dev_P Parameter: Plant Line Value: 35A19
  misc_feature: MA Experiment 20000535 PARAMETER Experiment Name: Zm_Hybrid_Seed_Dev_P Parameter: Tissue Value: Embryo vs. Unfert Floret
  misc_feature: MA Experiment ID: 20000626 Result: Down-regulated in Transcription
  misc_feature: MA Experiment 20000626 PARAMETER Experiment Name: Zm_Herbicide-Treatments_P Parameter: Timepoint (hr) Value: 12
  misc_feature: MA Experiment 20000626 PARAMETER Experiment Name: Zm_Herbicide-Treatments_P Parameter: Tissue Value: Aerial
  misc_feature: MA Experiment 20000626 PARAMETER Experiment Name: Zm_Herbicide-Treatments_P Parameter: Treatment Value: Roundup vs. No Treatment
aatcttcttcttcctccttcagtcacccggcctgtcgtgtcgatctcactctcagggtccggtccggtccggtgcatcatatatacccttggtcgatcgatcgaccagatagatacactagatagctaggattgcattgtgttccaccaaaagccagccacaacacatcgacatgatgcaggacttgttctcggtcccttcgtgtttctcggcgggcgagaagcttccggacgtcccggcgtccgctgcggccaccaccaggtccgggcagagcgcggcgacgctggtctaccgcgcgggaatcgccggccacgaccgcctggtgacggtgacgtggtgcaggaacctgctcacccacgggctgaccgtgtcgatcgaagggtcggcgggcggcggcaaggacaagagcggcggcggcagggagtggggcgacgccgacggtggcgcggcctcgtcctccaacaagggctgcagcaccgcctgcaaggtggagatgcagccgtggcacttttggcgcaagtacggcgccaagcagttccacgtcgacggcagggccgtggacgtggtctgggacctcaggagcgcgaggtactccgacgagcccgagccgctgtccgactactacgtcgccgtggtgtcggacgaggaggtggtcctcctcctcggcaacctcaagaaggaggcgttccggcgcaccgggtcccggccgtcgctgcgggacgccgcactggtgtgcaagaaggagcacgtctttagcaagaagcggttcctcaccaaggccaggttccacgacaggggcaagctgcacgacatcagcatcgagtgcagcagcagcaacctcggcggcggcggcgtcgacgtcgacatggtcatcaagatcgacggctacgtcaacgtcctcgtcaggcacctgcagtggaagttcaggggcaacgagtgcatctccatcaaccagctcaaggtgcaggtgtactgggacgcgcacgactggatctttggcacgggggtgaggaacgcgctgttcatcttcaagcccgagccgctgccgtccgccaccaatgagtactctgatttctgcctgtttctgtacgcatggaagcttgagtgagctaggattcctgttcctgcattatactggacacctcaccatatatgttatgaaccaataattcatacgtatcatgtaactgatggattattgggcgatggaagtgtatgcgaaatgaatgattggggccgttttccctttcccttcc

SEQ ID NO: 6144 - protein, 311 aa, Zea mays subsp. mays
  peptide (1)..(311): Ceres Seq. ID no. 12405547
  misc_feature (33)..(310): Pfam Name: Plant protein of unknown function (DUF868) Pfam Description: Plant protein of unknown function (DUF868)
  misc_feature (2)..(311): Homolog of NCBI NO: 20804936 NR Description: P0456E05.14 [Oryza sativa (japonica
  misc_feature (104)..(311): Homolog of NCBI NO: 15235452 NR Description: putative protein; protein id: At4g12690.1, by cDNA: 12923. [Arabidopsis thaliana] >gi|7459232|pir||T06627
  misc_feature (7)..(73): Homolog of NCBI NO: 15235452 NR Description: putative protein; protein id: At4g12690.1, by cDNA: 12923. [Arabidopsis thaliana] >gi|7459232|pir||T06627
  misc_feature (104)..(288): Homolog of NCBI NO: 15228105 NR Description: hypothetical protein; protein id: At2g04220.1 thaliana] >gi|20198211|gb|AAD27916.2| hypothetical protein thaliana] >gi|20198251|gb|AAM15482.1| hypothetical protein
  misc_feature (16)..(73): Homolog of NCBI NO: 15228105 NR Description: hypothetical protein; protein id: At2g04220.1 thaliana] >gi|20198211|gb|AAD27916.2| hypothetical protein thaliana] >gi|20198251|gb|AAM15482.1| hypothetical protein
  misc_feature (94)..(300): Homolog of NCBI NO: 15238927 NR Description: putative protein; protein id: At5g48270.1 thaliana] >gi|8777417|dbj|BAA97007.1|
  misc_feature (2)..(68): Homolog of NCBI NO: 15238927 NR Description: putative protein; protein id: At5g48270.1 thaliana] >gi|8777417|dbj|BAA97007.1|
  misc_feature (99)..(311): Homolog of NCBI NO: 14719318 NR Description: hypothetical protein [Oryza sativa]
  misc_feature (91)..(311): Homolog of NCBI NO: 18397034 NR Description: expressed protein; protein id: At3g04860.1, by cDNA: 5170., supported by cDNA: gi_16612260 [Arabidopsis
  misc_feature (9)..(71): Homolog of NCBI NO: 18397034 NR Description: expressed protein; protein id: At3g04860.1, by cDNA: 5170., supported by cDNA: gi_16612260 [Arabidopsis
MMQDLFSVPSCFSAGEKLPDVPASAAATTRSGQSAATLVYRAGIAGHDRLVTVTWCRNLLTHGLTVSIEGSAGGGKDKSGGGREWGDADGGAASSSNKGCSTACKVEMQPWHFWRKYGAKQFHVDGRAVDVVWDLRSARYSDEPEPLSDYYVAVVSDEEVVLLLGNLKKEAFRRTGSRPSLRDAALVCKKEHVFSKKRFLTKARFHDRGKLHDISIECSSSNLGGGGVDVDMVIKIDGYVNVLVRHLQWKFRGNECISINQLKVQVYWDAHDWIFGTGVRNALFIFKPEPLPSATNEYSDFCLFLYAWKLE

SEQ ID NO: 6145 - protein, 310 aa, Zea mays subsp. mays
  peptide (1)..(310): Ceres Seq. ID no. 12405548
  misc_feature (32)..(309): Pfam Name: Plant protein of unknown function (DUF868) Pfam Description: Plant protein of unknown function (DUF868)
  misc_feature (1)..(310): Homolog of NCBI NO: 20804936 NR Description: P0456E05.14 [Oryza sativa (japonica
  misc_feature (103)..(310): Homolog of NCBI NO: 15235452 NR Description: putative protein; protein id: At4g12690.1, by cDNA: 12923. [Arabidopsis thaliana] >gi|7459232|pir||T06627
  misc_feature (6)..(72): Homolog of NCBI NO: 15235452 NR Description: putative protein; protein id: At4g12690.1, by cDNA: 12923. [Arabidopsis thaliana] >gi|7459232|pir||T06627
  misc_feature (103)..(287): Homolog of NCBI NO: 15228105 NR Description: hypothetical protein; protein id: At2g04220.1 thaliana] >gi|20198211|gb|AAD27916.2| hypothetical protein thaliana] >gi|20198251|gb|AAM15482.1| hypothetical protein
  misc_feature (15)..(72): Homolog of NCBI NO: 15228105 NR Description: hypothetical protein; protein id: At2g04220.1 thaliana] >gi|20198211|gb|AAD27916.2| hypothetical protein thaliana] >gi|20198251|gb|AAM15482.1| hypothetical protein
  misc_feature (93)..(299): Homolog of NCBI NO: 15238927 NR Description: putative protein; protein id: At5g48270.1 thaliana] >gi|8777417|dbj|BAA97007.1|
  misc_feature (1)..(67): Homolog of NCBI NO: 15238927 NR Description: putative protein; protein id: At5g48270.1 thaliana] >gi|8777417|dbj|BAA97007.1|
  misc_feature (98)..(310): Homolog of NCBI NO: 14719318 NR Description: hypothetical protein [Oryza sativa]
  misc_feature (90)..(310): Homolog of NCBI NO: 18397034 NR Description: expressed protein; protein id: At3g04860.1, by cDNA: 5170., supported by cDNA: gi_16612260 [Arabidopsis
  misc_feature (8)..(70): Homolog of NCBI NO: 18397034 NR Description: expressed protein; protein id: At3g04860.1, by cDNA: 5170., supported by cDNA: gi_16612260 [Arabidopsis
MQDLFSVPSCFSAGEKLPDVPASAAATTRSGQSAATLVYRAGIAGHDRLVTVTWCRNLLTHGLTVSIEGSAGGGKDKSGGGREWGDADGGAASSSNKGCSTACKVEMQPWHFWRKYGAKQFHVDGRAVDVVWDLRSARYSDEPEPLSDYYVAVVSDEEVVLLLGNLKKEAFRRTGSRPSLRDAALVCKKEHVFSKKRFLTKARFHDRGKLHDISIECSSSNLGGGGVDVDMVIKIDGYVNVLVRHLQWKFRGNECISINQLKVQVYWDAHDWIFGTGVRNALFIFKPEPLPSATNEYSDFCLFLYAWKLE

SEQ ID NO: 6146 - protein, 204 aa, Zea mays subsp. mays
  peptide (1)..(204): Ceres Seq. ID no. 12405549
  misc_feature (1)..(203): Pfam Name: Plant protein of unknown function (DUF868) Pfam Description: Plant protein of unknown function (DUF868)
  misc_feature (1)..(181): Homolog of NCBI NO: 15228105 NR Description: hypothetical protein; protein id: At2g04220.1 thaliana] >gi|20198211|gb|AAD27916.2| hypothetical protein thaliana] >gi|20198251|gb|AAM15482.1| hypothetical protein
  misc_feature (1)..(193): Homolog of NCBI NO: 15238927 NR Description: putative protein; protein id: At5g48270.1 thaliana] >gi|8777417|dbj|BAA97007.1|
  misc_feature (1)..(204): Homolog of NCBI NO: 14719318 NR Description: hypothetical protein [Oryza sativa]
  misc_feature (1)..(204): Homolog of NCBI NO: 18397034 NR Description: expressed protein; protein id: At3g04860.1, by cDNA: 5170., supported by cDNA: gi_16612260 [Arabidopsis
  misc_feature (1)..(204): Homolog of NCBI NO: 20804936 NR Description: P0456E05.14 [Oryza sativa (japonica
  misc_feature (1)..(204): Homolog of NCBI NO: 15235452 NR Description: putative protein; protein id: At4g12690.1, by cDNA: 12923. [Arabidopsis thaliana] >gi|7459232|pir||T06627
  misc_feature (1)..(204): Homolog of NCBI NO: 21593854 NR Description: unknown [Arabidopsis thaliana]
  misc_feature (1)..(204): Homolog of NCBI NO: 15241702 NR Description: putative protein; protein id: At5g28150.1, by cDNA: gi_19699076 [Arabidopsis thaliana] AT5g28150/T24G3_80 [Arabidopsis thaliana]
  misc_feature (1)..(181): Homolog of NCBI NO: 25334990 NR Description: hypothetical protein At2g04220 [imported] -
  misc_feature (1)..(204): Homolog of NCBI NO: 30102999 NR Description: hypothetical protein [Oryza sativa (japonica
MQPWHFWRKYGAKQFHVDGRAVDVVWDLRSARYSDEPEPLSDYYVAVVSDEEVVLLLGNLKKEAFRRTGSRPSLRDAALVCKKEHVFSKKRFLTKARFHDRGKLHDISIECSSSNLGGGGVDVDMVIKIDGYVNVLVRHLQWKFRGNECISINQLKVQVYWDAHDWIFGTGVRNALFIFKPEPLPSATNEYSDFCLFLYAWKLE

SEQ ID NO: 6147 - DNA, 1386 bp, Zea mays subsp. mays
  misc_feature (1)..(1386): Ceres Seq. ID no. 12373219
  misc_feature: MA Experiment ID: 108504 Result: Up-regulated in Transcription
  misc_feature: MA Experiment 108504 PARAMETER Experiment Name: Zm_Drought_P Parameter: Age (day) Value: 8
  misc_feature: MA Experiment 108504 PARAMETER Experiment Name: Zm_Drought_P Parameter: Organism Value: Zea mays
  misc_feature: MA Experiment 108504 PARAMETER Experiment Name: Zm_Drought_P Parameter: Plant Line Value: 35A19
  misc_feature: MA Experiment 108504 PARAMETER Experiment Name: Zm_Drought_P Parameter: Timepoint (hr) Value: 12
  misc_feature: MA Experiment 108504 PARAMETER Experiment Name: Zm_Drought_P Parameter: Tissue Value: Aerial
  misc_feature: MA Experiment 108504 PARAMETER Experiment Name: Zm_Drought_P Parameter: Treatment Value: Drought vs. No Drought
  misc_feature: MA Experiment ID: 108515 Result: Up-regulated in Transcription
  misc_feature: MA Experiment 108515 PARAMETER Experiment Name: Zm_2mM_SA_P Parameter: Age (day) Value: 8
  misc_feature: MA Experiment 108515 PARAMETER Experiment Name: Zm_2mM_SA_P Parameter: Organism Value: Zea mays
  misc_feature: MA Experiment 108515 PARAMETER Experiment Name: Zm_2mM_SA_P Parameter: Plant Line Value: 35A19
  misc_feature: MA Experiment 108515 PARAMETER Experiment Name: Zm_2mM_SA_P Parameter: Timepoint (hr) Value: 12
  misc_feature: MA Experiment 108515 PARAMETER Experiment Name: Zm_2mM_SA_P Parameter: Tissue Value: Aerial
  misc_feature: MA Experiment 108515 PARAMETER Experiment Name: Zm_2mM_SA_P Parameter: Treatment Value: 2mM SA vs. No Treatment
  misc_feature: MA Experiment ID: 108527 Result: Up-regulated in Transcription
  misc_feature: MA Experiment 108527 PARAMETER Experiment Name: Zm_5mM_NO_P Parameter: Age (day) Value: 8
  misc_feature: MA Experiment 108527 PARAMETER Experiment Name: Zm_5mM_NO_P Parameter: Organism Value: Zea mays
  misc_feature: MA Experiment 108527 PARAMETER Experiment Name: Zm_5mM_NO_P Parameter: Plant Line Value: 35A19
  misc_feature: MA Experiment 108527 PARAMETER Experiment Name: Zm_5mM_NO_P Parameter: Timepoint (hr) Value: 6
  misc_feature: MA Experiment 108527 PARAMETER Experiment Name: Zm_5mM_NO_P Parameter: Tissue Value: Aerial
  misc_feature: MA Experiment 108527 PARAMETER Experiment Name: Zm_5mM_NO_P Parameter: Treatment Value: 5mM NO vs. No Treatment
  misc_feature: MA Experiment ID: 108529 Result: Up-regulated in Transcription
  misc_feature: MA Experiment 108529 PARAMETER Experiment Name: Zm_Imbibed_Seeds_P Parameter: Age (day) Value: 5 vs. 2
  misc_feature: MA Experiment 108529 PARAMETER Experiment Name: Zm_Imbibed_Seeds_P Parameter: Organism Value: Zea mays
  misc_feature: MA Experiment 108529 PARAMETER Experiment Name: Zm_Imbibed_Seeds_P Parameter: Plant Line Value: 35A19
  misc_feature: MA Experiment 108529 PARAMETER Experiment Name: Zm_Imbibed_Seeds_P Parameter: Tissue Value: Roots vs. Embryo
  misc_feature: MA Experiment ID: 108535 Result: Down-regulated in Transcription
  misc_feature: MA Experiment 108535 PARAMETER Experiment Name: Zm_Meristem_P Parameter: Age (day) Value: 8
  misc_feature: MA Experiment 108535 PARAMETER Experiment Name: Zm_Meristem_P Parameter: Organism Value: Zea mays
  misc_feature: MA Experiment 108535 PARAMETER Experiment Name: Zm_Meristem_P Parameter: Plant Line Value: 35A19
  misc_feature: MA Experiment 108535 PARAMETER Experiment Name: Zm_Meristem_P Parameter: Tissue Value: Root Meristem vs. Above Root Meristem
  misc_feature: MA Experiment ID: 108540 Result: Up-regulated in Transcription
  misc_feature: MA Experiment 108540 PARAMETER Experiment Name: Zm_20percent_PEG_P Parameter: Age (day) Value: 8
  misc_feature: MA Experiment 108540 PARAMETER Experiment Name: Zm_20percent_PEG_P Parameter: Organism Value: Zea mays
  misc_feature: MA Experiment 108540 PARAMETER Experiment Name: Zm_20percent_PEG_P Parameter: Plant Line Value: 35A19
  misc_feature: MA Experiment 108540 PARAMETER Experiment Name: Zm_20percent_PEG_P Parameter: Timepoint (hr) Value: 6
  misc_feature: MA Experiment 108540 PARAMETER Experiment Name: Zm_20percent_PEG_P Parameter: Tissue Value: Aerial
  misc_feature: MA Experiment 108540 PARAMETER Experiment Name: Zm_20percent_PEG_P Parameter: Treatment Value: 20percent PEG vs. No Treatment
  misc_feature: MA Experiment ID: 108543 Result: Up-regulated in Transcription
  misc_feature: MA Experiment ID: 108545 Result: Down-regulated in Transcription
  misc_feature: MA Experiment 108545 PARAMETER Experiment Name: Zm_Imbibed_Seeds_P Parameter: Age (day) Value: 3 vs. 2
  misc_feature: MA Experiment 108545 PARAMETER Experiment Name: Zm_Imbibed_Seeds_P Parameter: Organism Value: Zea mays
  misc_feature: MA Experiment 108545 PARAMETER Experiment Name: Zm_Imbibed_Seeds_P Parameter: Plant Line Value: 35A19
  misc_feature: MA Experiment 108545 PARAMETER Experiment Name: Zm_Imbibed_Seeds_P Parameter: Tissue Value: Aerial vs. Embryo
  misc_feature: MA Experiment ID: 108546 Result: Up-regulated in Transcription
  misc_feature: MA Experiment 108546 PARAMETER Experiment Name: Zm_Imbibed_Seeds_P Parameter: Age (day) Value: 3 vs. 2
  misc_feature: MA Experiment 108546 PARAMETER Experiment Name: Zm_Imbibed_Seeds_P Parameter: Organism Value: Zea mays
  misc_feature: MA Experiment 108546 PARAMETER Experiment Name: Zm_Imbibed_Seeds_P Parameter: Plant Line Value: 35A19
  misc_feature: MA Experiment 108546 PARAMETER Experiment Name: Zm_Imbibed_Seeds_P Parameter: Tissue Value: Roots vs. Embryo
  misc_feature: MA Experiment ID: 108556 Result: Up-regulated in Transcription
  misc_feature: MA Experiment 108556 PARAMETER Experiment Name: Zm_Drought_P Parameter: Age (day) Value: 9
  misc_feature: MA Experiment 108556 PARAMETER Experiment Name: Zm_Drought_P Parameter: Organism Value: Zea mays
  misc_feature: MA Experiment 108556 PARAMETER Experiment Name: Zm_Drought_P Parameter: Plant Line Value: 35A19
  misc_feature: MA Experiment 108556 PARAMETER Experiment Name: Zm_Drought_P Parameter: Timepoint (hr) Value: 24
  misc_feature: MA Experiment 108556 PARAMETER Experiment Name: Zm_Drought_P Parameter: Tissue Value: Aerial
  misc_feature: MA Experiment 108556 PARAMETER Experiment Name: Zm_Drought_P Parameter: Treatment Value: Drought vs. No Drought
  misc_feature: MA Experiment ID: 20000477 Result: Up-regulated in Transcription
  misc_feature: MA Experiment 20000477 PARAMETER Experiment Name: Zm_5mM_SA_P Parameter: Age (day) Value: 10
  misc_feature: MA Experiment 20000477 PARAMETER Experiment Name: Zm_5mM_SA_P Parameter: Organism Value: Zea mays
  misc_feature: MA Experiment 20000477 PARAMETER Experiment Name: Zm_5mM_SA_P Parameter: Plant Line Value: 35A19
  misc_feature: MA Experiment 20000477 PARAMETER Experiment Name: Zm_5mM_SA_P Parameter: Timepoint (hr) Value: 48
  misc_feature: MA Experiment 20000477 PARAMETER Experiment Name: Zm_5mM_SA_P Parameter: Tissue Value: Aerial
  misc_feature: MA Experiment 20000477 PARAMETER Experiment Name: Zm_5mM_SA_P Parameter: Treatment Value: 5mM SA vs. No Treatment
  misc_feature: MA Experiment ID: 20000478 Result: Up-regulated in Transcription
  misc_feature: MA Experiment 20000478 PARAMETER Experiment Name: Zm_5mM_SA_P Parameter: Age (day) Value: 11
  misc_feature: MA Experiment 20000478 PARAMETER Experiment Name: Zm_5mM_SA_P Parameter: Organism Value: Zea mays
  misc_feature: MA Experiment 20000478 PARAMETER Experiment Name: Zm_5mM_SA_P Parameter: Plant Line Value: 35A19
  misc_feature: MA Experiment 20000478 PARAMETER Experiment Name: Zm_5mM_SA_P Parameter: Timepoint (hr) Value: 72
  misc_feature: MA Experiment 20000478 PARAMETER Experiment Name: Zm_5mM_SA_P Parameter: Tissue Value: Aerial
  misc_feature: MA Experiment 20000478 PARAMETER Experiment Name: Zm_5mM_SA_P Parameter: Treatment Value: 5mM SA vs. No Treatment
  misc_feature: MA Experiment ID: 20000479 Result: Up-regulated in Transcription
  misc_feature: MA Experiment 20000479 PARAMETER Experiment Name: Zm_Drought_P Parameter: Age (day) Value: 10
  misc_feature: MA Experiment 20000479 PARAMETER Experiment Name: Zm_Drought_P Parameter: Organism Value: Zea mays
  misc_feature: MA Experiment 20000479 PARAMETER Experiment Name: Zm_Drought_P Parameter: Plant Line Value: 35A19
  misc_feature: MA Experiment 20000479 PARAMETER Experiment Name: Zm_Drought_P Parameter: Timepoint (hr) Value: 48
  misc_feature: MA Experiment 20000479 PARAMETER Experiment Name: Zm_Drought_P Parameter: Tissue Value: Aerial
  misc_feature: MA Experiment 20000479 PARAMETER Experiment Name: Zm_Drought_P Parameter: Treatment Value: Drought vs. No Drought
  misc_feature: MA Experiment ID: 20000480 Result: Up-regulated in Transcription
  misc_feature: MA Experiment 20000480 PARAMETER Experiment Name: Zm_Drought_P Parameter: Age (day) Value: 11
  misc_feature: MA Experiment 20000480 PARAMETER Experiment Name: Zm_Drought_P Parameter: Organism Value: Zea mays
  misc_feature: MA Experiment 20000480 PARAMETER Experiment Name: Zm_Drought_P Parameter: Plant Line Value: 35A19
  misc_feature: MA Experiment 20000480 PARAMETER Experiment Name: Zm_Drought_P Parameter: Timepoint (hr) Value: 72
  misc_feature: MA Experiment 20000480 PARAMETER Experiment Name: Zm_Drought_P Parameter: Tissue Value: Aerial
  misc_feature: MA Experiment 20000480 PARAMETER Experiment Name: Zm_Drought_P Parameter: Treatment Value: Drought vs. No Drought
  misc_feature: MA Experiment ID: 20000492 Result: Down-regulated in Transcription
  misc_feature: MA Experiment 20000492 PARAMETER Experiment Name: Zm_Hybrid_Seed_Dev_P Parameter: DAP Value: 12
  misc_feature: MA Experiment 20000492 PARAMETER Experiment Name: Zm_Hybrid_Seed_Dev_P Parameter: Organism Value: Zea mays
  misc_feature: MA Experiment 20000492 PARAMETER Experiment Name: Zm_Hybrid_Seed_Dev_P Parameter: Plant Line Value: 35A19
  misc_feature: MA Experiment 20000492 PARAMETER Experiment Name: Zm_Hybrid_Seed_Dev_P Parameter: Tissue Value: Fert Kernel vs. Unfert Floret
  misc_feature: MA Experiment ID: 20000535 Result: Down-regulated in Transcription
  misc_feature: MA Experiment 20000535 PARAMETER Experiment Name: Zm_Hybrid_Seed_Dev_P Parameter: DAP Value: 30 vs. 12
  misc_feature: MA Experiment 20000535 PARAMETER Experiment Name: Zm_Hybrid_Seed_Dev_P Parameter: Organism Value: Zea mays
  misc_feature: MA Experiment 20000535 PARAMETER Experiment Name: Zm_Hybrid_Seed_Dev_P Parameter: Plant Line Value: 35A19
  misc_feature: MA Experiment 20000535 PARAMETER Experiment Name: Zm_Hybrid_Seed_Dev_P Parameter: Tissue Value: Embryo vs. Unfert Floret
  misc_feature: MA Experiment ID: 20000626 Result: Up-regulated in Transcription
  misc_feature: MA Experiment 20000626 PARAMETER Experiment Name: Zm_Herbicide-Treatments_P Parameter: Timepoint (hr) Value: 12
  misc_feature: MA Experiment 20000626 PARAMETER Experiment Name: Zm_Herbicide-Treatments_P Parameter: Tissue Value: Aerial
  misc_feature: MA Experiment 20000626 PARAMETER Experiment Name: Zm_Herbicide-Treatments_P Parameter: Treatment Value: Roundup vs. No Treatment
  misc_feature: MA Experiment ID: 20000629 Result: Up-regulated in Transcription
  misc_feature: MA Experiment 20000629 PARAMETER Experiment Name: Zm_Herbicide-Treatments_P Parameter: Timepoint (hr) Value: 12
  misc_feature: MA Experiment 20000629 PARAMETER Experiment Name: Zm_Herbicide-Treatments_P Parameter: Tissue Value: Aerial
  misc_feature: MA Experiment 20000629 PARAMETER Experiment Name: Zm_Herbicide-Treatments_P Parameter: Treatment Value: Trimec vs. No Treatment
  misc_feature: MA Experiment ID: 20000630 Result: Up-regulated in Transcription
  misc_feature: MA Experiment 20000630 PARAMETER Experiment Name: Zm_Herbicide-Treatments_P Parameter: Timepoint (hr) Value: 4
  misc_feature: MA Experiment 20000630 PARAMETER Experiment Name: Zm_Herbicide-Treatments_P Parameter: Tissue Value: Aerial
  misc_feature: MA Experiment 20000630 PARAMETER Experiment Name: Zm_Herbicide-Treatments_P Parameter: Treatment Value: Roundup vs. No Treatment
gcagcggattgcggagtggcattgggttggcagcacgcccctgcacacggtgacacgggccacggcgcggcgcggcgcggcacggggagcgagcgccgagcgagagcaagcaaccgctgtccgccgggccggccacggcgctgccccctgcttcgcgccttcgccggtgcgctcacgcctcacgcaggtgcatgcatcgacctacggtatcctagtctgggatcagaaaagaacacagcaacaacaaagaagaaaggcgcgagcgatggacggtgacgccggaccagagcaacacgggtgcgtgcactacaggaggggatgcaagataagggcgccgtgctgcggcgaggtatttggttgcaggcactgccacaacgaagccaaggactcgctggaggtcagcgtccacgaccgccacgtgcttccccgtcacgacatcaagctggttatctgctctctctgcaacaaagaacaggatgtaagttccctgacgaagcagggacagtgttcttcggccactgttggtgttacctgccacacaccacatgaaaaaaaaacccatctcgtctgtcgacaggtgcagcaagactgtgcgaactgcggagcatgtctcggcaaatacttctgcgcgaaatgcaacctcttcgacgacgatgtgtcgaagaaccaatttcactgcgatgggtgcggcatatgcaggactggtggcgctgagaatttctatcactgtggcagatgtggatgctgctacaccactccgctgaaggattctcaccgctgcgtggacggagctatgcatcacaactgccctgtctgcatggagtatctattcgactcgatgaaagctatcagcgtgctccactgcggacacaccatccacctggaatgcctttacgagatgagagcgcaccagcagttttcatgcccggtgtgcctgaggtctgcctgcaacatgtccgacatctggcaaaagctggatcagcaggttgcagcgtccccgatgccagcgatctaccagaagaagatggtatggatcctttgcaacgactgtggcgtgacgtccaacgtgcagttccacatcttggcgcacaagtgccctggatgcagctcttacaacacccggcagacgaggggcgatccagccgcatgctctagagtctgagagcaaataaaactgcagtactgcactgcacataaactcgtggggttgtgcggtcgatcgataggtagcttgcagggaggaaattaaagactaccattgcgcatggacacgattggtgccggcagttgagtacgtgtattaggcctgtcatatgtagatgtatcatatgcaatgccttcacaaagaagaatttggcgcagcggacagggtttttttttgttgct

SEQ ID NO: 6148 - protein, 386 aa, Zea mays subsp. mays
  peptide (1)..(386): Ceres Seq. ID no. 12373220
  misc_feature (100)..(160): Pfam Name: CHY zinc finger Pfam Description: CHY zinc finger
  misc_feature (191)..(382): Homolog of NCBI NO: 37535002 NR Description: putative PGPD14 protein (pollen germination
  misc_feature (191)..(386): Homolog of NCBI NO: 4105798 NR Description: PGPD14 [Petunia x hybrida]
  misc_feature (191)..(384): Homolog of NCBI NO: 21593716 NR Description: PGPD14 protein [Arabidopsis thaliana]
  misc_feature (191)..(384): Homolog of NCBI NO: 15237169 NR Description: PGPD14 protein; protein id: At5g22920.1, by cDNA: 41666., supported by cDNA: gi_15450520 [Arabidopsis >gi|10177239|dbj|BAB10613.1| PGPD14 protein [Arabidopsis
  misc_feature (154)..(375): Homolog of NCBI NO: 34910658 NR Description: putative PGPD14 protein (pollen germination
  misc_feature (233)..(357): Homolog of NCBI NO: 15451615 NR Description: Hypothetical protein with similarity to PGPD14
  misc_feature (195)..(374): Homolog of NCBI NO: 15238890 NR Description: putative protein; protein id: At5g18650.1, by cDNA: gi_17381207, supported by cDNA: gi_20465812 [Arabidopsis >gi|17381208|gb|AAL36416.1| unknown protein [Arabidopsis
  misc_feature (191)..(382): Homolog of NCBI NO: 30102616 NR Description: At3g62970 [Arabidopsis thaliana]
  misc_feature (191)..(382): Homolog of NCBI NO: 30695702 NR Description: expressed protein [Arabidopsis thaliana]
  misc_feature (191)..(382): Homolog of NCBI NO: 11358168 NR Description: hypothetical protein T20O10.70 - Arabidopsis >gi|7573426|emb|CAB87742.1| putative protein [Arabidopsis
QRIAEWHWVGSTPLHTVTRATARRGAARGASAEREQATAVRRAGHGAAPCFAPSPVRSRLTQVHASTYGILVWDQKRTQQQQRRKARAMDGDAGPEQHGCVHYRRGCKIRAPCCGEVFGCRHCHNEAKDSLEVSVHDRHVLPRHDIKLVICSLCNKEQDVSSLTKQGQCSSATVGVTCHTPHEKKTHLVCRQVQQDCANCGACLGKYFCAKCNLFDDDVSKNQFHCDGCGICRTGGAENFYHCGRCGCCYTTPLKDSHRCVDGAMHHNCPVCMEYLFDSMKAISVLHCGHTIHLECLYEMRAHQQFSCPVCLRSACNMSDIWQKLDQQVAASPMPAIYQKKMVWILCNDCGVTSNVQFHILAHKCPGCSSYNTRQTRGDPAACSRV

SEQ ID NO: 6149 - protein, 298 aa, Zea mays subsp. mays
  peptide (1)..(298): Ceres Seq. ID no. 12373221
  misc_feature (12)..(72): Pfam Name: CHY zinc finger Pfam Description: CHY zinc finger
  misc_feature (103)..(294): Homolog of NCBI NO: 37535002 NR Description: putative PGPD14 protein (pollen germination
  misc_feature (103)..(298): Homolog of NCBI NO: 4105798 NR Description: PGPD14 [Petunia x hybrida]
  misc_feature (103)..(296): Homolog of NCBI NO: 21593716 NR Description: PGPD14 protein [Arabidopsis thaliana]
  misc_feature (103)..(296): Homolog of NCBI NO: 15237169 NR Description: PGPD14 protein; protein id: At5g22920.1, by cDNA: 41666., supported by cDNA: gi_15450520 [Arabidopsis >gi|10177239|dbj|BAB10613.1| PGPD14 protein [Arabidopsis
  misc_feature (66)..(287): Homolog of NCBI NO: 34910658 NR Description: putative PGPD14 protein (pollen germination
  misc_feature (145)..(269): Homolog of NCBI NO: 15451615 NR Description: Hypothetical protein with similarity to PGPD14
  misc_feature (107)..(286): Homolog of NCBI NO: 15238890 NR Description: putative protein; protein id: At5g18650.1, by cDNA: gi_17381207, supported by cDNA: gi_20465812 [Arabidopsis >gi|17381208|gb|AAL36416.1| unknown protein [Arabidopsis
  misc_feature (103)..(294): Homolog of NCBI NO: 30102616 NR Description: At3g62970 [Arabidopsis thaliana]
  misc_feature (103)..(294): Homolog of NCBI NO: 30695702 NR Description: expressed protein [Arabidopsis thaliana]
  misc_feature (103)..(294): Homolog of NCBI NO: 11358168 NR Description: hypothetical protein T20O10.70 - Arabidopsis >gi|7573426|emb|CAB87742.1| putative protein [Arabidopsis
MDGDAGPEQHGCVHYRRGCKIRAPCCGEVFGCRHCHNEAKDSLEVSVHDRHVLPRHDIKLVICSLCNKEQDVSSLTKQGQCSSATVGVTCHTPHEKKTHLVCRQVQQDCANCGACLGKYFCAKCNLFDDDVSKNQFHCDGCGICRTGGAENFYHCGRCGCCYTTPLKDSHRCVDGAMHHNCPVCMEYLFDSMKAISVLHCGHTIHLECLYEMRAHQQFSCPVCLRSACNMSDIWQKLDQQVAASPMPAIYQKKMVWILCNDCGVTSNVQFHILAHKCPGCSSYNTRQTRGDPAACSRV

SEQ ID NO: 6150 - DNA, 1845 bp, Zea mays subsp. mays; identical to SEQ ID NO: 4056
  misc_feature (1)..(1845): Ceres Seq. ID no. 13492086
  misc_feature: MA Experiment ID: 108522 Result: Down-regulated in Transcription
  misc_feature: MA Experiment 108522 PARAMETER Experiment Name: Zm_42deg_Heat_P Parameter: Age (day) Value: 8
  misc_feature: MA Experiment 108522 PARAMETER Experiment Name: Zm_42deg_Heat_P Parameter: Organism Value: Zea mays
  misc_feature: MA Experiment 108522 PARAMETER Experiment Name: Zm_42deg_Heat_P Parameter: Plant Line Value: 35A19
  misc_feature: MA Experiment 108522 PARAMETER Experiment Name: Zm_42deg_Heat_P Parameter: Temperature (deg C) Value: 42 vs. 22
  misc_feature: MA Experiment 108522 PARAMETER Experiment Name: Zm_42deg_Heat_P Parameter: Timepoint (hr) Value: 1
  misc_feature: MA Experiment 108522 PARAMETER Experiment Name: Zm_42deg_Heat_P Parameter: Tissue Value: Aerial
  misc_feature: MA Experiment ID: 108529 Result: Up-regulated in Transcription
  misc_feature: MA Experiment 108529 PARAMETER Experiment Name: Zm_Imbibed_Seeds_P Parameter: Age (day) Value: 5 vs. 2
  misc_feature: MA Experiment 108529 PARAMETER Experiment Name: Zm_Imbibed_Seeds_P Parameter: Organism Value: Zea mays
  misc_feature: MA Experiment 108529 PARAMETER Experiment Name: Zm_Imbibed_Seeds_P Parameter: Plant Line Value: 35A19
  misc_feature: MA Experiment 108529 PARAMETER Experiment Name: Zm_Imbibed_Seeds_P Parameter: Tissue Value: Roots vs. Embryo
  misc_feature: MA Experiment ID: 108544 Result: Up-regulated in Transcription
  misc_feature: MA Experiment ID: 108556 Result: Up-regulated in Transcription
  misc_feature: MA Experiment 108556 PARAMETER Experiment Name: Zm_Drought_P Parameter: Age (day) Value: 9
  misc_feature: MA Experiment 108556 PARAMETER Experiment Name: Zm_Drought_P Parameter: Organism Value: Zea mays
  misc_feature: MA Experiment 108556 PARAMETER Experiment Name: Zm_Drought_P Parameter: Plant Line Value: 35A19
  misc_feature: MA Experiment 108556 PARAMETER Experiment Name: Zm_Drought_P Parameter: Timepoint (hr) Value: 24
  misc_feature: MA Experiment 108556 PARAMETER Experiment Name: Zm_Drought_P Parameter: Tissue Value: Aerial
  misc_feature: MA Experiment 108556 PARAMETER Experiment Name: Zm_Drought_P Parameter: Treatment Value: Drought vs. No Drought
  misc_feature: MA Experiment ID: 108559 Result: Up-regulated in Transcription
  misc_feature: MA Experiment 108559 PARAMETER Experiment Name: Zm_5mM_NO_P Parameter: Age (day) Value: 8
  misc_feature: MA Experiment 108559 PARAMETER Experiment Name: Zm_5mM_NO_P Parameter: Organism Value: Zea mays
  misc_feature: MA Experiment 108559 PARAMETER Experiment Name: Zm_5mM_NO_P Parameter: Plant Line Value: 35A19
  misc_feature: MA Experiment 108559 PARAMETER Experiment Name: Zm_5mM_NO_P Parameter: Timepoint (hr) Value: 12
  misc_feature: MA Experiment 108559 PARAMETER Experiment Name: Zm_5mM_NO_P Parameter: Tissue Value: Aerial
  misc_feature: MA Experiment 108559 PARAMETER Experiment Name: Zm_5mM_NO_P Parameter: Treatment Value: 5mM NO vs. No Treatment
  misc_feature: MA Experiment ID: 108687 Result: Down-regulated in Transcription
  misc_feature: MA Experiment 108687 PARAMETER Experiment Name: Zm_Embryos-Flowers__P Parameter: Tissue Value: Embryo vs. Aerial+
  misc_feature: MA Experiment ID: 20000108 Result: Down-regulated in Transcription
  misc_feature: MA Experiment 20000108 PARAMETER Experiment Name: Zm_Root-Tips_P Parameter: Age (day) Value: 12
  misc_feature: MA Experiment 20000108 PARAMETER Experiment Name: Zm_Root-Tips_P Parameter: Organism Value: Zea mays
  misc_feature: MA Experiment 20000108 PARAMETER Experiment Name: Zm_Root-Tips_P Parameter: Tissue Value: Root tips vs. Root mid region    35
  misc_feature: MA Experiment 20000108 PARAMETER Experiment Name: Zm_Root-Tips_P Parameter: Tissue Value: Root tips vs. Root mid region   Sequence Listing-Misc Features (4)
  misc_feature: MA Experiment ID: 20000488 Result: Down-regulated in Transcription
  misc_feature: MA Experiment 20000488 PARAMETER Experiment Name: Zm_50mM_NH4NO3_L_to_H_P Parameter: Organism Value: Zea mays
  misc_feature: MA Experiment 20000488 PARAMETER Experiment Name: Zm_50mM_NH4NO3_L_to_H_P Parameter: Timepoint (hr) Value: 8
  misc_feature: MA Experiment 20000488 PARAMETER Experiment Name: Zm_50mM_NH4NO3_L_to_H_P Parameter: Tissue Value: Leaves
  misc_feature: MA Experiment 20000488 PARAMETER Experiment Name: Zm_50mM_NH4NO3_L_to_H_P Parameter: Treatment Value: 50mM NH4NO3 vs. 100mM Mannitol
  misc_feature: MA Experiment ID: 20000535 Result: Down-regulated in Transcription
  misc_feature: MA Experiment 20000535 PARAMETER Experiment Name: Zm_Hybrid_Seed_Dev_P Parameter: DAP Value: 30 vs. 12
  misc_feature: MA Experiment 20000535 PARAMETER Experiment Name: Zm_Hybrid_Seed_Dev_P Parameter: Organism Value: Zea mays
  misc_feature: MA Experiment 20000535 PARAMETER Experiment Name: Zm_Hybrid_Seed_Dev_P Parameter: Plant Line Value: 35A19
  misc_feature: MA Experiment 20000535 PARAMETER Experiment Name: Zm_Hybrid_Seed_Dev_P Parameter: Tissue Value: Embryo vs. Unfert Floret
  misc_feature: MA Experiment ID: 20000627 Result: Up-regulated in Transcription
  misc_feature: MA Experiment 20000627 PARAMETER Experiment Name: Zm_Herbicide-Treatments_P Parameter: Timepoint (hr) Value: 12
  misc_feature: MA Experiment 20000627 PARAMETER Experiment Name: Zm_Herbicide-Treatments_P Parameter: Tissue Value: Aerial
  misc_feature: MA Experiment 20000627 PARAMETER Experiment Name: Zm_Herbicide-Treatments_P Parameter: Treatment Value: Finale vs. No Treatment
  misc_feature: MA Experiment ID: 20001608 Result: Down-regulated in Transcription
  misc_feature: MA Experiment 20001608 PARAMETER Experiment Name: Zm_50ppm_KNO3_L-to-H_P Parameter: Age (day) Value: 21
  misc_feature: MA Experiment 20001608 PARAMETER Experiment Name: Zm_50ppm_KNO3_L-to-H_P Parameter: Organism Value: Zea mays
  misc_feature: MA Experiment 20001608 PARAMETER Experiment Name: Zm_50ppm_KNO3_L-to-H_P Parameter: Plant Line Value: 35A19
  misc_feature: MA Experiment 20001608 PARAMETER Experiment Name: Zm_50ppm_KNO3_L-to-H_P Parameter: Timepoint (hr) Value: 48
  misc_feature: MA Experiment 20001608 PARAMETER Experiment Name: Zm_50ppm_KNO3_L-to-H_P Parameter: Tissue Value: Shoots
  misc_feature: MA Experiment 20001608 PARAMETER Experiment Name: Zm_50ppm_KNO3_L-to-H_P Parameter: Treatment Value: 50ppm KNO3 vs. 50ppm KCl

SEQ ID NO: 6151 - protein, 469 aa, Zea mays subsp. mays; identical to SEQ ID NO: 4057
  peptide (1)..(469): Ceres Seq. ID no. 13492087
  misc_feature (135)..(350): Pfam Name: Papain family cysteine protease Pfam Description: Papain family cysteine protease
  misc_feature (1)..(469): Homolog of NCBI NO: 6682829 NR Description: cysteine protease component of protease-inhibitor
  misc_feature (1)..(469): Homolog of NCBI NO: 7435806 NR Description: cysteine proteinase mir3 (EC 3.4.22.-) - maize
  misc_feature (8)..(469): Homolog of NCBI NO: 129231 NR Description: Oryzain alpha chain precursor
  misc_feature (8)..(469): Homolog of NCBI NO: 38345906 NR Description: OSJNBb0059K02.8 [Oryza sativa (japonica
  misc_feature (8)..(432): Homolog of NCBI NO: 10241433 NR Description: putative oryzain alpha precursor [Oryza sativa
  misc_feature (8)..(455): Homolog of NCBI NO: 14517542 NR Description: F2G19.31/F2G19.31 [Arabidopsis thaliana]
  misc_feature (8)..(455): Homolog of NCBI NO: 18401614 NR Description: cysteine proteinase RD21A [Arabidopsis thaliana]
  misc_feature (8)..(434): Homolog of NCBI NO: 18141285 NR Description: senescence-associated cysteine protease [Brassica
  misc_feature (15)..(457): Homolog of NCBI NO: 18422289 NR Description: cysteine proteinase RD21A [Arabidopsis thaliana]
  misc_feature (14)..(463): Homolog of NCBI NO: 7435791 NR Description: cysteine proteinase (EC 3.4.22.-) 3 precursor - bean >gi|2511693|emb|CAB17076.1| cysteine proteinase precursor

SEQ ID NO: 6152 - protein, 441 aa, Zea mays subsp. mays; identical to SEQ ID NO: 4058
  peptide (1)..(441): Ceres Seq. ID no. 13492088
  misc_feature (107)..(322): Pfam Name: Papain family cysteine protease Pfam Description: Papain family cysteine protease
  misc_feature (1)..(441): Homolog of NCBI NO: 6682829 NR Description: cysteine protease component of protease-inhibitor
  misc_feature (1)..(441): Homolog of NCBI NO: 7435806 NR Description: cysteine proteinase mir3 (EC 3.4.22.-) - maize
  misc_feature (1)..(441): Homolog of NCBI NO: 129231 NR Description: Oryzain alpha chain precursor
  misc_feature (1)..(441): Homolog of NCBI NO: 38345906 NR Description: OSJNBb0059K02.8 [Oryza sativa (japonica
  misc_feature (1)..(404): Homolog of NCBI NO: 10241433 NR Description: putative oryzain alpha precursor [Oryza sativa
  misc_feature (1)..(427): Homolog of NCBI NO: 14517542 NR Description: F2G19.31/F2G19.31 [Arabidopsis thaliana]
  misc_feature (1)..(427): Homolog of NCBI NO: 18401614 NR Description: cysteine proteinase RD21A [Arabidopsis thaliana]
  misc_feature (1)..(406): Homolog of NCBI NO: 18141285 NR Description: senescence-associated cysteine protease [Brassica
  misc_feature (1)..(429): Homolog of NCBI NO: 18422289 NR Description: cysteine proteinase RD21A [Arabidopsis thaliana]
  misc_feature (1)..(435): Homolog of NCBI NO: 7435791 NR Description: cysteine proteinase (EC 3.4.22.-) 3 precursor - bean >gi|2511693|emb|CAB17076.1| cysteine proteinase precursor

SEQ ID NO: 6153 - protein, 425 aa, Zea mays subsp. mays; identical to SEQ ID NO: 4059
  peptide (1)..(425): Ceres Seq. ID no. 13492089
  misc_feature (91)..(306): Pfam Name: Papain family cysteine protease Pfam Description: Papain family cysteine protease
  misc_feature (1)..(425): Homolog of NCBI NO: 6682829 NR Description: cysteine protease component of protease-inhibitor
  misc_feature (1)..(425): Homolog of NCBI NO: 7435806 NR Description: cysteine proteinase mir3 (EC 3.4.22.-) - maize
  misc_feature (1)..(425): Homolog of NCBI NO: 129231 NR Description: Oryzain alpha chain precursor
  misc_feature (1)..(425): Homolog of NCBI NO: 38345906 NR Description: OSJNBb0059K02.8 [Oryza sativa (japonica
  misc_feature (1)..(388): Homolog of NCBI NO: 10241433 NR Description: putative oryzain alpha precursor [Oryza sativa
  misc_feature (1)..(411): Homolog of NCBI NO: 14517542 NR Description: F2G19.31/F2G19.31 [Arabidopsis thaliana]
  misc_feature (1)..(411): Homolog of NCBI NO: 18401614 NR Description: cysteine proteinase RD21A [Arabidopsis thaliana]
  misc_feature (1)..(390): Homolog of NCBI NO: 18141285 NR Description: senescence-associated cysteine protease [Brassica
  misc_feature (1)..(413): Homolog of NCBI NO: 18422289 NR Description: cysteine proteinase RD21A [Arabidopsis thaliana]
  misc_feature (1)..(419): Homolog of NCBI NO: 7435791 NR Description: cysteine proteinase (EC 3.4.22.-) 3 precursor - bean >gi|2511693|emb|CAB17076.1| cysteine proteinase precursor

SEQ ID NO: 6154 - DNA, 1382 bp, Zea mays subsp. mays
  misc_feature (1)..(1382): Ceres Seq. ID no. 12409212
  misc_feature: MA Experiment ID: 108597 Result: Up-regulated in Transcription
  misc_feature: MA Experiment 108597 PARAMETER Experiment Name: Zm_100uM_ABA_P Parameter: Age (day) Value: 9
  misc_feature: MA Experiment 108597 PARAMETER Experiment Name: Zm_100uM_ABA_P Parameter: Organism Value: Zea mays
  misc_feature: MA Experiment 108597 PARAMETER Experiment Name: Zm_100uM_ABA_P Parameter: Plant Line Value: 35A19
  misc_feature: MA Experiment 108597 PARAMETER Experiment Name: Zm_100uM_ABA_P Parameter: Timepoint (hr) Value: 24
  misc_feature: MA Experiment 108597 PARAMETER Experiment Name: Zm_100uM_ABA_P Parameter: Tissue Value: Aerial
  misc_feature: MA Experiment 108597 PARAMETER Experiment Name: Zm_100uM_ABA_P Parameter: Treatment Value: 100uM ABA vs. No Treatment
  misc_feature: MA Experiment ID: 20000477 Result: Up-regulated in Transcription
  misc_feature: MA Experiment 20000477 PARAMETER Experiment Name: Zm_5mM_SA_P Parameter: Age (day) Value: 10
  misc_feature: MA Experiment 20000477 PARAMETER Experiment Name: Zm_5mM_SA_P Parameter: Organism Value: Zea mays
  misc_feature: MA Experiment 20000477 PARAMETER Experiment Name: Zm_5mM_SA_P Parameter: Plant Line Value: 35A19
  misc_feature: MA Experiment 20000477 PARAMETER Experiment Name: Zm_5mM_SA_P Parameter: Timepoint (hr) Value: 48
  misc_feature: MA Experiment 20000477 PARAMETER Experiment Name: Zm_5mM_SA_P Parameter: Tissue Value: Aerial
  misc_feature: MA Experiment 20000477 PARAMETER Experiment Name: Zm_5mM_SA_P Parameter: Treatment Value: 5mM SA vs. No Treatment
  misc_feature: MA Experiment ID: 20000478 Result: Up-regulated in Transcription
  misc_feature: MA Experiment 20000478 PARAMETER Experiment Name: Zm_5mM_SA_P Parameter: Age (day) Value: 11
  misc_feature: MA Experiment 20000478 PARAMETER Experiment Name: Zm_5mM_SA_P Parameter: Organism Value: Zea mays
  misc_feature: MA Experiment 20000478 PARAMETER Experiment Name: Zm_5mM_SA_P Parameter: Plant Line Value: 35A19
  misc_feature: MA Experiment 20000478 PARAMETER Experiment Name: Zm_5mM_SA_P Parameter: Timepoint (hr) Value: 72
  misc_feature: MA Experiment 20000478 PARAMETER Experiment Name: Zm_5mM_SA_P Parameter: Tissue Value: Aerial
  misc_feature: MA Experiment 20000478 PARAMETER Experiment Name: Zm_5mM_SA_P Parameter: Treatment Value: 5mM SA vs. No Treatment
  misc_feature: MA Experiment ID: 20000480 Result: Up-regulated in Transcription
  misc_feature: MA Experiment 20000480 PARAMETER Experiment Name: Zm_Drought_P Parameter: Age (day) Value: 11
  misc_feature: MA Experiment 20000480 PARAMETER Experiment Name: Zm_Drought_P Parameter: Organism Value: Zea mays
  misc_feature: MA Experiment 20000480 PARAMETER Experiment Name: Zm_Drought_P Parameter: Plant Line Value: 35A19
  misc_feature: MA Experiment 20000480 PARAMETER Experiment Name: Zm_Drought_P Parameter: Timepoint (hr) Value: 72
  misc_feature: MA Experiment 20000480 PARAMETER Experiment Name: Zm_Drought_P Parameter: Tissue Value: Aerial
  misc_feature: MA Experiment 20000480 PARAMETER Experiment Name: Zm_Drought_P Parameter: Treatment Value: Drought vs. No Drought
  misc_feature: MA Experiment ID: 20000626 Result: Up-regulated in Transcription
  misc_feature: MA Experiment 20000626 PARAMETER Experiment Name: Zm_Herbicide-Treatments_P Parameter: Timepoint (hr) Value: 12
  misc_feature: MA Experiment 20000626 PARAMETER Experiment Name: Zm_Herbicide-Treatments_P Parameter: Tissue Value: Aerial
  misc_feature: MA Experiment 20000626 PARAMETER Experiment Name: Zm_Herbicide-Treatments_P Parameter: Treatment Value: Roundup vs. No Treatment
  misc_feature: MA Experiment ID: 20001612 Result: Up-regulated in Transcription
  misc_feature: MA Experiment 20001612 PARAMETER Experiment Name: Zm_50ppm_KNO3_L-to-H_P Parameter: Age (day) Value: 19
  misc_feature: MA Experiment 20001612 PARAMETER Experiment Name: Zm_50ppm_KNO3_L-to-H_P Parameter: Organism Value: Zea mays
  misc_feature: MA Experiment 20001612 PARAMETER Experiment Name: Zm_50ppm_KNO3_L-to-H_P Parameter: Plant Line Value: 35A19
  misc_feature: MA Experiment 20001612 PARAMETER Experiment Name: Zm_50ppm_KNO3_L-to-H_P Parameter: Timepoint (hr) Value: 8
  misc_feature: MA Experiment 20001612 PARAMETER Experiment Name: Zm_50ppm_KNO3_L-to-H_P Parameter: Tissue Value: Roots
  misc_feature: MA Experiment 20001612 PARAMETER Experiment Name: Zm_50ppm_KNO3_L-to-H_P Parameter: Treatment Value: 50ppm KNO3 vs. 50ppm KCl
aaagtggaagtggaatcgagtcaaatcgaccacttctctggcaagcccgcaggccgcagcccctcctccccccaagagccgccgaggctgctccccctagcaaacccgccatggccgagcgcctcgcagcatccgccgccaccctccgcgcctcggccgccaccaccccgttcgcccgccgcgcggcgccggccaaccgcgccttcttctcgccttcgctagctcgcgcgcgcgtcgctctccgcgccgcgccctctccgctcccgcagaaggcgagggtagtgaggtgcgcggctgtggcgatggcgtctgacgcggctcaggtgaaggccgcacgcgaggacatcagggagcttctcaggacgactcactgccaccccatcctggtccgtctaggatggcatgatgctggtacgtatgacaagaatattgaggagtggccacaacgaggtggagctaatggaagtttaagatttgatgttgagttgaaacatggagccaatgctggtctgataaatgctctaaagcttatccaaccaatcaaggacaagtaccctagtatcacttatgcagatttatttcagttggcaagtgctacagcaattgaggaagctggtggcccaaagattccaatgaaatacggacgagttgatgttacaggacctgagcagtgcccccctgaggggaaacttcctgatgctggcccaagttcacctgctgaccacttgagggaggtattctacagaatgggccttaatgacaaggaaattgttgccttgtctggagcacatacacttggaaggtccaggcctgaacggagtggctgggggaaaccagaaacaaaatatactaaaaatggtcctggtgcacctggttggcaatcatggacagttgaatggctgaggtttgataacagttacttcaaggatatcaaaagaaacgagatcaggatcttctggtcctacctacagatgctgctttatttgaggacccaaagttcaaggtctatgcggagaaatatgcagaggaccaagacgcattcttcagagactacgctgaggctcatgctaaactgagcgaattgggtgcgaagttccaaccaccgcagggattctctttggatgattagtgcggcaccagaaccctaaaccctctccttgaaaaggatcaagagggagcatacaattcattgttcttctcatatcatcgtacaagatggactggtccccctttttcatgatgctatatggagtcttctaatttagctagatttctgaaccgagcttgcaaataaaaaagaaccgacacagtggcactacataattttcagagccattgggagaactgacacagtgctatcagatttggttttatcccttcct

SEQ ID NO: 6155 - protein, 357 aa, Zea mays subsp. mays
  peptide (1)..(357): Ceres Seq. ID no. 12409213
  misc_feature (111)..(311): Pfam Name: Peroxidase Pfam Description: Peroxidase
  misc_feature (41)..(311): Homolog of NCBI NO: 32879781 NR Description: stromal ascorbate peroxidase [Oryza sativa
  misc_feature (15)..(311): Homolog of NCBI NO: 32879783 NR Description: thylakoid-bound ascorbate peroxidase [Oryza
  misc_feature (90)..(311): Homolog of NCBI NO: 25992557 NR Description: thylakoid-bound ascorbate peroxidase [Triticum
  misc_feature (26)..(311): Homolog of NCBI NO: 21741210 NR Description: OSJNBb0086G13.5 [Oryza sativa (japonica
  misc_feature (90)..(311): Homolog of NCBI NO: 25992555 NR Description: thylakoid-bound ascorbate peroxidase [Triticum
  misc_feature (29)..(311): Homolog of NCBI NO: 3202026 NR Description: stromal L-ascorbate peroxidase precursor
  misc_feature (29)..(311): Homolog of NCBI NO: 7484621 NR Description: L-ascorbate peroxidase (EC 1.11.1.11) precursor -
  misc_feature (37)..(311): Homolog of NCBI NO: 2392025 NR Description: stromal ascorbate peroxidase [Cucurbita cv.
  misc_feature (37)..(311): Homolog of NCBI NO: 7484766 NR Description: L-ascorbate peroxidase (EC 1.11.1.11) precursor -
  misc_feature (12)..(311): Homolog of NCBI NO: 4996602 NR Description: thylakoid-bound ascorbate peroxidase [Nicotiana
SGSGIESNRPLLWQARRPQPLLPPRAAEAAPPSKPAMAERLAASAATLRASAATTPFARRAAPANRAFFSPSLARARVALRAAPSPLPQKARVVRCAAVAMASDAAQVKAAREDIRELLRTTHCHPILVRLGWHDAGTYDKNIEEWPQRGGANGSLRFDVELKHGANAGLINALKLIQPIKDKYPSITYADLFQLASATAIEEAGGPKIPMKYGRVDVTGPEQCPPEGKLPDAGPSSPADHLREVFYRMGLNDKEIVALSGAHTLGRSRPERSGWGKPETKYTKNGPGAPGWQSWTVEWLRFDNSYFKDIKRNEIRIFWSYLQMLLYLRTQSSRSMRRNMQRTKTHSSETTLRLMLN

SEQ ID NO: 6156 - protein, 321 aa, Zea mays subsp. mays
  peptide (1)..(321): Ceres Seq. ID no. 12409214
  misc_feature (75)..(275): Pfam Name: Peroxidase Pfam Description: Peroxidase
  misc_feature (5)..(275): Homolog of NCBI NO: 32879781 NR Description: stromal ascorbate peroxidase [Oryza sativa
  misc_feature (1)..(275): Homolog of NCBI NO: 32879783 NR Description: thylakoid-bound ascorbate peroxidase [Oryza
  misc_feature (54)..(275): Homolog of NCBI NO: 25992557 NR Description: thylakoid-bound ascorbate peroxidase [Triticum
  misc_feature (1)..(275): Homolog of NCBI NO: 21741210 NR Description: OSJNBb0086G13.5 [Oryza sativa (japonica
  misc_feature (54)..(275): Homolog of NCBI NO: 25992555 NR Description: thylakoid-bound ascorbate peroxidase [Triticum
  misc_feature (1)..(275): Homolog of NCBI NO: 3202026 NR Description: stromal L-ascorbate peroxidase precursor
  misc_feature (1)..(275): Homolog of NCBI NO: 7484621 NR Description: L-ascorbate peroxidase (EC 1.11.1.11) precursor -
  misc_feature (1)..(275): Homolog of NCBI NO: 2392025 NR Description: stromal ascorbate peroxidase [Cucurbita cv.
  misc_feature (1)..(275): Homolog of NCBI NO: 7484766 NR Description: L-ascorbate peroxidase (EC 1.11.1.11) precursor -
  misc_feature (1)..(275): Homolog of NCBI NO: 4996602 NR Description: thylakoid-bound ascorbate peroxidase [Nicotiana
MAERLAASAATLRASAATTPFARRAAPANRAFFSPSLARARVALRAAPSPLPQKARVVRCAAVAMASDAAQVKAAREDIRELLRTTHCHPILVRLGWHDAGTYDKNIEEWPQRGGANGSLRFDVELKHGANAGLINALKLIQPIKDKYPSITYADLFQLASATAIEEAGGPKIPMKYGRVDVTGPEQCPPEGKLPDAGPSSPADHLREVFYRMGLNDKEIVALSGAHTLGRSRPERSGWGKPETKYTKNGPGAPGWQSWTVEWLRFDNSYFKDIKRNEIRIFWSYLQMLLYLRTQSSRSMRRNMQRTKTHSSETTLRLMLN

SEQ ID NO: 6157 - protein, 257 aa, Zea mays subsp. mays
  peptide (1)..(257): Ceres Seq. ID no. 12409215
  misc_feature (11)..(211): Pfam Name: Peroxidase Pfam Description: Peroxidase
  misc_feature (1)..(211): Homolog of NCBI NO: 32879781 NR Description: stromal ascorbate peroxidase [Oryza sativa
  misc_feature (1)..(211): Homolog of NCBI NO: 32879783 NR Description: thylakoid-bound ascorbate peroxidase [Oryza
  misc_feature (1)..(211): Homolog of NCBI NO: 25992557 NR Description: thylakoid-bound ascorbate peroxidase [Triticum
  misc_feature (1)..(211): Homolog of NCBI NO: 21741210 NR Description: OSJNBb0086G13.5 [Oryza sativa (japonica
  misc_feature (1)..(211): Homolog of NCBI NO: 25992555 NR Description: thylakoid-bound ascorbate peroxidase [Triticum
  misc_feature (1)..(211): Homolog of NCBI NO: 3202026 NR Description: stromal L-ascorbate peroxidase precursor
  misc_feature (1)..(211): Homolog of NCBI NO: 7484621 NR Description: L-ascorbate peroxidase (EC 1.11.1.11) precursor -
  misc_feature (1)..(211): Homolog of NCBI NO: 2392025 NR Description: stromal ascorbate peroxidase [Cucurbita cv.
  misc_feature (1)..(211): Homolog of NCBI NO: 7484766 NR Description: L-ascorbate peroxidase (EC 1.11.1.11) precursor -
  misc_feature (1)..(211): Homolog of NCBI NO: 4996602 NR Description: thylakoid-bound ascorbate peroxidase [Nicotiana
MASDAAQVKAAREDIRELLRTTHCHPILVRLGWHDAGTYDKNIEEWPQRGGANGSLRFDVELKHGANAGLINALKLIQPIKDKYPSITYADLFQLASATAIEEAGGPKIPMKYGRVDVTGPEQCPPEGKLPDAGPSSPADHLREVFYRMGLNDKEIVALSGAHTLGRSRPERSGWGKPETKYTKNGPGAPGWQSWTVEWLRFDNSYFKDIKRNEIRIFWSYLQMLLYLRTQSSRSMRRNMQRTKTHSSETTLRLMLN

SEQ ID NO: 6158 - DNA, 1522 bp, Zea mays subsp. mays
  misc_feature (1)..(1522): Ceres Seq. ID no. 12409208
  misc_feature: MA Experiment ID: 108527 Result: Down-regulated in Transcription
  misc_feature: MA Experiment 108527 PARAMETER Experiment Name: Zm_5mM_NO_P Parameter: Age (day) Value: 8
  misc_feature: MA Experiment 108527 PARAMETER Experiment Name: Zm_5mM_NO_P Parameter: Organism Value: Zea mays
  misc_feature: MA Experiment 108527 PARAMETER Experiment Name: Zm_5mM_NO_P Parameter: Plant Line Value: 35A19
  misc_feature: MA Experiment 108527 PARAMETER Experiment Name: Zm_5mM_NO_P Parameter: Timepoint (hr) Value: 6
  misc_feature: MA Experiment 108527 PARAMETER Experiment Name: Zm_5mM_NO_P Parameter: Tissue Value: Aerial
  misc_feature: MA Experiment 108527 PARAMETER Experiment Name: Zm_5mM_NO_P Parameter: Treatment Value: 5mM NO vs. No Treatment
aaaaacctcgcaagcgaccccagtaatggcgaccaaggcgctatccgtctcctcgctcacctccacggcctttgcctccttttccttgccgcggccccgcaggccttcaccttcgcctcccctcctccgccttctcggccctcgcccccgcgcctccactctctccgccgccgctcccggcgacgaggacggcgtcgacaccgtggagcagctcctccacccacgcccgcctgagacctcagcccccgccggatcccgcggccggatcgaccgcctcatgaagctccagcgccgcgccgacggcgacgccgtgcccgggggccggaggaggtggttcccttacctggacgcgttccggcccgcggccgggggcgcggagctgtccagcggggaggtcatagaggtgctggagccgcacatcctagaggcgcggcgggaccggattcgacaagccgttggcaaccggagctacgccgtttgcctcgtggtggaaggcctctccgacttcggcaacgtctcggccgcgttccgctccgcggacgcgctcggcgtgcagtccgtgcacgtcatttccttgatagcagcaaaaggtgcagaggtatagagacaacaggcatgtgagcatgggtgctgagaaatggcttgacattgagatatggaactcacctgcagaatgtttcagtgcattaaaaaaacgcggttatcgcattgcgaccacttatttgggaactgattcggtttgtgtgtatgatatggattggtctcaaccaacagctattgttgtgggcaatgagcttaggggtataagtgatgatgctctagaattgtcagatttgcactgcagcattccaatgaaaggcatggtggattcgtttaatgtatctgttgcagctggaatcctcatgcaccatgctgtttgtgatagagtttcccgcctgggccatcacggtgatctcttgcctgaagaaaataggatattgcttgctgagttctatctgcgacacagagaaagcacggctactatagttcatgaatatgccaaaatgaaggcaggaaaaattatgaccagactttgaaaacatcctgagaagctgagtgacgtgtctgtcaatcaagtcttggattatctggtgcatttttctaacagaaaacgaggctattttttcctggagtttaccgctgatcccaccagattgctgggaagacgaggatccaagcccaatcattgagcagagctgttaacgattacgcatatggttttcagtgacgtggacttttgctcccaaaacagtcgcccgttaactatttttgtatgtttttgttaggatgaaagcttaatatgtttccacttgtttttcacaaacgttggcggtggttgggtttgggcggcaacgctccatgttctacagacggttacgaccggaagcttggtgtaaccgtaccagtataacctgtccttggagggttgagagcttgagatgtaaacgaactgcacttgtctacggcaggatgatgcgtctgt

SEQ ID NO: 6159 - protein, 200 aa, Zea mays subsp. mays
  peptide (1)..(200): Ceres Seq. ID no. 12409209
  misc_feature (9)..(191): Homolog of NCBI NO: 34393586 NR Description: putative rRNA methylase [Oryza sativa (japonica
  misc_feature (15)..(196): Homolog of NCBI NO: 15242287 NR Description: rRNA methylase - like protein; protein id:
  misc_feature (76)..(191): Homolog of NCBI NO: 28207743 NR Description: CR004 protein [Chlamydomonas reinhardtii]
  misc_feature (142)..(190): Homolog of NCBI NO: 27364301 NR Description: rRNA methylases [Vibrio vulnificus CMCP6]
  misc_feature (144)..(189): Homolog of NCBI NO: 23475629 NR Description: hypothetical protein [Desulfovibrio desulfuricans
  misc_feature (144)..(190): Homolog of NCBI NO: 28896932 NR Description: tRNA methyltransferase [Vibrio parahaemolyticus
  misc_feature (142)..(191): Homolog of NCBI NO: 11079208 NR Description: tRNA (Gm18) methyltransferase [Thermus
  misc_feature (125)..(191): Homolog of NCBI NO: 21673707 NR Description: tRNA methyltransferase SpoU [Chlorobium tepidum >gi|21646829|gb|AAM72114.1| tRNA methyltransferase SpoU
  misc_feature (140)..(192): Homolog of NCBI NO: 33866213 NR Description: putative tRNA (guanosine-2'-O-)-methyltransferase
  misc_feature (133)..(190): Homolog of NCBI NO: 15594398 NR Description: spoU protein (spoU) [Borrelia burgdorferi]
KTSQATPVMATKALSVSSLTSTAFASFSLPRPRRPSPSPPLLRLLGPRPRASTLSAAAPGDEDGVDTVEQLLHPRPPETSAPAGSRGRIDRLMKLQRRADGDAVPGGRRRWFPYLDAFRPAAGGAELSSGEVIEVLEPHILEARRDRIRQAVGNRSYAVCLVVEGLSDFGNVSAAFRSADALGVQSVHVISLIAAKGAEV

SEQ ID NO: 6160 - protein, 192 aa, Zea mays subsp. mays
  peptide (1)..(192): Ceres Seq. ID no. 12409210
  misc_feature (1)..(183): Homolog of NCBI NO: 34393586 NR Description: putative rRNA methylase [Oryza sativa (japonica
  misc_feature (7)..(188): Homolog of NCBI NO: 15242287 NR Description: rRNA methylase - like protein; protein id:
  misc_feature (68)..(183): Homolog of NCBI NO: 28207743 NR Description: CR004 protein [Chlamydomonas reinhardtii]
  misc_feature (134)..(182): Homolog of NCBI NO: 27364301 NR Description: rRNA methylases [Vibrio vulnificus CMCP6]
  misc_feature (136)..(181): Homolog of NCBI NO: 23475629 NR Description: hypothetical protein [Desulfovibrio desulfuricans
  misc_feature (136)..(182): Homolog of NCBI NO: 28896932 NR Description: tRNA methyltransferase [Vibrio parahaemolyticus
  misc_feature (134)..(183): Homolog of NCBI NO: 11079208 NR Description: tRNA (Gm18) methyltransferase [Thermus
  misc_feature (117)..(183): Homolog of NCBI NO: 21673707 NR Description: tRNA methyltransferase SpoU [Chlorobium tepidum >gi|21646829|gb|AAM72114.1| tRNA methyltransferase SpoU
  misc_feature (132)..(184): Homolog of NCBI NO: 33866213 NR Description: putative tRNA (guanosine-2'-O-)-methyltransferase
  misc_feature (125)..(182): Homolog of NCBI NO: 15594398 NR Description: spoU protein (spoU) [Borrelia burgdorferi]
MATKALSVSSLTSTAFASFSLPRPRRPSPSPPLLRLLGPRPRASTLSAAAPGDEDGVDTVEQLLHPRPPETSAPAGSRGRIDRLMKLQRRADGDAVPGGRRRWFPYLDAFRPAAGGAELSSGEVIEVLEPHILEARRDRIRQAVGNRSYAVCLVVEGLSDFGNVSAAFRSADALGVQSVHVISLIAAKGAEV

SEQ ID NO: 6161 - protein, 150 aa, Zea mays subsp. mays
  peptide (1)..(150): Ceres Seq. ID no. 12409211
  misc_feature (1)..(95): Pfam Name: SpoU rRNA Methylase family Pfam Description: SpoU rRNA Methylase family
  misc_feature (1)..(115): Homolog of NCBI NO: 15606763 NR Description: rRNA methylase SpoU [Aquifex aeolicus]
  misc_feature (1)..(150): Homolog of NCBI NO: 34393586 NR Description: putative rRNA methylase [Oryza sativa (japonica
  misc_feature (1)..(142): Homolog of NCBI NO: 15242287 NR Description: rRNA methylase - like protein; protein id:
  misc_feature (1)..(137): Homolog of NCBI NO: 28207743 NR Description: CR004 protein [Chlamydomonas reinhardtii]
  misc_feature (1)..(97): Homolog of NCBI NO: 27364301 NR Description: rRNA methylases [Vibrio vulnificus CMCP6]
  misc_feature (1)..(125): Homolog of NCBI NO: 23475629 NR Description: hypothetical protein [Desulfovibrio desulfuricans
  misc_feature (1)..(119): Homolog of NCBI NO: 28896932 NR Description: tRNA methyltransferase [Vibrio parahaemolyticus
  misc_feature (1)..(126): Homolog of NCBI NO: 11079208 NR Description: tRNA (Gm18) methyltransferase [Thermus
  misc_feature (1)..(97): Homolog of NCBI NO: 21673707 NR Description: tRNA methyltransferase SpoU [Chlorobium tepidum >gi|21646829|gb|AAM72114.1| tRNA methyltransferase SpoU
  misc_feature (1)..(101): Homolog of NCBI NO: 33866213 NR Description: putative tRNA (guanosine-2'-O-)-methyltransferase
MGAEKWLDIEIWNSPAECFSALKKRGYRIATTYLGTDSVCVYDMDWSQPTAIVVGNELRGISDDALELSDLHCSIPMKGMVDSFNVSVAAGILMHHAVCDRVSRLGHHGDLLPEENRILLAEFYLRHRESTATIVHEYAKMKAGKIMTRL

SEQ ID NO: 6162 - DNA, 924 bp, Zea mays subsp. mays
  misc_feature (1)..(924): Ceres Seq. ID no. 12340827
  misc_feature: MA Experiment ID: 108689 Result: Down-regulated in Transcription
  misc_feature: MA Experiment 108689 PARAMETER Experiment Name: Zm_Drought_Roots_P Parameter: Age (day) Value: 9
  misc_feature: MA Experiment 108689 PARAMETER Experiment Name: Zm_Drought_Roots_P Parameter: Organism Value: Zea mays
  misc_feature: MA Experiment 108689 PARAMETER Experiment Name: Zm_Drought_Roots_P Parameter: Plant Line Value: 35A19
  misc_feature: MA Experiment 108689 PARAMETER Experiment Name: Zm_Drought_Roots_P Parameter: Timepoint (hr) Value: 24
  misc_feature: MA Experiment 108689 PARAMETER Experiment Name: Zm_Drought_Roots_P Parameter: Tissue Value: Roots
  misc_feature: MA Experiment 108689 PARAMETER Experiment Name: Zm_Drought_Roots_P Parameter: Treatment Value: Drought vs. No Drought
acccagggcagagtcgcagggtgacggggagagcccatcatggcgccgcagcagccgtgaagcacaagagcttttctgcagcacgacggctttgtcctctctcctttaaagcggactgctctcctcaattgtcagtcagtagcatccaattgattgttctatcctcttctctgttctcacccccttgcaagcaacaatcgttcaccgatcgatccagtgcgtcctgcatggaaactgccgccgtcgccgccgccggtgccgggcgccgcatcatggtggccgtggacgagggcgaggagagcctgcacgcgctcaactggtgcctcgccaacgtcgtctccccggcaggaggcgacacgctggtgctcgtccacgcccgccgcccgcgcccggtctacgccgccatggacagcgcagggtacatgatgacctcggacgtgctggcgagcgtcgagaggcacgccaacgcggtctcggcggcggcggtcgacaaggccaagcgcgtctgcgcggaccacccgcacgtcaaggtggagacgatggtggagagcggggacccgcgggacgtcatctgcgacgccgccaacaagatggccgcggacctgctcgtcatgggcagccatggttacggcttcatccagagggcgttcttgggcagcgtcagcaaccactgcgcgcagaactgcaaatgcccggtcctcattgtcaagaggcccaaggagtagaaaggctcctcgcatgtacgctgcagcttagccaataatgtttcatgggcgaccatataggcatatatgtacacacttcacatcccattgcatggcagtgtcttcccttccctagttcaacaactagctttctgctggaataaggtgttcagacaaatcttcttgcatttggtactcttgtttagagagaagcgttccg

SEQ ID NO: 6163 - protein, 240 aa, Zea mays subsp. mays
  peptide (1)..(240): Ceres Seq. ID no. 12340828
  misc_feature (87)..(214): Pfam Name: Universal stress protein family Pfam Description: Universal stress protein family
  misc_feature (71)..(216): Homolog of NCBI NO: 34905540 NR Description: B1146F03.27 [Oryza sativa (japonica
  misc_feature (88)..(237): Homolog of NCBI NO: 15228790 NR Description: putative protein; protein id: At3g62550.1, by cDNA: gi_14334945, supported by cDNA: gi_16323381 [Arabidopsis >gi|14334946|gb|AAK59650.1| unknown protein [Arabidopsis
  misc_feature (79)..(237): Homolog of NCBI NO: 34914610 NR Description: P0520B06.18 [Oryza sativa (japonica
  misc_feature (82)..(239): Homolog of NCBI NO: 20067187 NR Description: putative universal stress protein USP1 [Oryza
  misc_feature (80)..(239): Homolog of NCBI NO: 22831145 NR Description: contains ESTs
  misc_feature (90)..(236): Homolog of NCBI NO: 5669654 NR Description: ER6 protein [Lycopersicon esculentum]
  misc_feature (78)..(240): Homolog of NCBI NO: 18399413 NR Description: ethylene-responsive protein, putative; protein
  misc_feature (78)..(240): Homolog of NCBI NO: 30681955 NR Description: ethylene-responsive protein -related [Arabidopsis >gi|6671949|gb|AAF23209.1|AC016795_22 unknown protein thaliana] >gi|10998131|dbj|BAB03102.1| gene_id:MEC18.3~unknown
  misc_feature (78)..(240): Homolog of NCBI NO: 21594903 NR Description: ethylene-responsive protein, putative
  misc_feature (71)..(239): Homolog of NCBI NO: 40539010 NR Description: putative stress-related protein [Oryza sativa
PGQSRRVTGRAHHGAAAAVKHKSFSAARRLCPLSFKADCSPQLSVSSIQLIVLSSSLFSPPCKQQSFTDRSSASCMETAAVAAAGAGRRIMVAVDEGEESLHALNWCLANVVSPAGGDTLVLVHARRPRPVYAAMDSAGYMMTSDVLASVERHANAVSAAAVDKAKRVCADHPHVKVETMVESGDPRDVICDAANKMAADLLVMGSHGYGFIQRAFLGSVSNHCAQNCKCPVLIVKRPKE

SEQ ID NO: 6164 - protein, 165 aa, Zea mays subsp. mays
  peptide (1)..(165): Ceres Seq. ID no. 12340829
  misc_feature (12)..(139): Pfam Name: Universal stress protein family Pfam Description: Universal stress protein family
  misc_feature (1)..(141): Homolog of NCBI NO: 34905540 NR Description: B1146F03.27 [Oryza sativa (japonica
  misc_feature (13)..(162): Homolog of NCBI NO: 15228790 NR Description: putative protein; protein id: At3g62550.1, by cDNA: gi_14334945, supported by cDNA: gi_16323381 [Arabidopsis >gi|14334946|gb|AAK59650.1| unknown protein [Arabidopsis
  misc_feature (4)..(162): Homolog of NCBI NO: 34914610 NR Description: P0520B06.18 [Oryza sativa (japonica
  misc_feature (7)..(164): Homolog of NCBI NO: 20067187 NR Description: putative universal stress protein USP1 [Oryza
  misc_feature (5)..(164): Homolog of NCBI NO: 22831145 NR Description: contains ESTs
  misc_feature (15)..(161): Homolog of NCBI NO: 5669654 NR Description: ER6 protein [Lycopersicon esculentum]
  misc_feature (3)..(165): Homolog of NCBI NO: 18399413 NR Description: ethylene-responsive protein, putative; protein
  misc_feature (3)..(165): Homolog of NCBI NO: 30681955 NR Description: ethylene-responsive protein -related [Arabidopsis >gi|6671949|gb|AAF23209.1|AC016795_22 unknown protein thaliana] >gi|10998131|dbj|BAB03102.1| gene_id:MEC18.3~unknown
  misc_feature (3)..(165): Homolog of NCBI NO: 21594903 NR Description: ethylene-responsive protein, putative
  misc_feature (1)..(164): Homolog of NCBI NO: 40539010 NR Description: putative stress-related protein [Oryza sativa
METAAVAAAGAGRRIMVAVDEGEESLHALNWCLANVVSPAGGDTLVLVHARRPRPVYAAMDSAGYMMTSDVLASVERHANAVSAAAVDKAKRVCADHPHVKVETMVESGDPRDVICDAANKMAADLLVMGSHGYGFIQRAFLGSVSNHCAQNCKCPVLIVKRPKE

SEQ ID NO: 6165 - protein, 150 aa, Zea mays subsp. mays
  peptide (1)..(150): Ceres Seq. ID no. 12340830
  misc_feature (1)..(124): Pfam Name: Universal stress protein family Pfam Description: Universal stress protein family
  misc_feature (1)..(126): Homolog of NCBI NO: 34905540 NR Description: B1146F03.27 [Oryza sativa (japonica
  misc_feature (1)..(147): Homolog of NCBI NO: 15228790 NR Description: putative protein; protein id: At3g62550.1, by cDNA: gi_14334945, supported by cDNA: gi_16323381 [Arabidopsis >gi|14334946|gb|AAK59650.1| unknown protein [Arabidopsis
  misc_feature (1)..(147): Homolog of NCBI NO: 34914610 NR Description: P0520B06.18 [Oryza sativa (japonica
  misc_feature (1)..(149): Homolog of NCBI NO: 20067187 NR Description: putative universal stress protein USP1 [Oryza
  misc_feature (1)..(149): Homolog of NCBI NO: 22831145 NR Description: contains ESTs
  misc_feature (1)..(146): Homolog of NCBI NO: 5669654 NR Description: ER6 protein [Lycopersicon esculentum]
  misc_feature (1)..(150): Homolog of NCBI NO: 18399413 NR Description: ethylene-responsive protein, putative; protein
  misc_feature (1)..(150): Homolog of NCBI NO: 30681955 NR Description: ethylene-responsive protein -related [Arabidopsis >gi|6671949|gb|AAF23209.1|AC016795_22 unknown protein thaliana] >gi|10998131|dbj|BAB03102.1| gene_id:MEC18.3~unknown
  misc_feature (1)..(150): Homolog of NCBI NO: 21594903 NR Description: ethylene-responsive protein, putative
  misc_feature (1)..(149): Homolog of NCBI NO: 40539010 NR Description: putative stress-related protein [Oryza sativa
MVAVDEGEESLHALNWCLANVVSPAGGDTLVLVHARRPRPVYAAMDSAGYMMTSDVLASVERHANAVSAAAVDKAKRVCADHPHVKVETMVESGDPRDVICDAANKMAADLLVMGSHGYGFIQRAFLGSVSNHCAQNCKCPVLIVKRPKE

SEQ ID NO: 6166 - DNA, 2074 bp, Zea mays subsp. mays
  misc_feature (1)..(2074): Ceres Seq. ID no. 12409204
  misc_feature: MA Experiment ID: 108523 Result: Up-regulated in Transcription
  misc_feature: MA Experiment 108523 PARAMETER Experiment Name: Zm_42deg_Heat_P Parameter: Age (day) Value: 8
  misc_feature: MA Experiment 108523 PARAMETER Experiment Name: Zm_42deg_Heat_P Parameter: Organism Value: Zea mays
  misc_feature: MA Experiment 108523 PARAMETER Experiment Name: Zm_42deg_Heat_P Parameter: Plant Line Value: 35A19
  misc_feature: MA Experiment 108523 PARAMETER Experiment Name: Zm_42deg_Heat_P Parameter: Temperature (deg C) Value: 42 vs. 22
  misc_feature: MA Experiment 108523 PARAMETER Experiment Name: Zm_42deg_Heat_P Parameter: Timepoint (hr) Value: 6
  misc_feature: MA Experiment 108523 PARAMETER Experiment Name: Zm_42deg_Heat_P Parameter: Tissue Value: Aerial
  misc_feature: MA Experiment ID: 20000479 Result: Up-regulated in Transcription
  misc_feature: MA Experiment 20000479 PARAMETER Experiment Name: Zm_Drought_P Parameter: Age (day) Value: 10
  misc_feature: MA Experiment 20000479 PARAMETER Experiment Name: Zm_Drought_P Parameter: Organism Value: Zea mays
  misc_feature: MA Experiment 20000479 PARAMETER Experiment Name: Zm_Drought_P Parameter: Plant Line Value: 35A19
  misc_feature: MA Experiment 20000479 PARAMETER Experiment Name: Zm_Drought_P Parameter: Timepoint (hr) Value: 48
  misc_feature: MA Experiment 20000479 PARAMETER Experiment Name: Zm_Drought_P Parameter: Tissue Value: Aerial
  misc_feature: MA Experiment 20000479 PARAMETER Experiment Name: Zm_Drought_P Parameter: Treatment Value: Drought vs. No Drought
  misc_feature: MA Experiment ID: 20000535 Result: Down-regulated in Transcription
  misc_feature: MA Experiment 20000535 PARAMETER Experiment Name: Zm_Hybrid_Seed_Dev_P Parameter: DAP Value: 30 vs. 12
  misc_feature: MA Experiment 20000535 PARAMETER Experiment Name: Zm_Hybrid_Seed_Dev_P Parameter: Organism Value: Zea mays
  misc_feature: MA Experiment 20000535 PARAMETER Experiment Name: Zm_Hybrid_Seed_Dev_P Parameter: Plant Line Value: 35A19
  misc_feature: MA Experiment 20000535 PARAMETER Experiment Name: Zm_Hybrid_Seed_Dev_P Parameter: Tissue Value: Embryo vs. Unfert Floret
cggaacgcgtacaggcgccagctgctggctctgtcgcggcggatccggctcctcggccccttcgccgaggagctgcgggaggcacgccggggggtccgcggagcaggaggagcaggagcgggcgctggcgcctctcgccgacgcgctggagaaggcactcgacctgctccagctcggccgcgacggcagcaggatattcctggtccttgatagggatgaagtaatgaagaagttccatgaatcaattgctcagctggagcaagccctgtgcgattttccatatgataaactggatatatctgatgaagctagagagcaggttgagttagtgcatgcacagctcaaaagagccaaagagcgggtcgacatgcccgatgacgagttctacaacgaattatgttcgctgtataacaagagccacgacccaagtgctgagttggatatccttgggagattgtcggagaagttacacctgacgaccatcgctgatctcacgcaagaatcacttgctttgcacgagatggtggcatctggtggtggcaacgatcctggagaacacattgagaaaatgtcgatgctgctgaagaagatcaaggactttgtgcagactcagaaccctgaaacgggcccgctggtgactgccaagccaatgggttccaacgggaagccaagacctgtaaacgttcctgacgagttccggtgcccaatctctcttgagctgatgaaagacccggttatcgttgctactggccagacatacgagcgggcattgatcgagaaatggctagcttccgggcaccatacctgtccaagcactcaacaaaggatgccaaacacgacgctgacaccgaactatgttctcagaagccttatcacgcagtggtgtgaggccaacgggatcgatccaccgaagcgcccgacgcagcagcctgacagacctacatcttcatgctcttcgagcgagcgcgccagcatcgacgctctcctctccaagctatgctccgcagatcccgaggaacagagatcggctgccgcagagctccggctcctagcgaagcggaacgcgaacaaccggatctgcatcgccgaggccggtgccatccccttgctactgagcctcctgtcttcgtctgacctgcagacgcaggagcacgccgtgacggcgcttctgaacctctccatacacgaggacaacaaggcgagcatcatactgtccggcgctgtcccgggcatagttcacgtcctgaagaacgggagcatggaggcacgggagaacgctgcggccacactcttcagcctgtcggtggtggacgaatacaaggtcacgatcgggggcacaggagccatccctgccctcgtggtcttgctgagcgagggcaggcagcgcgggaagaaggacgcggcggctgccctgttcaacctgtgcatctaccaggggaacaagggccgcgccatacgggctggcctcgtgccactcgtcatggggctcgtgacgaaccccaccggagctctgctggacgaggccatggcgatcctgtcgatactgtccagccaccccgagggcaaggccgcgatcggggcggcggagcccgtccccgtcctcgtggagatgatcgcgggtgggtcgccgaggaacagggagaacgctgccgccgtgatgctgcacctgtccgccagcgtgcggcagtccgcgcatctggctccggcgcaggagtgcggcatcatggccccgctgcgggagctggcactgaatggcacggggagggggaagagaaaggccgtgcagctgctcgagcggatgagcaggttcctggtccagcagcaggaggacgcggtggatccacgtgtgcaggagctggaggagatcgagcgccagcttgccgcctttggacctggcgttacggaggctgatgtccttcaacagttgggagctctttaacctatgggacatttttcactatgatactactatactacatagaaaagttctagcggcggactttattatcagtaaaatctcaattcttgctactgaatgttagcgtgggtttcggatttcaagatttttatggtc

SEQ ID NO: 6167 - protein, 645 aa, Zea mays subsp. mays
  peptide (1)..(645): Ceres Seq. ID no. 12409205
  misc_feature (228)..(301): Pfam Name: U-box domain Pfam Description: U-box domain
  misc_feature (36)..(620): Homolog of NCBI NO: 15231445 NR Description: arm repeat containing protein homolog; protein At3g46510.1, supported by cDNA: gi_14596006 [Arabidopsis
  misc_feature (37)..(609): Homolog of NCBI NO: 18401867 NR Description: expressed protein; protein id: At2g28830.1
  misc_feature (37)..(609): Homolog of NCBI NO: 14334730 NR Description: unknown protein [Arabidopsis thaliana]
  misc_feature (35)..(609): Homolog of NCBI NO: 22331792 NR Description: putative protein; protein id: At3g54850.1, by cDNA: gi_20465440 [Arabidopsis thaliana] unknown protein [Arabidopsis thaliana]
  misc_feature (35)..(609): Homolog of NCBI NO: 7486336 NR Description: hypothetical protein F28P10.170 - Arabidopsis >gi|4678308|emb|CAB41099.1| putative protein [Arabidopsis
  misc_feature (52)..(602): Homolog of NCBI NO: 15238931 NR Description: arm repeat containing protein; protein id: [Arabidopsis thaliana] >gi|9759470|dbj|BAB10475.1| arm repeat
  misc_feature (84)..(602): Homolog of NCBI NO: 5902398 NR Description: Unknown protein [Arabidopsis thaliana]
  misc_feature (84)..(602): Homolog of NCBI NO: 25354708 NR Description: unknown protein F23N20.1 [imported] - Arabidopsis
  misc_feature (222)..(602): Homolog of NCBI NO: 15219996 NR Description: unknown protein; protein id: At1g23030.1
  misc_feature (222)..(602): Homolog of NCBI NO: 27311825 NR Description: unknown protein [Arabidopsis thaliana]
GTRTGASCWLCRGGSGSSAPSPRSCGRHAGGSAEQEEQERALAPLADALEKALDLLQLGRDGSRIFLVLDRDEVMKKFHESIAQLEQALCDFPYDKLDISDEAREQVELVHAQLKRAKERVDMPDDEFYNELCSLYNKSHDPSAELDILGRLSEKLHLTTIADLTQESLALHEMVASGGGNDPGEHIEKMSMLLKKIKDFVQTQNPETGPLVTAKPMGSNGKPRPVNVPDEFRCPISLELMKDPVIVATGQTYERALIEKWLASGHHTCPSTQQRMPNTTLTPNYVLRSLITQWCEANGIDPPKRPTQQPDRPTSSCSSSERASIDALLSKLCSADPEEQRSAAAELRLLAKRNANNRICIAEAGAIPLLLSLLSSSDLQTQEHAVTALLNLSIHEDNKASIILSGAVPGIVHVLKNGSMEARENAAATLFSLSVVDEYKVTIGGTGAIPALVVLLSEGRQRGKKDAAAALFNLCIYQGNKGRAIRAGLVPLVMGLVTNPTGALLDEAMAILSILSSHPEGKAAIGAAEPVPVLVEMIAGGSPRNRENAAAVMLHLSASVRQSAHLAPAQECGIMAPLRELALNGTGRGKRKAVQLLERMSRFLVQQQEDAVDPRVQELEEIERQLAAFGPGVTEADVLQQLGAL

SEQ ID NO: 6168 - protein, 571 aa, Zea mays subsp. mays
  peptide (1)..(571): Ceres Seq. ID no. 12409206
  misc_feature (154)..(227): Pfam Name: U-box domain Pfam Description: U-box domain
  misc_feature (1)..(546): Homolog of NCBI NO: 15231445 NR Description: arm repeat containing protein homolog; protein At3g46510.1, supported by cDNA: gi_14596006 [Arabidopsis
  misc_feature (1)..(535): Homolog of NCBI NO: 18401867 NR Description: expressed protein; protein id: At2g28830.1
  misc_feature (1)..(535): Homolog of NCBI NO: 14334730 NR Description: unknown protein [Arabidopsis thaliana]
  misc_feature (1)..(535): Homolog of NCBI NO: 22331792 NR Description: putative protein; protein id: At3g54850.1, by cDNA: gi_20465440 [Arabidopsis thaliana] unknown protein [Arabidopsis thaliana]
  misc_feature (1)..(535): Homolog of NCBI NO: 7486336 NR Description: hypothetical protein F28P10.170 - Arabidopsis >gi|4678308|emb|CAB41099.1| putative protein [Arabidopsis
  misc_feature (1)..(528): Homolog of NCBI NO: 15238931 NR Description: arm repeat containing protein; protein id: [Arabidopsis thaliana] >gi|9759470|dbj|BAB10475.1| arm repeat
  misc_feature (10)..(528): Homolog of NCBI NO: 5902398 NR Description: Unknown protein [Arabidopsis thaliana]
  misc_feature (10)..(528): Homolog of NCBI NO: 25354708 NR Description: unknown protein F23N20.1 [imported] - Arabidopsis
  misc_feature (148)..(528): Homolog of NCBI NO: 15219996 NR Description: unknown protein; protein id: At1g23030.1
  misc_feature (148)..(528): Homolog of NCBI NO: 27311825 NR Description: unknown protein [Arabidopsis thaliana]
MKKFHESIAQLEQALCDFPYDKLDISDEAREQVELVHAQLKRAKERVDMPDDEFYNELCSLYNKSHDPSAELDILGRLSEKLHLTTIADLTQESLALHEMVASGGGNDPGEHIEKMSMLLKKIKDFVQTQNPETGPLVTAKPMGSNGKPRPVNVPDEFRCPISLELMKDPVIVATGQTYERALIEKWLASGHHTCPSTQQRMPNTTLTPNYVLRSLITQWCEANGIDPPKRPTQQPDRPTSSCSSSERASIDALLSKLCSADPEEQRSAAAELRLLAKRNANNRICIAEAGAIPLLLSLLSSSDLQTQEHAVTALLNLSIHEDNKASIILSGAVPGIVHVLKNGSMEARENAAATLFSLSVVDEYKVTIGGTGAIPALVVLLSEGRQRGKKDAAAALFNLCIYQGNKGRAIRAGLVPLVMGLVTNPTGALLDEAMAILSILSSHPEGKAAIGAAEPVPVLVEMIAGGSPRNRENAAAVMLHLSASVRQSAHLAPAQECGIMAPLRELALNGTGRGKRKAVQLLERMSRFLVQQQEDAVDPRVQELEEIERQLAAFGPGVTEADVLQQLGAL

SEQ ID NO: 6169 - protein, 523 aa, Zea mays subsp. mays
  peptide (1)..(523): Ceres Seq. ID no. 12409207
  misc_feature (106)..(179): Pfam Name: U-box domain Pfam Description: U-box domain
  misc_feature (1)..(498): Homolog of NCBI NO: 15231445 NR Description: arm repeat containing protein homolog; protein At3g46510.1, supported by cDNA: gi_14596006 [Arabidopsis
  misc_feature (1)..(487): Homolog of NCBI NO: 18401867 NR Description: expressed protein; protein id: At2g28830.1
  misc_feature (1)..(487): Homolog of NCBI NO: 14334730 NR Description: unknown protein [Arabidopsis thaliana]
  misc_feature (1)..(487): Homolog of NCBI NO: 22331792 NR Description: putative protein; protein id: At3g54850.1, by cDNA: gi_20465440 [Arabidopsis thaliana] unknown protein [Arabidopsis thaliana]
  misc_feature (1)..(487): Homolog of NCBI NO: 7486336 NR Description: hypothetical protein F28P10.170 - Arabidopsis >gi|4678308|emb|CAB41099.1| putative protein [Arabidopsis
  misc_feature (1)..(480): Homolog of NCBI NO: 15238931 NR Description: arm repeat containing protein; protein id: [Arabidopsis thaliana] >gi|9759470|dbj|BAB10475.1| arm repeat
  misc_feature (1)..(480): Homolog of NCBI NO: 5902398 NR Description: Unknown protein [Arabidopsis thaliana]
  misc_feature (1)..(480): Homolog of NCBI NO: 25354708 NR Description: unknown protein F23N20.1 [imported] - Arabidopsis
  misc_feature (100)..(480): Homolog of NCBI NO: 15219996 NR Description: unknown protein; protein id: At1g23030.1
  misc_feature (100)..(480): Homolog of NCBI NO: 27311825 NR Description: unknown protein [Arabidopsis thaliana]
MPDDEFYNELCSLYNKSHDPSAELDILGRLSEKLHLTTIADLTQESLALHEMVASGGGNDPGEHIEKMSMLLKKIKDFVQTQNPETGPLVTAKPMGSNGKPRPVNVPDEFRCPISLELMKDPVIVATGQTYERALIEKWLASGHHTCPSTQQRMPNTTLTPNYVLRSLITQWCEANGIDPPKRPTQQPDRPTSSCSSSERASIDALLSKLCSADPEEQRSAAAELRLLAKRNANNRICIAEAGAIPLLLSLLSSSDLQTQEHAVTALLNLSIHEDNKASIILSGAVPGIVHVLKNGSMEARENAAATLFSLSVVDEYKVTIGGTGAIPALVVLLSEGRQRGKKDAAAALFNLCIYQGNKGRAIRAGLVPLVMGLVTNPTGALLDEAMAILSILSSHPEGKAAIGAAEPVPVLVEMIAGGSPRNRENAAAVMLHLSASVRQSAHLAPAQECGIMAPLRELALNGTGRGKRKAVQLLERMSRFLVQQQEDAVDPRVQELEEIERQLAAFGPGVTEADVLQQLGAL

SEQ ID NO: 6170 - DNA, 1237 bp, Zea mays subsp. mays
  misc_feature (1)..(1237): Ceres Seq. ID no. 12349150
  misc_feature: MA Experiment ID: 108543 Result: Down-regulated in Transcription
  misc_feature: MA Experiment ID: 20000477 Result: Down-regulated in Transcription
  misc_feature: MA Experiment 20000477 PARAMETER Experiment Name: Zm_5mM_SA_P Parameter: Age (day) Value: 10
  misc_feature: MA Experiment 20000477 PARAMETER Experiment Name: Zm_5mM_SA_P Parameter: Organism Value: Zea mays
  misc_feature: MA Experiment 20000477 PARAMETER Experiment Name: Zm_5mM_SA_P Parameter: Plant Line Value: 35A19
  misc_feature: MA Experiment 20000477 PARAMETER Experiment Name: Zm_5mM_SA_P Parameter: Timepoint (hr) Value: 48
  misc_feature: MA Experiment 20000477 PARAMETER Experiment Name: Zm_5mM_SA_P Parameter: Tissue Value: Aerial
  misc_feature: MA Experiment 20000477 PARAMETER Experiment Name: Zm_5mM_SA_P Parameter: Treatment Value: 5mM SA vs. No Treatment
  misc_feature: MA Experiment ID: 20000492 Result: Up-regulated in Transcription
  misc_feature: MA Experiment 20000492 PARAMETER Experiment Name: Zm_Hybrid_Seed_Dev_P Parameter: DAP Value: 12
  misc_feature: MA Experiment 20000492 PARAMETER Experiment Name: Zm_Hybrid_Seed_Dev_P Parameter: Organism Value: Zea mays
  misc_feature: MA Experiment 20000492 PARAMETER Experiment Name: Zm_Hybrid_Seed_Dev_P Parameter: Plant Line Value: 35A19
  misc_feature: MA Experiment 20000492 PARAMETER Experiment Name: Zm_Hybrid_Seed_Dev_P Parameter: Tissue Value: Fert Kernel vs. Unfert Floret
atccctgtctctcgctttccctaacccacaccagaataccagatcgagcaccgatctagggttgcacctcttctgctagccggctggcgaggagccgttcggcatctggacgcggccaagggagatgaagctcgcggggctcaagtctgtggacggcgcccacgaggagtccatctgggcggcggcgtgggcgcccgccgctgaccaccgccccacggcggtgctcctcactggcgcgctcgacgagaccgtccgcgcttggctccccgacgacctcgctgccttggggtcccccacacggggccacgcgctcggagtcgtctccctcgccgcccaccccgccggctcgctcgccgccgccgtgtcgctcgacagcttcatccgcgtctttgacgtcgacacgggggcatccgtcgccacgctggaggcgccgccgtccgagatttggggcgtccagttccatcccaagggtaatgctctggccgcagccggtggtggcagtggatcagtgaagctgtgggacacggagaagtggaaggcgatcaccagcctcgccgtcccacgcccggagggagctcgccccgacaagacaggcagcggcaagttcgtcctgtcagtcgcctggagccccgacggaaggctcctagcatgcgggtccatggacggcacgatcgccgtctacgacgcggtccgcatgaagttcctgcaccacctggagggccaccacatgcccggtgcggtccatggtgttctccccggtggacccgcacgtgcttttcacggcctgcgacgactgccacgtccacatctacgacgccagggagaagggcctcgtcggggccatgtcgggccacgcgagctgggtgctgagcatcgacgcgagccccgacggcctggcggtggccacggggtcgagcgaccgcaccgtccggctctgggacctcaacatgaggacctcggtgcagaccatgagcaaccactccgatcaggtgtgggccgtggccttcaggccaccaggcggtgccggagtccgagcagggcgtctggctagcgcgtcggatgacaagagcgtctccctgtacgattactcgtaggtttttgtttccttataaaccgttgcaaatgcctctgttgtaccgaccagagatttgaattcgggcatggtggttggaagaattgttgtacgcagcacagtagtcgaggtgttaaattgcaaggaaagagtttatttcgtgtt

SEQ ID NO: 6171 - protein, 308 aa, Zea mays subsp. mays
  peptide (1)..(308): Ceres Seq. ID no. 12349151
  misc_feature (1)..(220): Homolog of NCBI NO: 15233721 NR Description: G-protein beta family; protein id: At4g29830.1, by cDNA: 341. [Arabidopsis thaliana] >gi|7486232|pir||T08544
  misc_feature (12)..(203): Homolog of NCBI NO: 38541742 NR Description: Unknown (protein for MGC:77675) [Danio rerio]
  misc_feature (12)..(203): Homolog of NCBI NO: 37590940 NR Description: Unknown (protein for MGC:75826) [Silurana
  misc_feature (12)..(203): Homolog of NCBI NO: 13376840 NR Description: recombination protein REC14 [Homo sapiens] unnamed protein product [Homo sapiens] meiotic recombination protein REC14 [Homo sapiens]
  misc_feature (12)..(203): Homolog of NCBI NO: 13277350 NR Description: meiotic recombination protein REC14 [Mus >gi|25051440|ref|XP_193093.1| meiotic recombination protein REC14 musculus] >gi|11139244|gb|AAG31640.1|AF309554_1 meiotic
  misc_feature (12)..(203): Homolog of NCBI NO: 12849020 NR Description: unnamed protein product [Mus musculus]
  misc_feature (12)..(203): Homolog of NCBI NO: 33150742 NR Description: G protein beta subunit-like protein [Homo sapiens]
  misc_feature (29)..(203): Homolog of NCBI NO: 21356075 NR Description: CG3909-PA [Drosophila melanogaster]
  misc_feature (12)..(203): Homolog of NCBI NO: 26345856 NR Description: unnamed protein product [Mus musculus]
  misc_feature (34)..(202): Homolog of NCBI NO: 13173173 NR Description: unknown protein i8 [Aedes aegypti]
MKLAGLKSVDGAHEESIWAAAWAPAADHRPTAVLLTGALDETVRAWLPDDLAALGSPTRGHALGVVSLAAHPAGSLAAAVSLDSFIRVFDVDTGASVATLEAPPSEIWGVQFHPKGNALAAAGGGSGSVKLWDTEKWKAITSLAVPRPEGARPDKTGSGKFVLSVAWSPDGRLLACGSMDGTIAVYDAVRMKFLHHLEGHHMPGAVHGVLPGGPARAFHGLRRLPRPHLRRQGEGPRRGHVGPRELGAEHRREPRRPGGGHGVERPHRPALGPQHEDLGADHEQPLRSGVGRGLQATRRCRSPSRASG

SEQ ID NO: 6172 - DNA, 1106 bp, Zea mays subsp. mays
  misc_feature (1)..(1106): Ceres Seq. ID no. 13493222
  misc_feature: MA Experiment ID: 20000108 Result: Up-regulated in Transcription
  misc_feature: MA Experiment 20000108 PARAMETER Experiment Name: Zm_Root-Tips_P Parameter: Age (day) Value: 12
  misc_feature: MA Experiment 20000108 PARAMETER Experiment Name: Zm_Root-Tips_P Parameter: Organism Value: Zea mays
  misc_feature: MA Experiment 20000108 PARAMETER Experiment Name: Zm_Root-Tips_P Parameter: Tissue Value: Root tips vs. Root mid region    35
  misc_feature: MA Experiment 20000108 PARAMETER Experiment Name: Zm_Root-Tips_P Parameter: Tissue Value: Root tips vs. Root mid region   Sequence Listing-Misc Features (4)
aacggaggtgctttgagaaatattgagaaagagtatgaagatttcaacagaattttatcttctcagactatagacccattgagagcaatggctatgggtggacccctggaagatgctcgtggtcttgcacagcgctatagcaggatgagacatgaagctgagatcctctctactgaaattgctagaagaaaggcacgggtaagagaagctccaattgctgagcacactacaaagcttcagcaatcagaagctagaatgatagagcacaaagcaagcatggccgtgttagggaaggaagcagcagctgcacttgcagctgtcgagtctcaacagcaacgagtgacccttcagaggctggttggcacggcggaagcagaaaagttattccatctgagattagctgctatacttgatgacgttgaggcagagatgtcctctgagaagcaaaggagagaatctgcaccacctatcatatcttcacataagcgtgctgagaaagctcagtacttccttgctgaggtaatgcataatttcaatggaaccacggagaaggaactgagcttaattgttggcgattatgttgttgttcgtcagattgctcccaacggctgggcggaaggagaatgccgagggaaggctggctggtttccggctgcctatgttgagaggcgcgagaatatccccccgaataaagttttccctcaagtataagatcataagaggggtcatctgtttccactgataagcagtttggtttggcattgaggagctgcaaggctgtatctaacttctgattggtttgatgctccgtatggcgtatcttgtgcatcctatgttcttgtggtggtctagacttggaataagatatgtcggcacgtgctctgcgcctgtgcctgcgcgcacattgatgaagatgtcgctttgcatgtgtccgcagtgtgctactgcttgcggcagcgtaggtcatgttgaatgagctttcctttactgacagatttcgagtgtaaattggttcttgcacttttttttcgttagggtgtatcagtagttctgtacaatatgtttttaatgagaccattcggccatcagagctttgatctgtctcc

SEQ ID NO: 6173 - protein, 236 aa, Zea mays subsp. mays
  peptide (1)..(236): Ceres Seq. ID no. 13493223
  misc_feature (170)..(224): Pfam Name: SH3 domain Pfam Description: SH3 domain
  misc_feature (2)..(235): Homolog of NCBI NO: 22093679 NR Description: putative SH3(Src homology) domain-containing
  misc_feature (2)..(236): Homolog of NCBI NO: 21928139 NR Description: AT4g18060/F15J5_30 [Arabidopsis thaliana]
  misc_feature (2)..(236): Homolog of NCBI NO: 22328762 NR Description: SH3 domain-containing protein 3 [Arabidopsis
  misc_feature (2)..(236): Homolog of NCBI NO: 16974680 NR Description: SH3 domain-containing protein 3 [Arabidopsis
  misc_feature (3)..(160): Homolog of NCBI NO: 38344978 NR Description: OSJNBa0011L07.8 [Oryza sativa (japonica
  misc_feature (169)..(236): Homolog of NCBI NO: 38344978 NR Description: OSJNBa0011L07.8 [Oryza sativa (japonica
  misc_feature (30)..(156): Homolog of NCBI NO: 37535998 NR Description: unknown protein [Oryza sativa (japonica
  misc_feature (165)..(232): Homolog of NCBI NO: 37535998 NR Description: unknown protein [Oryza sativa (japonica
  misc_feature (2)..(161): Homolog of NCBI NO: 15221714 NR Description: SH3 domain-containing protein 1 [Arabidopsis
  misc_feature (164)..(232): Homolog of NCBI NO: 15221714 NR Description: SH3 domain-containing protein 1 [Arabidopsis
NGGALRNIEKEYEDFNRILSSQTIDPLRAMAMGGPLEDARGLAQRYSRMRHEAEILSTEIARRKARVREAPIAEHTTKLQQSEARMIEHKASMAVLGKEAAAALAAVESQQQRVTLQRLVGTAEAEKLFHLRLAAILDDVEAEMSSEKQRRESAPPIISSHKRAEKAQYFLAEVMHNFNGTTEKELSLIVGDYVVVRQIAPNGWAEGECRGKAGWFPAAYVERRENIPPNKVFPQV

SEQ ID NO: 6174 - protein, 207 aa, Zea mays subsp. mays
  peptide (1)..(207): Ceres Seq. ID no. 13493224
  misc_feature (141)..(195): Pfam Name: SH3 domain Pfam Description: SH3 domain
  misc_feature (1)..(206): Homolog of NCBI NO: 22093679 NR Description: putative SH3(Src homology) domain-containing
  misc_feature (1)..(207): Homolog of NCBI NO: 21928139 NR Description: AT4g18060/F15J5_30 [Arabidopsis thaliana]
  misc_feature (1)..(207): Homolog of NCBI NO: 22328762 NR Description: SH3 domain-containing protein 3 [Arabidopsis
  misc_feature (1)..(207): Homolog of NCBI NO: 16974680 NR Description: SH3 domain-containing protein 3 [Arabidopsis
  misc_feature (1)..(131): Homolog of NCBI NO: 38344978 NR Description: OSJNBa0011L07.8 [Oryza sativa (japonica
  misc_feature (140)..(207): Homolog of NCBI NO: 38344978 NR Description: OSJNBa0011L07.8 [Oryza sativa (japonica
  misc_feature (1)..(127): Homolog of NCBI NO: 37535998 NR Description: unknown protein [Oryza sativa (japonica
  misc_feature (136)..(203): Homolog of NCBI NO: 37535998 NR Description: unknown protein [Oryza sativa (japonica
  misc_feature (1)..(132): Homolog of NCBI NO: 15221714 NR Description: SH3 domain-containing protein 1 [Arabidopsis
  misc_feature (135)..(203): Homolog of NCBI NO: 15221714 NR Description: SH3 domain-containing protein 1 [Arabidopsis
MAMGGPLEDARGLAQRYSRMRHEAEILSTEIARRKARVREAPIAEHTTKLQQSEARMIEHKASMAVLGKEAAAALAAVESQQQRVTLQRLVGTAEAEKLFHLRLAAILDDVEAEMSSEKQRRESAPPIISSHKRAEKAQYFLAEVMHNFNGTTEKELSLIVGDYVVVRQIAPNGWAEGECRGKAGWFPAAYVERRENIPPNKVFPQV

SEQ ID NO: 6175 - protein, 205 aa, Zea mays subsp. mays
  peptide (1)..(205): Ceres Seq. ID no. 13493225
  misc_feature (139)..(193): Pfam Name: SH3 domain Pfam Description: SH3 domain
  misc_feature (1)..(204): Homolog of NCBI NO: 22093679 NR Description: putative SH3(Src homology) domain-containing
  misc_feature (1)..(205): Homolog of NCBI NO: 21928139 NR Description: AT4g18060/F15J5_30 [Arabidopsis thaliana]
  misc_feature (1)..(205): Homolog of NCBI NO: 22328762 NR Description: SH3 domain-containing protein 3 [Arabidopsis
  misc_feature (1)..(205): Homolog of NCBI NO: 16974680 NR Description: SH3 domain-containing protein 3 [Arabidopsis
  misc_feature (1)..(129): Homolog of NCBI NO: 38344978 NR Description: OSJNBa0011L07.8 [Oryza sativa (japonica
  misc_feature (138)..(205): Homolog of NCBI NO: 38344978 NR Description: OSJNBa0011L07.8 [Oryza sativa (japonica
  misc_feature (1)..(125): Homolog of NCBI NO: 37535998 NR Description: unknown protein [Oryza sativa (japonica
  misc_feature (134)..(201): Homolog of NCBI NO: 37535998 NR Description: unknown protein [Oryza sativa (japonica
  misc_feature (1)..(130): Homolog of NCBI NO: 15221714 NR Description: SH3 domain-containing protein 1 [Arabidopsis
  misc_feature (133)..(201): Homolog of NCBI NO: 15221714 NR Description: SH3 domain-containing protein 1 [Arabidopsis
MGGPLEDARGLAQRYSRMRHEAEILSTEIARRKARVREAPIAEHTTKLQQSEARMIEHKASMAVLGKEAAAALAAVESQQQRVTLQRLVGTAEAEKLFHLRLAAILDDVEAEMSSEKQRRESAPPIISSHKRAEKAQYFLAEVMHNFNGTTEKELSLIVGDYVVVRQIAPNGWAEGECRGKAGWFPAAYVERRENIPPNKVFPQV

SEQ ID NO: 6176 - DNA, 1506 bp, Zea mays subsp. mays
  misc_feature (1)..(1506): Ceres Seq. ID no. 12386913
  misc_feature: MA Experiment ID: 108528 Result: Down-regulated in Transcription
  misc_feature: MA Experiment 108528 PARAMETER Experiment Name: Zm_Imbibed_Seeds_P Parameter: Age (day) Value: 5 vs. 2
  misc_feature: MA Experiment 108528 PARAMETER Experiment Name: Zm_Imbibed_Seeds_P Parameter: Organism Value: Zea mays
  misc_feature: MA Experiment 108528 PARAMETER Experiment Name: Zm_Imbibed_Seeds_P Parameter: Plant Line Value: 35A19
  misc_feature: MA Experiment 108528 PARAMETER Experiment Name: Zm_Imbibed_Seeds_P Parameter: Tissue Value: Aerial vs. Embryo
  misc_feature: MA Experiment ID: 108530 Result: Down-regulated in Transcription
  misc_feature: MA Experiment 108530 PARAMETER Experiment Name: Zm_Imbibed_Seeds_P Parameter: Age (day) Value: 6 vs. 2
  misc_feature: MA Experiment 108530 PARAMETER Experiment Name: Zm_Imbibed_Seeds_P Parameter: Organism Value: Zea mays
  misc_feature: MA Experiment 108530 PARAMETER Experiment Name: Zm_Imbibed_Seeds_P Parameter: Plant Line Value: 35A19
  misc_feature: MA Experiment 108530 PARAMETER Experiment Name: Zm_Imbibed_Seeds_P Parameter: Tissue Value: Aerial vs. Embryo
  misc_feature: MA Experiment ID: 108535 Result: Up-regulated in Transcription
  misc_feature: MA Experiment 108535 PARAMETER Experiment Name: Zm_Meristem_P Parameter: Age (day) Value: 8
  misc_feature: MA Experiment 108535 PARAMETER Experiment Name: Zm_Meristem_P Parameter: Organism Value: Zea mays
  misc_feature: MA Experiment 108535 PARAMETER Experiment Name: Zm_Meristem_P Parameter: Plant Line Value: 35A19
  misc_feature: MA Experiment 108535 PARAMETER Experiment Name: Zm_Meristem_P Parameter: Tissue Value: Root Meristem vs. Above Root Meristem
  misc_feature: MA Experiment ID: 108536 Result: Up-regulated in Transcription
  misc_feature: MA Experiment 108536 PARAMETER Experiment Name: Zm_Meristem_P Parameter: Age (day) Value: 8
  misc_feature: MA Experiment 108536 PARAMETER Experiment Name: Zm_Meristem_P Parameter: Organism Value: Zea mays
  misc_feature: MA Experiment 108536 PARAMETER Experiment Name: Zm_Meristem_P Parameter: Plant Line Value: 35A19
  misc_feature: MA Experiment 108536 PARAMETER Experiment Name: Zm_Meristem_P Parameter: Tissue Value: Shoot Meristem vs. Above Shoot Meristem
  misc_feature: MA Experiment ID: 108544 Result: Down-regulated in Transcription
  misc_feature: MA Experiment ID: 108545 Result: Down-regulated in Transcription
  misc_feature: MA Experiment 108545 PARAMETER Experiment Name: Zm_Imbibed_Seeds_P Parameter: Age (day) Value: 3 vs. 2
  misc_feature: MA Experiment 108545 PARAMETER Experiment Name: Zm_Imbibed_Seeds_P Parameter: Organism Value: Zea mays
  misc_feature: MA Experiment 108545 PARAMETER Experiment Name: Zm_Imbibed_Seeds_P Parameter: Plant Line Value: 35A19
  misc_feature: MA Experiment 108545 PARAMETER Experiment Name: Zm_Imbibed_Seeds_P Parameter: Tissue Value: Aerial vs. Embryo
  misc_feature: MA Experiment ID: 108547 Result: Down-regulated in Transcription
  misc_feature: MA Experiment 108547 PARAMETER Experiment Name: Zm_Imbibed_Seeds_P Parameter: Age (day) Value: 4 vs. 2
  misc_feature: MA Experiment 108547 PARAMETER Experiment Name: Zm_Imbibed_Seeds_P Parameter: Organism Value: Zea mays
  misc_feature: MA Experiment 108547 PARAMETER Experiment Name: Zm_Imbibed_Seeds_P Parameter: Plant Line Value: 35A19
  misc_feature: MA Experiment 108547 PARAMETER Experiment Name: Zm_Imbibed_Seeds_P Parameter: Tissue Value: Aerial vs. Embryo
  misc_feature: MA Experiment ID: 108556 Result: Down-regulated in Transcription
  misc_feature: MA Experiment 108556 PARAMETER Experiment Name: Zm_Drought_P Parameter: Age (day) Value: 9
  misc_feature: MA Experiment 108556 PARAMETER Experiment Name: Zm_Drought_P Parameter: Organism Value: Zea mays
  misc_feature: MA Experiment 108556 PARAMETER Experiment Name: Zm_Drought_P Parameter: Plant Line Value: 35A19
  misc_feature: MA Experiment 108556 PARAMETER Experiment Name: Zm_Drought_P Parameter: Timepoint (hr) Value: 24
  misc_feature: MA Experiment 108556 PARAMETER Experiment Name: Zm_Drought_P Parameter: Tissue Value: Aerial
  misc_feature: MA Experiment 108556 PARAMETER Experiment Name: Zm_Drought_P Parameter: Treatment Value: Drought vs. No Drought
  misc_feature: MA Experiment ID: 108597 Result: Down-regulated in Transcription
  misc_feature: MA Experiment 108597 PARAMETER Experiment Name: Zm_100uM_ABA_P Parameter: Age (day) Value: 9
  misc_feature: MA Experiment 108597 PARAMETER Experiment Name: Zm_100uM_ABA_P Parameter: Organism Value: Zea mays
  misc_feature: MA Experiment 108597 PARAMETER Experiment Name: Zm_100uM_ABA_P Parameter: Plant Line Value: 35A19
  misc_feature: MA Experiment 108597 PARAMETER Experiment Name: Zm_100uM_ABA_P Parameter: Timepoint (hr) Value: 24
  misc_feature: MA Experiment 108597 PARAMETER Experiment Name: Zm_100uM_ABA_P Parameter: Tissue Value: Aerial
  misc_feature: MA Experiment 108597 PARAMETER Experiment Name: Zm_100uM_ABA_P Parameter: Treatment Value: 100uM ABA vs. No Treatment
  misc_feature: MA Experiment ID: 108689 Result: Down-regulated in Transcription
  misc_feature: MA Experiment 108689 PARAMETER Experiment Name: Zm_Drought_Roots_P Parameter: Age (day) Value: 9
  misc_feature: MA Experiment 108689 PARAMETER Experiment Name: Zm_Drought_Roots_P Parameter: Organism Value: Zea mays
  misc_feature: MA Experiment 108689 PARAMETER Experiment Name: Zm_Drought_Roots_P Parameter: Plant Line Value: 35A19
  misc_feature: MA Experiment 108689 PARAMETER Experiment Name: Zm_Drought_Roots_P Parameter: Timepoint (hr) Value: 24
  misc_feature: MA Experiment 108689 PARAMETER Experiment Name: Zm_Drought_Roots_P Parameter: Tissue Value: Roots
  misc_feature: MA Experiment 108689 PARAMETER Experiment Name: Zm_Drought_Roots_P Parameter: Treatment Value: Drought vs. No Drought
  misc_feature: MA Experiment ID: 20000477 Result: Down-regulated in Transcription
  misc_feature: MA Experiment 20000477 PARAMETER Experiment Name: Zm_5mM_SA_P Parameter: Age (day) Value: 10
  misc_feature: MA Experiment 20000477 PARAMETER Experiment Name: Zm_5mM_SA_P Parameter: Organism Value: Zea mays
  misc_feature: MA Experiment 20000477 PARAMETER Experiment Name: Zm_5mM_SA_P Parameter: Plant Line Value: 35A19
  misc_feature: MA Experiment 20000477 PARAMETER Experiment Name: Zm_5mM_SA_P Parameter: Timepoint (hr) Value: 48
  misc_feature: MA Experiment 20000477 PARAMETER Experiment Name: Zm_5mM_SA_P Parameter: Tissue Value: Aerial
  misc_feature: MA Experiment 20000477 PARAMETER Experiment Name: Zm_5mM_SA_P Parameter: Treatment Value: 5mM SA vs. No Treatment
  misc_feature: MA Experiment ID: 20000478 Result: Down-regulated in Transcription
  misc_feature: MA Experiment 20000478 PARAMETER Experiment Name: Zm_5mM_SA_P Parameter: Age (day) Value: 11
  misc_feature: MA Experiment 20000478 PARAMETER Experiment Name: Zm_5mM_SA_P Parameter: Organism Value: Zea mays
  misc_feature: MA Experiment 20000478 PARAMETER Experiment Name: Zm_5mM_SA_P Parameter: Plant Line Value: 35A19
  misc_feature: MA Experiment 20000478 PARAMETER Experiment Name: Zm_5mM_SA_P Parameter: Timepoint (hr) Value: 72
  misc_feature: MA Experiment 20000478 PARAMETER Experiment Name: Zm_5mM_SA_P Parameter: Tissue Value: Aerial
  misc_feature: MA Experiment 20000478 PARAMETER Experiment Name: Zm_5mM_SA_P Parameter: Treatment Value: 5mM SA vs. No Treatment
  misc_feature: MA Experiment ID: 20000479 Result: Down-regulated in Transcription
  misc_feature: MA Experiment 20000479 PARAMETER Experiment Name: Zm_Drought_P Parameter: Age (day) Value: 10
  misc_feature: MA Experiment 20000479 PARAMETER Experiment Name: Zm_Drought_P Parameter: Organism Value: Zea mays
  misc_feature: MA Experiment 20000479 PARAMETER Experiment Name: Zm_Drought_P Parameter: Plant Line Value: 35A19
  misc_feature: MA Experiment 20000479 PARAMETER Experiment Name: Zm_Drought_P Parameter: Timepoint (hr) Value: 48
  misc_feature: MA Experiment 20000479 PARAMETER Experiment Name: Zm_Drought_P Parameter: Tissue Value: Aerial
  misc_feature: MA Experiment 20000479 PARAMETER Experiment Name: Zm_Drought_P Parameter: Treatment Value: Drought vs. No Drought
  misc_feature: MA Experiment ID: 20000480 Result: Down-regulated in Transcription
  misc_feature: MA Experiment 20000480 PARAMETER Experiment Name: Zm_Drought_P Parameter: Age (day) Value: 11
  misc_feature: MA Experiment 20000480 PARAMETER Experiment Name: Zm_Drought_P Parameter: Organism Value: Zea mays
  misc_feature: MA Experiment 20000480 PARAMETER Experiment Name: Zm_Drought_P Parameter: Plant Line Value: 35A19
  misc_feature: MA Experiment 20000480 PARAMETER Experiment Name: Zm_Drought_P Parameter: Timepoint (hr) Value: 72
  misc_feature: MA Experiment 20000480 PARAMETER Experiment Name: Zm_Drought_P Parameter: Tissue Value: Aerial
  misc_feature: MA Experiment 20000480 PARAMETER Experiment Name: Zm_Drought_P Parameter: Treatment Value: Drought vs. No Drought
  misc_feature: MA Experiment ID: 20000534 Result: Down-regulated in Transcription
  misc_feature: MA Experiment 20000534 PARAMETER Experiment Name: Zm_Hybrid_Pollen_P Parameter: Age (day) Value: 8
  misc_feature: MA Experiment 20000534 PARAMETER Experiment Name: Zm_Hybrid_Pollen_P Parameter: Organism Value: Zea mays
  misc_feature: MA Experiment 20000534 PARAMETER Experiment Name: Zm_Hybrid_Pollen_P Parameter: Plant Line Value: 35A19
  misc_feature: MA Experiment 20000534 PARAMETER Experiment Name: Zm_Hybrid_Pollen_P Parameter: Tissue Value: Pollen vs. Aerial
  misc_feature: MA Experiment ID: 20000535 Result: Up-regulated in Transcription
  misc_feature: MA Experiment 20000535 PARAMETER Experiment Name: Zm_Hybrid_Seed_Dev_P Parameter: DAP Value: 30 vs. 12
  misc_feature: MA Experiment 20000535 PARAMETER Experiment Name: Zm_Hybrid_Seed_Dev_P Parameter: Organism Value: Zea mays
  misc_feature: MA Experiment 20000535 PARAMETER Experiment Name: Zm_Hybrid_Seed_Dev_P Parameter: Plant Line Value: 35A19
  misc_feature: MA Experiment 20000535 PARAMETER Experiment Name: Zm_Hybrid_Seed_Dev_P Parameter: Tissue Value: Embryo vs. Unfert Floret
actacataggtgccggactcgtcccagcgaagaaccggacgagcgagcaagaggcctcctcctcaagcttcgaatcctccccttccgcgctttccctccccctcctcctcctcccctttccagtccccaccccagcgaagcttccaaagccgccccaaccccaacggccgcccggcctgatcgagcagacagctgccgcggccctccccgccccgcacgcgacctcggagccatggagaagtacgagctgctgaaggacatcggcgccggcaacttcggcgtggcgcggctcatgcggaacaaggagaccaaggagctggtcgccatgaagtacatcccccggggccaaaagatcgacgagaatgtggcgagggagatcatcaaccaccgctcgctgcgccaccccaacatcatccggttcaaggaggtggtgctgacgccgacgcacctggcgatcgtgatggagtacgccgccggcggcgagctgttcgaccggatctgcaacgccgggaggttcagcgaggacgaggcgaggtacttcttccagcagctgatttgtggcgtcagctactgccactccatgcaaatctgccaccgagacttgaagctggagaacacgctgctggacggcagcccggcgcctcgcctcaagatctgcgacttcggttactccaagtcgtcgctgctgcactcgaagcccaagtcgacggtcggcacgccgggcgtacatcgcccccgaggtgctctcccgccggggaatacgacggcaagacagccgatgtgtggtcctgtggagtcactctttatgtgatgctggtcggtggttacccttttgaggacccagacgacccaaagaatttcagaaagacgatcgggaggatcatgtcaatccaatacaaaataccagagtatgtgcacgtgtcgcaagactgcaaggagctgctttcaaggatctttgttgcaaactctgcaaagagaataacgatcagggagatcaggaaccacccctggttcctgaagaacctgcccagagagctcacggaggctgcgcaggccatgtactacaagaaagacaacagcgccccgacctactccgtccagtccgtggaggagatcatgaagatcgtggagaaggcgcggacgccgcctccttcctccacccctgtggctggcttcggttgggcggaggaggacgagcaggaggacagcaaggaaccagacgaggaacacgaggacggcgaggacgagtacgagaagcaggtgaagcaagtccacgccagcggggagtttcatctcagctgctgatggttttcgccggcctgctagtctgtggtaccagccgatgatggacctgctagtctgtggtcttgtttccaagttttctttcattttttctttcttttgctgtggtgccgcaagactgcaacagttgtaaattattgaagggggttccagcgttgcccttgtattgactgattcaaactagcatggggaacatgattatgg

SEQ ID NO: 6177 - protein, 269 aa, Zea mays subsp. mays
  peptide (1)..(269): Ceres Seq. ID no. 12386914
  misc_feature (81)..(245): Pfam Name: Protein kinase domain Pfam Description: Protein kinase domain
  misc_feature (78)..(245): Homolog of NCBI NO: 19568098 NR Description: osmotic stress-activated protein kinase
LHRCRTRPSEEPDERARGLLLKLRILPFRAFPPPPPPPLSSPHPSEASKAAPTPTAARPDRADSCRGPPRPARDLGAMEKYELLKDIGAGNFGVARLMRNKETKELVAMKYIPRGQKIDENVAREIINHRSLRHPNIIRFKEVVLTPTHLAIVMEYAAGGELFDRICNAGRFSEDEARYFFQQLICGVSYCHSMQICHRDLKLENTLLDGSPAPRLKICDFGYSKSSLLHSKPKSTVGTPGVHRPRGALPPGNTTARQPMCGPVESLFM

SEQ ID NO: 6178 - protein, 192 aa, Zea mays subsp. mays
  peptide (1)..(192): Ceres Seq. ID no. 12386915
  misc_feature (4)..(168): Pfam Name: Protein kinase domain Pfam Description: Protein kinase domain
  misc_feature (1)..(168): Homolog of NCBI NO: 19568098 NR Description: osmotic stress-activated protein kinase
MEKYELLKDIGAGNFGVARLMRNKETKELVAMKYIPRGQKIDENVAREIINHRSLRHPNIIRFKEVVLTPTHLAIVMEYAAGGELFDRICNAGRFSEDEARYFFQQLICGVSYCHSMQICHRDLKLENTLLDGSPAPRLKICDFGYSKSSLLHSKPKSTVGTPGVHRPRGALPPGNTTARQPMCGPVESLFM

SEQ ID NO: 6179 - protein, 172 aa, Zea mays subsp. mays
  peptide (1)..(172): Ceres Seq. ID no. 12386916
  misc_feature (1)..(148): Pfam Name: Protein kinase domain Pfam Description: Protein kinase domain
  misc_feature (1)..(148): Homolog of NCBI NO: 19568098 NR Description: osmotic stress-activated protein kinase
MRNKETKELVAMKYIPRGQKIDENVAREIINHRSLRHPNIIRFKEVVLTPTHLAIVMEYAAGGELFDRICNAGRFSEDEARYFFQQLICGVSYCHSMQICHRDLKLENTLLDGSPAPRLKICDFGYSKSSLLHSKPKSTVGTPGVHRPRGALPPGNTTARQPMCGPVESLFM

SEQ ID NO: 6180 - DNA, 1336 bp, Zea mays subsp. mays
  misc_feature (1)..(1336): Ceres Seq. ID no. 12365588
  misc_feature: MA Experiment ID: 108522 Result: Up-regulated in Transcription
  misc_feature: MA Experiment 108522 PARAMETER Experiment Name: Zm_42deg_Heat_P Parameter: Age (day) Value: 8
  misc_feature: MA Experiment 108522 PARAMETER Experiment Name: Zm_42deg_Heat_P Parameter: Organism Value: Zea mays
  misc_feature: MA Experiment 108522 PARAMETER Experiment Name: Zm_42deg_Heat_P Parameter: Plant Line Value: 35A19
  misc_feature: MA Experiment 108522 PARAMETER Experiment Name: Zm_42deg_Heat_P Parameter: Temperature (deg C) Value: 42 vs. 22
  misc_feature: MA Experiment 108522 PARAMETER Experiment Name: Zm_42deg_Heat_P Parameter: Timepoint (hr) Value: 1
  misc_feature: MA Experiment 108522 PARAMETER Experiment Name: Zm_42deg_Heat_P Parameter: Tissue Value: Aerial
  misc_feature: MA Experiment ID: 108689 Result: Up-regulated in Transcription
  misc_feature: MA Experiment 108689 PARAMETER Experiment Name: Zm_Drought_Roots_P Parameter: Age (day) Value: 9
  misc_feature: MA Experiment 108689 PARAMETER Experiment Name: Zm_Drought_Roots_P Parameter: Organism Value: Zea mays
  misc_feature: MA Experiment 108689 PARAMETER Experiment Name: Zm_Drought_Roots_P Parameter: Plant Line Value: 35A19
  misc_feature: MA Experiment 108689 PARAMETER Experiment Name: Zm_Drought_Roots_P Parameter: Timepoint (hr) Value: 24
  misc_feature: MA Experiment 108689 PARAMETER Experiment Name: Zm_Drought_Roots_P Parameter: Tissue Value: Roots
  misc_feature: MA Experiment 108689 PARAMETER Experiment Name: Zm_Drought_Roots_P Parameter: Treatment Value: Drought vs. No Drought
  misc_feature: MA Experiment ID: 20000534 Result: Down-regulated in Transcription
  misc_feature: MA Experiment 20000534 PARAMETER Experiment Name: Zm_Hybrid_Pollen_P Parameter: Age (day) Value: 8
  misc_feature: MA Experiment 20000534 PARAMETER Experiment Name: Zm_Hybrid_Pollen_P Parameter: Organism Value: Zea mays
  misc_feature: MA Experiment 20000534 PARAMETER Experiment Name: Zm_Hybrid_Pollen_P Parameter: Plant Line Value: 35A19
  misc_feature: MA Experiment 20000534 PARAMETER Experiment Name: Zm_Hybrid_Pollen_P Parameter: Tissue Value: Pollen vs. Aerial
  misc_feature: MA Experiment ID: 20000535 Result: Up-regulated in Transcription
  misc_feature: MA Experiment 20000535 PARAMETER Experiment Name: Zm_Hybrid_Seed_Dev_P Parameter: DAP Value: 30 vs. 12
  misc_feature: MA Experiment 20000535 PARAMETER Experiment Name: Zm_Hybrid_Seed_Dev_P Parameter: Organism Value: Zea mays
  misc_feature: MA Experiment 20000535 PARAMETER Experiment Name: Zm_Hybrid_Seed_Dev_P Parameter: Plant Line Value: 35A19
  misc_feature: MA Experiment 20000535 PARAMETER Experiment Name: Zm_Hybrid_Seed_Dev_P Parameter: Tissue Value: Embryo vs. Unfert Floret
aaaaaaccctagcccgacccctcctcctccacctgcgccaccgcccaccatgagctccgccgccgcgccagctgccgtcggcagcggcaaggagcttgccaacccgcccgccgacgggatcaccaacctccgcttctccaaccacagcaacaacctcctcgtctcctcatgggacaagacggtgcggctctacgacgccgacgccaacgtgctcaagggggagttcatgcaccccggggccgtcctcgactgctgcttccacgacgactcctcgggctttagcgccggagccgaccacaccgtgcggaggttggtatttagctcgtccaaggaagatgttttggggcggcatgatggtccagttcgttgcgtggaatactcttatgctgcaggtcaagtcatcaccggcagctgggataaaactgtaaaatgctgggatccaagaggagttagtggaccagagcgcacccttgttgggacatatgctcaacctgaacgtgtatattctctttcgttagtaggaaataggttggttgttgcaacagctggaagacatgtaaatatttatgatctgcgcaatatgtctcaacctgagcaaaaaagagactcttctttgaaatatcaaacacgatgtgttcgatgttttcccaacggaacaggatatgctcttagttctgttgaagggcgagtttctatggaattctttgatctatctgagtctgctcaatctaaaaagtatgctttcaagtgtcatcggaaatctgaggccggcagggacaccgtctatcctgtcaatgcaattgctttccatcccatatatggaacatttgccaccggagggtgtgatggatttgtgaatgtgtgggatggcattaacaagaaaagactatatcagtactcgaagtacgcatcaagcatcgctgctctatcattcagtaaggatgggcatctgcttgctgtggcatccagctacacttatgaagagggagaaaaaacgcatgagcctgacgctatatttatccggacagtgaatgaagtcgaggtgaagccgaagcccaaggcactggcagccccccagtagtgctgtgacctgttctggaggctagatgacccgtacttctctgcgttgatgtcaattacattagttgaccgagtgcttgtttgtgttgaaagagctgaaacgcctgtttcttaatctggaaccctcttctcccgttttacttgtccgtggaaacatttcatgttccagctggttgtatattccgaaacagaccatgtttaagttcattcggttcttcgttgacttaagttatttatcaaatatttaagtatcgtg

SEQ ID NO: 6181 - protein, 359 aa, Zea mays subsp. mays
  peptide (1)..(359): Ceres Seq. ID no. 12365589
  misc_feature (28)..(358): Homolog of NCBI NO: 18402300 NR Description: mitotic checkpoint protein, putative; protein id:
  misc_feature (29)..(358): Homolog of NCBI NO: 15222841 NR Description: mitotic checkpoint protein, putative; protein id: [Arabidopsis thaliana] >gi|12597855|gb|AAG60165.1|AC074110_3
  misc_feature (9)..(353): Homolog of NCBI NO: 28564814 NR Description: putative mitotic checkpoint protein [Oryza sativa
  misc_feature (29)..(271): Homolog of NCBI NO: 12323596 NR Description: mitotic checkpoint protein, 3' partial;
  misc_feature (27)..(351): Homolog of NCBI NO: 4757880 NR Description: BUB3 budding uninhibited by benzimidazoles 3 mitotic checkpoint component; BUB3 (budding uninhibited by
  misc_feature (27)..(351): Homolog of NCBI NO: 3986296 NR Description: mitotic checkpoint [Xenopus laevis]
  misc_feature (27)..(351): Homolog of NCBI NO: 13122448 NR Description: WD repeat protein Bub3 [Xenopus laevis]
  misc_feature (31)..(351): Homolog of NCBI NO: 37362190 NR Description: BUB3 budding uninhibited by benzimidazoles 3-like
  misc_feature (35)..(351): Homolog of NCBI NO: 39591225 NR Description: Hypothetical protein CBG20696 [Caenorhabditis
  misc_feature (31)..(278): Homolog of NCBI NO: 21428470 NR Description: LD23540p [Drosophila melanogaster]
KNPSPTPPPPPAPPPTMSSAAAPAAVGSGKELANPPADGITNLRFSNHSNNLLVSSWDKTVRLYDADANVLKGEFMHPGAVLDCCFHDDSSGFSAGADHTVRRLVFSSSKEDVLGRHDGPVRCVEYSYAAGQVITGSWDKTVKCWDPRGVSGPERTLVGTYAQPERVYSLSLVGNRLVVATAGRHVNIYDLRNMSQPEQKRDSSLKYQTRCVRCFPNGTGYALSSVEGRVSMEFFDLSESAQSKKYAFKCHRKSEAGRDTVYPVNAIAFHPIYGTFATGGCDGFVNVWDGINKKRLYQYSKYASSIAALSFSKDGHLLAVASSYTYEEGEKTHEPDAIFIRTVNEVEVKPKPKALAAPQ

SEQ ID NO: 6182 - protein, 343 aa, Zea mays subsp. mays; identical to SEQ ID NO: 4727
  peptide (1)..(343): Ceres Seq. ID no. 12365590
  misc_feature (12)..(342): Homolog of NCBI NO: 18402300 NR Description: mitotic checkpoint protein, putative; protein id:
  misc_feature (13)..(342): Homolog of NCBI NO: 15222841 NR Description: mitotic checkpoint protein, putative; protein id: [Arabidopsis thaliana] >gi|12597855|gb|AAG60165.1|AC074110_3
  misc_feature (1)..(337): Homolog of NCBI NO: 28564814 NR Description: putative mitotic checkpoint protein [Oryza sativa
  misc_feature (13)..(255): Homolog of NCBI NO: 12323596 NR Description: mitotic checkpoint protein, 3' partial;
  misc_feature (11)..(335): Homolog of NCBI NO: 4757880 NR Description: BUB3 budding uninhibited by benzimidazoles 3 mitotic checkpoint component; BUB3 (budding uninhibited by
  misc_feature (11)..(335): Homolog of NCBI NO: 3986296 NR Description: mitotic checkpoint [Xenopus laevis]
  misc_feature (11)..(335): Homolog of NCBI NO: 13122448 NR Description: WD repeat protein Bub3 [Xenopus laevis]
  misc_feature (15)..(335): Homolog of NCBI NO: 37362190 NR Description: BUB3 budding uninhibited by benzimidazoles 3-like
  misc_feature (19)..(335): Homolog of NCBI NO: 39591225 NR Description: Hypothetical protein CBG20696 [Caenorhabditis
  misc_feature (15)..(262): Homolog of NCBI NO: 21428470 NR Description: LD23540p [Drosophila melanogaster]

SEQ ID NO: 6183 - protein, 284 aa, Zea mays subsp. mays; identical to SEQ ID NO: 4728
  peptide (1)..(284): Ceres Seq. ID no. 12365591
  misc_feature (1)..(283): Homolog of NCBI NO: 18402300 NR Description: mitotic checkpoint protein, putative; protein id:
  misc_feature (1)..(283): Homolog of NCBI NO: 15222841 NR Description: mitotic checkpoint protein, putative; protein id: [Arabidopsis thaliana] >gi|12597855|gb|AAG60165.1|AC074110_3
  misc_feature (1)..(278): Homolog of NCBI NO: 28564814 NR Description: putative mitotic checkpoint protein [Oryza sativa
  misc_feature (1)..(196): Homolog of NCBI NO: 12323596 NR Description: mitotic checkpoint protein, 3' partial;
  misc_feature (1)..(276): Homolog of NCBI NO: 4757880 NR Description: BUB3 budding uninhibited by benzimidazoles 3 mitotic checkpoint component; BUB3 (budding uninhibited by
  misc_feature (1)..(276): Homolog of NCBI NO: 3986296 NR Description: mitotic checkpoint [Xenopus laevis]
  misc_feature (1)..(276): Homolog of NCBI NO: 13122448 NR Description: WD repeat protein Bub3 [Xenopus laevis]
  misc_feature (1)..(276): Homolog of NCBI NO: 37362190 NR Description: BUB3 budding uninhibited by benzimidazoles 3-like
  misc_feature (1)..(276): Homolog of NCBI NO: 39591225 NR Description: Hypothetical protein CBG20696 [Caenorhabditis
  misc_feature (1)..(203): Homolog of NCBI NO: 21428470 NR Description: LD23540p [Drosophila melanogaster]

SEQ ID NO: 6184 - DNA, 814 bp, Zea mays subsp. mays
  misc_feature (1)..(814): Ceres Seq. ID no. 12594699
  misc_feature: MA Experiment ID: 108544 Result: Down-regulated in Transcription
  misc_feature: MA Experiment ID: 20000535 Result: Up-regulated in Transcription
  misc_feature: MA Experiment 20000535 PARAMETER Experiment Name: Zm_Hybrid_Seed_Dev_P Parameter: DAP Value: 30 vs. 12
  misc_feature: MA Experiment 20000535 PARAMETER Experiment Name: Zm_Hybrid_Seed_Dev_P Parameter: Organism Value: Zea mays
  misc_feature: MA Experiment 20000535 PARAMETER Experiment Name: Zm_Hybrid_Seed_Dev_P Parameter: Plant Line Value: 35A19
  misc_feature: MA Experiment 20000535 PARAMETER Experiment Name: Zm_Hybrid_Seed_Dev_P Parameter: Tissue Value: Embryo vs. Unfert Floret
aacaacaagacagagagatacccgatcgccaccgccgaccggactcccctcaaaggcggccacagcacagcgagcatgggagaccggcatcagcatgggcctggcagcggcgtggaggacccggcgacgctggtgcggcggggtgcagacccgcgcgcccaactcgacgcaggtggtggggttcctgacgctgctcgtctctggcgccgtgctgctgctgctgacgggggtgacgctgacgggcgccgtggtggcgctcgtcttcctgggccccatcgcgctgctcaccagccccatctgggtgcccgtcgccgtcgtgatctccgccatcgtcgccgccgcgctccccgtggccacctggatgtaccgctacttcacgggccgccaccccgtgggcgccgaccgggtggactacgcgcgcagccggatcgccgacaccgccagccacgtcaaggactacgcgcgcgagtacggcggatacctgcgcacccgcgccaaggacgccgcgcccggcgcgtaggcgcgcgccgcccggcgtgcatgtgctgcaacccccgtccgtggtgccgctagctataggtcatcgctgctgtcgtcgtcgtcgtcttagttcctcttgcattgcgtgtgcgtactctgctccaatcatcccccgcccgtgtcgtcaagcaatttctggtcctcttgcttgctttctctaggagatgctgttcatttcgatctcttggcgcaatttgatctttcgcttggtgtaattaggtcattagttaaatcataagagagactcgtgttcgtggtctttctcacaaccttg

SEQ ID NO: 6185 - protein, 190 aa, Zea mays subsp. mays
  peptide (1)..(190): Ceres Seq. ID no. 12594700
NNKTERYPIATADRTPLKGGHSTASMGDRHQHGPGSGVEDPATLVRRGADPRAQLDAGGGVPDAARLWRRAAAADGGDADGRRGGARLPGPHRAAHQPHLGARRRRDLRHRRRRAPRGHLDVPLLHGPPPRGRRPGGLRAQPDRRHRQPRQGLRARVRRIPAHPRQGRRARRVGARRPACMCCNPRPWCR

SEQ ID NO: 6186 - protein, 172 aa, Zea mays subsp. mays
  peptide (1)..(172): Ceres Seq. ID no. 12594701
  misc_feature (55)..(160): Pfam Name: Oleosin Pfam Description: Oleosin
  misc_feature (48)..(172): Homolog of NCBI NO: 15229674 NR Description: oleosin; protein id: At3g18570.1 [Arabidopsis >gi|9294318|dbj|BAB02215.1| gene_id:K24M9.6~unknown protein thaliana] >gi|28393393|gb|AAO42120.1| putative oleosin
  misc_feature (48)..(172): Homolog of NCBI NO: 15222021 NR Description: oleosin; protein id: At1g48990.1 [Arabidopsis
  misc_feature (52)..(172): Homolog of NCBI NO: 21311555 NR Description: 15.8 kDa oleosin [Theobroma cacao]
  misc_feature (52)..(153): Homolog of NCBI NO: 15225211 NR Description: oleosin; protein id: At2g25890.1 [Arabidopsis
  misc_feature (52)..(153): Homolog of NCBI NO: 27754701 NR Description: putative oleosin protein [Arabidopsis thaliana]
  misc_feature (48)..(158): Homolog of NCBI NO: 7442009 NR Description: oleosin-like protein, salt stress-induced - sweet
  misc_feature (53)..(158): Homolog of NCBI NO: 29170509 NR Description: oleosin [Corylus avellana]
  misc_feature (49)..(157): Homolog of NCBI NO: 5381321 NR Description: 15 kDa oleosin [Sesamum indicum]
  misc_feature (46)..(158): Homolog of NCBI NO: 2119749 NR Description: oleosin - almond
  misc_feature (46)..(158): Homolog of NCBI NO: 3914199 NR Description: OLEOSIN 1 >gi|460803|emb|CAA55008.1| oleosin
TTRQRDTRSPPPTGLPSKAATAQRAWETGISMGLAAAWRTRRRWCGGVQTRAPNSTQVVGFLTLLVSGAVLLLLTGVTLTGAVVALVFLGPIALLTSPIWVPVAVVISAIVAAALPVATWMYRYFTGRHPVGADRVDYARSRIADTASHVKDYAREYGGYLRTRAKDAAPGA

SEQ ID NO: 6187 - protein, 165 aa, Zea mays subsp. mays
  peptide (1)..(165): Ceres Seq. ID no. 12594702
MGDRHQHGPGSGVEDPATLVRRGADPRAQLDAGGGVPDAARLWRRAAAADGGDADGRRGGARLPGPHRAAHQPHLGARRRRDLRHRRRRAPRGHLDVPLLHGPPPRGRRPGGLRAQPDRRHRQPRQGLRARVRRIPAHPRQGRRARRVGARRPACMCCNPRPWCR

SEQ ID NO: 6188 - protein, 141 aa, Zea mays subsp. mays
  peptide (1)..(141): Ceres Seq. ID no. 12594703
  misc_feature (24)..(129): Pfam Name: Oleosin Pfam Description: Oleosin
  misc_feature (17)..(141): Homolog of NCBI NO: 15229674 NR Description: oleosin; protein id: At3g18570.1 [Arabidopsis >gi|9294318|dbj|BAB02215.1| gene_id:K24M9.6~unknown protein thaliana] >gi|28393393|gb|AAO42120.1| putative oleosin
  misc_feature (17)..(141): Homolog of NCBI NO: 15222021 NR Description: oleosin; protein id: At1g48990.1 [Arabidopsis
  misc_feature (21)..(141): Homolog of NCBI NO: 21311555 NR Description: 15.8 kDa oleosin [Theobroma cacao]
  misc_feature (21)..(122): Homolog of NCBI NO: 15225211 NR Description: oleosin; protein id: At2g25890.1 [Arabidopsis
  misc_feature (21)..(122): Homolog of NCBI NO: 27754701 NR Description: putative oleosin protein [Arabidopsis thaliana]
  misc_feature (17)..(127): Homolog of NCBI NO: 7442009 NR Description: oleosin-like protein, salt stress-induced - sweet
  misc_feature (22)..(127): Homolog of NCBI NO: 29170509 NR Description: oleosin [Corylus avellana]
  misc_feature (18)..(126): Homolog of NCBI NO: 5381321 NR Description: 15 kDa oleosin [Sesamum indicum]
  misc_feature (15)..(127): Homolog of NCBI NO: 2119749 NR Description: oleosin - almond
  misc_feature (15)..(127): Homolog of NCBI NO: 3914199 NR Description: OLEOSIN 1 >gi|460803|emb|CAA55008.1| oleosin
MGLAAAWRTRRRWCGGVQTRAPNSTQVVGFLTLLVSGAVLLLLTGVTLTGAVVALVFLGPIALLTSPIWVPVAVVISAIVAAALPVATWMYRYFTGRHPVGADRVDYARSRIADTASHVKDYAREYGGYLRTRAKDAAPGA

SEQ ID NO: 6189 - DNA, 971 bp, Zea mays subsp. mays
  misc_feature (1)..(971): Ceres Seq. ID no. 12363847
  misc_feature: MA Experiment ID: 20000492 Result: Down-regulated in Transcription
  misc_feature: MA Experiment 20000492 PARAMETER Experiment Name: Zm_Hybrid_Seed_Dev_P Parameter: DAP Value: 12
  misc_feature: MA Experiment 20000492 PARAMETER Experiment Name: Zm_Hybrid_Seed_Dev_P Parameter: Organism Value: Zea mays
  misc_feature: MA Experiment 20000492 PARAMETER Experiment Name: Zm_Hybrid_Seed_Dev_P Parameter: Plant Line Value: 35A19
  misc_feature: MA Experiment 20000492 PARAMETER Experiment Name: Zm_Hybrid_Seed_Dev_P Parameter: Tissue Value: Fert Kernel vs. Unfert Floret
attccatccccgctgccccatccggccatcccacagcgaatctcccaaaccccggctccctcgattcccaatcccacccctgccacgaagagatcagatgacggcgagctgctgctgatcgagtgcagtggaatcggaggcgatgcgggctagccggccggcggtgcaccctgtggaagcggcccctccgccgccggccgcggcggcggaggggccggaggcccaggtggagggtgccgcgcacccgcgcggggtgcggatgaaggatccgcctggggcaccagggacacctgcggggcttggtctacgccttgcgcaggccttcttcgcagccgctgcgctcgccgtcatggcgtccaccaacgacttcccgtccgtctctgccttcagctaccttgtcgcagcagccattttgcagtgcttgtggagccttttgctagcctttgtcgacatttatgcacttcttgtcaagcgatcgttgagaaatgcccgagctgtatgtatatttactatcggagatgggatcacaggtacaataaccttgggcgcggcatgtgcttcagcaggaatcactgttctcatcggtaatgatctcaacatatgtgcagagaatcactgtgcaagtttcgagaccgccacagcattggcttttataagctggtttgcgctggcgccatcctgtatcttgaatttctggtcgatggcctccagatgataaatataggatgttataaaacatagtatttttgaatggtttctggacaaggtcgctgcttatggtagcagcaaagcaacgcggtgccgtaaagctaattgtaatacccagaaattgttgaatggctgtggaatgtagcacgtgtcgaattgtctgtacaaaatacggagaggccttctttggatctgaaaaaggcttctgaatcttgccagtccttcctttttacgttaacatgtttctcctgtgtggtttgttg

SEQ ID NO: 6190 - protein, 190 aa, Zea mays subsp. mays
  peptide (1)..(190): Ceres Seq. ID no. 12363848
  misc_feature (47)..(173): Pfam Name: Domain of unknown function (DUF588) Pfam Description: Domain of unknown function (DUF588)
  misc_feature (1)..(190): Homolog of NCBI NO: 18401722 NR Description: expressed protein; protein id: At2g28370.1, by cDNA: 14111., supported by cDNA: gi_14030700 [Arabidopsis >gi|25407978|pir||A84684 hypothetical protein At2g28370
  misc_feature (47)..(173): Homolog of NCBI NO: 26006486 NR Description: Unknown protein [Oryza sativa (japonica
  misc_feature (1)..(189): Homolog of NCBI NO: 25408537 NR Description: hypothetical protein At2g37200 [imported] - thaliana >gi|4371281|gb|AAD18139.1| unknown protein [Arabidopsis
  misc_feature (1)..(189): Homolog of NCBI NO: 30687069 NR Description: expressed protein [Arabidopsis thaliana]
  misc_feature (75)..(189): Homolog of NCBI NO: 11357817 NR Description: hypothetical protein F5K20.150 - Arabidopsis >gi|7630005|emb|CAB88347.1| putative protein [Arabidopsis
  misc_feature (40)..(84): Homolog of NCBI NO: 11357817 NR Description: hypothetical protein F5K20.150 - Arabidopsis >gi|7630005|emb|CAB88347.1| putative protein [Arabidopsis
  misc_feature (40)..(189): Homolog of NCBI NO: 18409932 NR Description: putative protein; protein id: At3g53850.1, by cDNA: gi_15724235 [Arabidopsis thaliana] AT4g31460/F3L17_30 [Arabidopsis thaliana]
  misc_feature (40)..(189): Homolog of NCBI NO: 30686969 NR Description: expressed protein [Arabidopsis thaliana] ethylene responsive element binding protein, putative thaliana] >gi|30102860|gb|AAP21348.1| At3g23220 [Arabidopsis
  misc_feature (40)..(185): Homolog of NCBI NO: 15241672 NR Description: putative protein; protein id: At5g02060.1
  misc_feature (40)..(189): Homolog of NCBI NO: 22330130 NR Description: hypothetical protein; protein id: At1g49405.1
MRASRPAVHPVEAAPPPPAAAAEGPEAQVEGAAHPRGVRMKDPPGAPGTPAGLGLRLAQAFFAAAALAVMASTNDFPSVSAFSYLVAAAILQCLWSLLLAFVDIYALLVKRSLRNARAVCIFTIGDGITGTITLGAACASAGITVLIGNDLNICAENHCASFETATALAFISWFALAPSCILNFWSMASR

SEQ ID NO: 6191 - protein, 151 aa, Zea mays subsp. mays
  peptide (1)..(151): Ceres Seq. ID no. 12363849
  misc_feature (8)..(134): Pfam Name: Domain of unknown function (DUF588) Pfam Description: Domain of unknown function (DUF588)
  misc_feature (1)..(151): Homolog of NCBI NO: 18401722 NR Description: expressed protein; protein id: At2g28370.1, by cDNA: 14111., supported by cDNA: gi_14030700 [Arabidopsis >gi|25407978|pir||A84684 hypothetical protein At2g28370
  misc_feature (8)..(134): Homolog of NCBI NO: 26006486 NR Description: Unknown protein [Oryza sativa (japonica
  misc_feature (1)..(150): Homolog of NCBI NO: 25408537 NR Description: hypothetical protein At2g37200 [imported] - thaliana >gi|4371281|gb|AAD18139.1| unknown protein [Arabidopsis
  misc_feature (1)..(150): Homolog of NCBI NO: 30687069 NR Description: expressed protein [Arabidopsis thaliana]
  misc_feature (36)..(150): Homolog of NCBI NO: 11357817 NR Description: hypothetical protein F5K20.150 - Arabidopsis >gi|7630005|emb|CAB88347.1| putative protein [Arabidopsis
  misc_feature (1)..(45): Homolog of NCBI NO: 11357817 NR Description: hypothetical protein F5K20.150 - Arabidopsis >gi|7630005|emb|CAB88347.1| putative protein [Arabidopsis
  misc_feature (1)..(150): Homolog of NCBI NO: 18409932 NR Description: putative protein; protein id: At3g53850.1, by cDNA: gi_15724235 [Arabidopsis thaliana] AT4g31460/F3L17_30 [Arabidopsis thaliana]
  misc_feature (1)..(150): Homolog of NCBI NO: 30686969 NR Description: expressed protein [Arabidopsis thaliana] ethylene responsive element binding protein, putative thaliana] >gi|30102860|gb|AAP21348.1| At3g23220 [Arabidopsis
  misc_feature (1)..(146): Homolog of NCBI NO: 15241672 NR Description: putative protein; protein id: At5g02060.1
  misc_feature (1)..(150): Homolog of NCBI NO: 22330130 NR Description: hypothetical protein; protein id: At1g49405.1
MKDPPGAPGTPAGLGLRLAQAFFAAAALAVMASTNDFPSVSAFSYLVAAAILQCLWSLLLAFVDIYALLVKRSLRNARAVCIFTIGDGITGTITLGAACASAGITVLIGNDLNICAENHCASFETATALAFISWFALAPSCILNFWSMASR

SEQ ID NO: 6192 - protein, 121 aa, Zea mays subsp. mays
  peptide (1)..(121): Ceres Seq. ID no. 12363850
  misc_feature (1)..(104): Pfam Name: Domain of unknown function (DUF588) Pfam Description: Domain of unknown function (DUF588)
  misc_feature (1)..(121): Homolog of NCBI NO: 18401722 NR Description: expressed protein; protein id: At2g28370.1, by cDNA: 14111., supported by cDNA: gi_14030700 [Arabidopsis >gi|25407978|pir||A84684 hypothetical protein At2g28370
  misc_feature (1)..(104): Homolog of NCBI NO: 26006486 NR Description: Unknown protein [Oryza sativa (japonica
  misc_feature (1)..(120): Homolog of NCBI NO: 25408537 NR Description: hypothetical protein At2g37200 [imported] - thaliana >gi|4371281|gb|AAD18139.1| unknown protein [Arabidopsis
  misc_feature (1)..(120): Homolog of NCBI NO: 30687069 NR Description: expressed protein [Arabidopsis thaliana]
  misc_feature (6)..(120): Homolog of NCBI NO: 11357817 NR Description: hypothetical protein F5K20.150 - Arabidopsis >gi|7630005|emb|CAB88347.1| putative protein [Arabidopsis
  misc_feature (1)..(15): Homolog of NCBI NO: 11357817 NR Description: hypothetical protein F5K20.150 - Arabidopsis >gi|7630005|emb|CAB88347.1| putative protein [Arabidopsis
  misc_feature (1)..(120): Homolog of NCBI NO: 18409932 NR Description: putative protein; protein id: At3g53850.1, by cDNA: gi_15724235 [Arabidopsis thaliana] AT4g31460/F3L17_30 [Arabidopsis thaliana]
  misc_feature (1)..(120): Homolog of NCBI NO: 30686969 NR Description: expressed protein [Arabidopsis thaliana] ethylene responsive element binding protein, putative thaliana] >gi|30102860|gb|AAP21348.1| At3g23220 [Arabidopsis
  misc_feature (1)..(116): Homolog of NCBI NO: 15241672 NR Description: putative protein; protein id: At5g02060.1
  misc_feature (1)..(120): Homolog of NCBI NO: 22330130 NR Description: hypothetical protein; protein id: At1g49405.1
MASTNDFPSVSAFSYLVAAAILQCLWSLLLAFVDIYALLVKRSLRNARAVCIFTIGDGITGTITLGAACASAGITVLIGNDLNICAENHCASFETATALAFISWFALAPSCILNFWSMASR

SEQ ID NO: 6193 - DNA, 1548 bp, Zea mays subsp. mays
  misc_feature (1)..(1548): Ceres Seq. ID no. 12358336
  misc_feature: MA Experiment ID: 108540 Result: Up-regulated in Transcription
  misc_feature: MA Experiment 108540 PARAMETER Experiment Name: Zm_20percent_PEG_P Parameter: Age (day) Value: 8
  misc_feature: MA Experiment 108540 PARAMETER Experiment Name: Zm_20percent_PEG_P Parameter: Organism Value: Zea mays
  misc_feature: MA Experiment 108540 PARAMETER Experiment Name: Zm_20percent_PEG_P Parameter: Plant Line Value: 35A19
  misc_feature: MA Experiment 108540 PARAMETER Experiment Name: Zm_20percent_PEG_P Parameter: Timepoint (hr) Value: 6
  misc_feature: MA Experiment 108540 PARAMETER Experiment Name: Zm_20percent_PEG_P Parameter: Tissue Value: Aerial
  misc_feature: MA Experiment 108540 PARAMETER Experiment Name: Zm_20percent_PEG_P Parameter: Treatment Value: 20percent PEG vs. No Treatment
  misc_feature: MA Experiment ID: 108556 Result: Up-regulated in Transcription
  misc_feature: MA Experiment 108556 PARAMETER Experiment Name: Zm_Drought_P Parameter: Age (day) Value: 9
  misc_feature: MA Experiment 108556 PARAMETER Experiment Name: Zm_Drought_P Parameter: Organism Value: Zea mays
  misc_feature: MA Experiment 108556 PARAMETER Experiment Name: Zm_Drought_P Parameter: Plant Line Value: 35A19
  misc_feature: MA Experiment 108556 PARAMETER Experiment Name: Zm_Drought_P Parameter: Timepoint (hr) Value: 24
  misc_feature: MA Experiment 108556 PARAMETER Experiment Name: Zm_Drought_P Parameter: Tissue Value: Aerial
  misc_feature: MA Experiment 108556 PARAMETER Experiment Name: Zm_Drought_P Parameter: Treatment Value: Drought vs. No Drought
  misc_feature: MA Experiment ID: 108597 Result: Up-regulated in Transcription
  misc_feature: MA Experiment 108597 PARAMETER Experiment Name: Zm_100uM_ABA_P Parameter: Age (day) Value: 9
  misc_feature: MA Experiment 108597 PARAMETER Experiment Name: Zm_100uM_ABA_P Parameter: Organism Value: Zea mays
  misc_feature: MA Experiment 108597 PARAMETER Experiment Name: Zm_100uM_ABA_P Parameter: Plant Line Value: 35A19
  misc_feature: MA Experiment 108597 PARAMETER Experiment Name: Zm_100uM_ABA_P Parameter: Timepoint (hr) Value: 24
  misc_feature: MA Experiment 108597 PARAMETER Experiment Name: Zm_100uM_ABA_P Parameter: Tissue Value: Aerial
  misc_feature: MA Experiment 108597 PARAMETER Experiment Name: Zm_100uM_ABA_P Parameter: Treatment Value: 100uM ABA vs. No Treatment
  misc_feature: MA Experiment ID: 108689 Result: Up-regulated in Transcription
  misc_feature: MA Experiment 108689 PARAMETER Experiment Name: Zm_Drought_Roots_P Parameter: Age (day) Value: 9
  misc_feature: MA Experiment 108689 PARAMETER Experiment Name: Zm_Drought_Roots_P Parameter: Organism Value: Zea mays
  misc_feature: MA Experiment 108689 PARAMETER Experiment Name: Zm_Drought_Roots_P Parameter: Plant Line Value: 35A19
  misc_feature: MA Experiment 108689 PARAMETER Experiment Name: Zm_Drought_Roots_P Parameter: Timepoint (hr) Value: 24
  misc_feature: MA Experiment 108689 PARAMETER Experiment Name: Zm_Drought_Roots_P Parameter: Tissue Value: Roots
  misc_feature: MA Experiment 108689 PARAMETER Experiment Name: Zm_Drought_Roots_P Parameter: Treatment Value: Drought vs. No Drought
  misc_feature: MA Experiment ID: 20000479 Result: Up-regulated in Transcription
  misc_feature: MA Experiment 20000479 PARAMETER Experiment Name: Zm_Drought_P Parameter: Age (day) Value: 10
  misc_feature: MA Experiment 20000479 PARAMETER Experiment Name: Zm_Drought_P Parameter: Organism Value: Zea mays
  misc_feature: MA Experiment 20000479 PARAMETER Experiment Name: Zm_Drought_P Parameter: Plant Line Value: 35A19
  misc_feature: MA Experiment 20000479 PARAMETER Experiment Name: Zm_Drought_P Parameter: Timepoint (hr) Value: 48
  misc_feature: MA Experiment 20000479 PARAMETER Experiment Name: Zm_Drought_P Parameter: Tissue Value: Aerial
  misc_feature: MA Experiment 20000479 PARAMETER Experiment Name: Zm_Drought_P Parameter: Treatment Value: Drought vs. No Drought
  misc_feature: MA Experiment ID: 20000480 Result: Up-regulated in Transcription
  misc_feature: MA Experiment 20000480 PARAMETER Experiment Name: Zm_Drought_P Parameter: Age (day) Value: 11
  misc_feature: MA Experiment 20000480 PARAMETER Experiment Name: Zm_Drought_P Parameter: Organism Value: Zea mays
  misc_feature: MA Experiment 20000480 PARAMETER Experiment Name: Zm_Drought_P Parameter: Plant Line Value: 35A19
  misc_feature: MA Experiment 20000480 PARAMETER Experiment Name: Zm_Drought_P Parameter: Timepoint (hr) Value: 72
  misc_feature: MA Experiment 20000480 PARAMETER Experiment Name: Zm_Drought_P Parameter: Tissue Value: Aerial
  misc_feature: MA Experiment 20000480 PARAMETER Experiment Name: Zm_Drought_P Parameter: Treatment Value: Drought vs. No Drought
  misc_feature: MA Experiment ID: 20000488 Result: Down-regulated in Transcription
  misc_feature: MA Experiment 20000488 PARAMETER Experiment Name: Zm_50mM_NH4NO3_L_to_H_P Parameter: Organism Value: Zea mays
  misc_feature: MA Experiment 20000488 PARAMETER Experiment Name: Zm_50mM_NH4NO3_L_to_H_P Parameter: Timepoint (hr) Value: 8
  misc_feature: MA Experiment 20000488 PARAMETER Experiment Name: Zm_50mM_NH4NO3_L_to_H_P Parameter: Tissue Value: Leaves
  misc_feature: MA Experiment 20000488 PARAMETER Experiment Name: Zm_50mM_NH4NO3_L_to_H_P Parameter: Treatment Value: 50mM NH4NO3 vs. 100mM Mannitol
acggaccagcagatcgcgcgcgggagtgagagggcgacagggcgtggccgcgaggtgggcatgggatcggagggacgggtctggaatggcgcgggcgtggccgccggcagcggctatggcggcatcgtcgaggcgaaagcgaccaccgcggcgcccgcggacgttcccacgtcggcggcctccgtcgacatctcgctgccgctcccggagatgtcgcctcacatcataggtctctgcaaggagttggtcaaagggtggtcgtcgattgacagctcgcgcttctccatcgagaccgtgtctgggggcatcaccaatctattgctcaaggtttctgtcaaaggaaacaatggcaatgagtcttctgttactgttcggttgtatggaccaaatacagacttggtgattgatcggaaaagggaattgcaggcgataccgtatctctcagctgcagggttcggggctcggctgcttggaatgtttgaaaatggagtagttcagtcattcatctatgctcgaacactgtcacctgcagacatgaaagaacctaaaatagcagctgaaattgccaaggagctacgcaaatttcatcaagtagatataccagggtctaaagaaccacaattgtggaatgatatattcaagtttttgaagaaagctgcagcattgaagtttgaggataatgagcagcaaaagagatatgtaaagatctcatttagagaaatacaagatgaagttaaagaacttaaggatctcttggacattctgcatgcacctgtggtttatgcacacaatgacttgctttcaggaaatctgatgctcaatgatttggaagggaagctatattttattgattttgagtatgggtcatacagctaccgtgggtatgacattgcaaatcatttcaatgagtatgcaggatttgactgtgactataatttgtacccagataaagatgcccagtatcacttctttaggaattatctgcaccctgatagacctagtgaggtgcaggcacaagatatggaagtactttatgtggaaacaaacactttcagactagcatcgcacatttactgggcattatgggctcttattcaggcaaaggtatccccaattgactttgactatcttggatacttcttcttacggtatggtgagtacaagaaacaaagggactcctgcttcgccttggcacaaagtttcctctccgggctaagaaatggctagagcctgagaatctggtcaagggtttgcactgttgtacgcatactcggggcgggtacgcgttgtgatcatcgtctgctactcagaaactctactatagtggtggtagcagcctcattttgttgtatctgatggtagtttcgtcatcgcctgataggaaagtctcatgatcgccctcgggaacgcagggtggcgagatctgtacttatatttgtaataaacacaatccggatgggttctgtcctgtgcaatttgttgtgcgcataagcattccgtgtttttatacattattgtgaggaattgcataagtttttttgtttttcg

SEQ ID NO: 6194 - protein, 408 aa, Zea mays subsp. mays
  peptide (1)..(408): Ceres Seq. ID no. 12358337
  misc_feature (119)..(389): Pfam Name: Choline/ethanolamine kinase Pfam Description: Choline/ethanolamine kinase
  misc_feature (45)..(403): Homolog of NCBI NO: 15225800 NR Description: putative choline kinase; protein id: At2g26830.1, by cDNA: 37620. [Arabidopsis thaliana] >gi|7485395|pir||T02652
  misc_feature (45)..(403): Homolog of NCBI NO: 21593269 NR Description: putative choline kinase [Arabidopsis thaliana]
  misc_feature (77)..(392): Homolog of NCBI NO: 28829950 NR Description: similar to Arabidopsis thaliana (Mouse-ear
  misc_feature (76)..(397): Homolog of NCBI NO: 10092615 NR Description: ethanolamine kinase [Homo sapiens] Ethanolamine kinase (EKI) >gi|9998952|gb|AAF71220.2|AF207600_1
  misc_feature (76)..(397): Homolog of NCBI NO: 26328955 NR Description: unnamed protein product [Mus musculus]
  misc_feature (76)..(397): Homolog of NCBI NO: 26340554 NR Description: unnamed protein product [Mus musculus]
  misc_feature (76)..(397): Homolog of NCBI NO: 14194720 NR Description: ETHANOLAMINE KINASE (EKI)
  misc_feature (45)..(397): Homolog of NCBI NO: 14603244 NR Description: Similar to hypothetical protein FLJ10761 [Homo
  misc_feature (68)..(387): Homolog of NCBI NO: 7488654 NR Description: choline kinase (EC 2.7.1.32) CK3 - soybean
  misc_feature (102)..(397): Homolog of NCBI NO: 37786753 NR Description: putative ethanolamine kinase [Mus musculus]
TDQQIARGSERATGRGREVGMGSEGRVWNGAGVAAGSGYGGIVEAKATTAAPADVPTSAASVDISLPLPEMSPHIIGLCKELVKGWSSIDSSRFSIETVSGGITNLLLKVSVKGNNGNESSVTVRLYGPNTDLVIDRKRELQAIPYLSAAGFGARLLGMFENGVVQSFIYARTLSPADMKEPKIAAEIAKELRKFHQVDIPGSKEPQLWNDIFKFLKKAAALKFEDNEQQKRYVKISFREIQDEVKELKDLLDILHAPVVYAHNDLLSGNLMLNDLEGKLYFIDFEYGSYSYRGYDIANHFNEYAGFDCDYNLYPDKDAQYHFFRNYLHPDRPSEVQAQDMEVLYVETNTFRLASHIYWALWALIQAKVSPIDFDYLGYFFLRYGEYKKQRDSCFALAQSFLSGLRNG

SEQ ID NO: 6195 - protein, 388 aa, Zea mays subsp. mays
  peptide (1)..(388): Ceres Seq. ID no. 12358338
  misc_feature (99)..(369): Pfam Name: Choline/ethanolamine kinase Pfam Description: Choline/ethanolamine kinase
  misc_feature (25)..(383): Homolog of NCBI NO: 15225800 NR Description: putative choline kinase; protein id: At2g26830.1, by cDNA: 37620. [Arabidopsis thaliana] >gi|7485395|pir||T02652
  misc_feature (25)..(383): Homolog of NCBI NO: 21593269 NR Description: putative choline kinase [Arabidopsis thaliana]
  misc_feature (57)..(372): Homolog of NCBI NO: 28829950 NR Description: similar to Arabidopsis thaliana (Mouse-ear
  misc_feature (56)..(377): Homolog of NCBI NO: 10092615 NR Description: ethanolamine kinase [Homo sapiens] Ethanolamine kinase (EKI) >gi|9998952|gb|AAF71220.2|AF207600_1
  misc_feature (56)..(377): Homolog of NCBI NO: 26328955 NR Description: unnamed protein product [Mus musculus]
  misc_feature (56)..(377): Homolog of NCBI NO: 26340554 NR Description: unnamed protein product [Mus musculus]
  misc_feature (56)..(377): Homolog of NCBI NO: 14194720 NR Description: ETHANOLAMINE KINASE (EKI)
  misc_feature (25)..(377): Homolog of NCBI NO: 14603244 NR Description: Similar to hypothetical protein FLJ10761 [Homo
  misc_feature (48)..(367): Homolog of NCBI NO: 7488654 NR Description: choline kinase (EC 2.7.1.32) CK3 - soybean
  misc_feature (82)..(377): Homolog of NCBI NO: 37786753 NR Description: putative ethanolamine kinase [Mus musculus]
MGSEGRVWNGAGVAAGSGYGGIVEAKATTAAPADVPTSAASVDISLPLPEMSPHIIGLCKELVKGWSSIDSSRFSIETVSGGITNLLLKVSVKGNNGNESSVTVRLYGPNTDLVIDRKRELQAIPYLSAAGFGARLLGMFENGVVQSFIYARTLSPADMKEPKIAAEIAKELRKFHQVDIPGSKEPQLWNDIFKFLKKAAALKFEDNEQQKRYVKISFREIQDEVKELKDLLDILHAPVVYAHNDLLSGNLMLNDLEGKLYFIDFEYGSYSYRGYDIANHFNEYAGFDCDYNLYPDKDAQYHFFRNYLHPDRPSEVQAQDMEVLYVETNTFRLASHIYWALWALIQAKVSPIDFDYLGYFFLRYGEYKKQRDSCFALAQSFLSGLRNG

SEQ ID NO: 6196 - protein, 338 aa, Zea mays subsp. mays
  peptide (1)..(338): Ceres Seq. ID no. 12358339
  misc_feature (49)..(319): Pfam Name: Choline/ethanolamine kinase Pfam Description: Choline/ethanolamine kinase
  misc_feature (1)..(333): Homolog of NCBI NO: 15225800 NR Description: putative choline kinase; protein id: At2g26830.1, by cDNA: 37620. [Arabidopsis thaliana] >gi|7485395|pir||T02652
  misc_feature (1)..(333): Homolog of NCBI NO: 21593269 NR Description: putative choline kinase [Arabidopsis thaliana]
  misc_feature (7)..(322): Homolog of NCBI NO: 28829950 NR Description: similar to Arabidopsis thaliana (Mouse-ear
  misc_feature (6)..(327): Homolog of NCBI NO: 10092615 NR Description: ethanolamine kinase [Homo sapiens] Ethanolamine kinase (EKI) >gi|9998952|gb|AAF71220.2|AF207600_1
  misc_feature (6)..(327): Homolog of NCBI NO: 26328955 NR Description: unnamed protein product [Mus musculus]
  misc_feature (6)..(327): Homolog of NCBI NO: 26340554 NR Description: unnamed protein product [Mus musculus]
  misc_feature (6)..(327): Homolog of NCBI NO: 14194720 NR Description: ETHANOLAMINE KINASE (EKI)
  misc_feature (1)..(327): Homolog of NCBI NO: 14603244 NR Description: Similar to hypothetical protein FLJ10761 [Homo
  misc_feature (1)..(317): Homolog of NCBI NO: 7488654 NR Description: choline kinase (EC 2.7.1.32) CK3 - soybean
  misc_feature (32)..(327): Homolog of NCBI NO: 37786753 NR Description: putative ethanolamine kinase [Mus musculus]
MSPHIIGLCKELVKGWSSIDSSRFSIETVSGGITNLLLKVSVKGNNGNESSVTVRLYGPNTDLVIDRKRELQAIPYLSAAGFGARLLGMFENGVVQSFIYARTLSPADMKEPKIAAEIAKELRKFHQVDIPGSKEPQLWNDIFKFLKKAAALKFEDNEQQKRYVKISFREIQDEVKELKDLLDILHAPVVYAHNDLLSGNLMLNDLEGKLYFIDFEYGSYSYRGYDIANHFNEYAGFDCDYNLYPDKDAQYHFFRNYLHPDRPSEVQAQDMEVLYVETNTFRLASHIYWALWALIQAKVSPIDFDYLGYFFLRYGEYKKQRDSCFALAQSFLSGLRNG

SEQ ID NO: 6197 - DNA, 1681 bp, Zea mays subsp. mays
  misc_feature (1)..(1681): Ceres Seq. ID no. 12349121
  misc_feature: MA Experiment ID: 108527 Result: Up-regulated in Transcription
  misc_feature: MA Experiment 108527 PARAMETER Experiment Name: Zm_5mM_NO_P Parameter: Age (day) Value: 8
  misc_feature: MA Experiment 108527 PARAMETER Experiment Name: Zm_5mM_NO_P Parameter: Organism Value: Zea mays
  misc_feature: MA Experiment 108527 PARAMETER Experiment Name: Zm_5mM_NO_P Parameter: Plant Line Value: 35A19
  misc_feature: MA Experiment 108527 PARAMETER Experiment Name: Zm_5mM_NO_P Parameter: Timepoint (hr) Value: 6
  misc_feature: MA Experiment 108527 PARAMETER Experiment Name: Zm_5mM_NO_P Parameter: Tissue Value: Aerial
  misc_feature: MA Experiment 108527 PARAMETER Experiment Name: Zm_5mM_NO_P Parameter: Treatment Value: 5mM NO vs. No Treatment
  misc_feature: MA Experiment ID: 108535 Result: Up-regulated in Transcription
  misc_feature: MA Experiment 108535 PARAMETER Experiment Name: Zm_Meristem_P Parameter: Age (day) Value: 8
  misc_feature: MA Experiment 108535 PARAMETER Experiment Name: Zm_Meristem_P Parameter: Organism Value: Zea mays
  misc_feature: MA Experiment 108535 PARAMETER Experiment Name: Zm_Meristem_P Parameter: Plant Line Value: 35A19
  misc_feature: MA Experiment 108535 PARAMETER Experiment Name: Zm_Meristem_P Parameter: Tissue Value: Root Meristem vs. Above Root Meristem
  misc_feature: MA Experiment ID: 20000477 Result: Up-regulated in Transcription
  misc_feature: MA Experiment 20000477 PARAMETER Experiment Name: Zm_5mM_SA_P Parameter: Age (day) Value: 10
  misc_feature: MA Experiment 20000477 PARAMETER Experiment Name: Zm_5mM_SA_P Parameter: Organism Value: Zea mays
  misc_feature: MA Experiment 20000477 PARAMETER Experiment Name: Zm_5mM_SA_P Parameter: Plant Line Value: 35A19
  misc_feature: MA Experiment 20000477 PARAMETER Experiment Name: Zm_5mM_SA_P Parameter: Timepoint (hr) Value: 48
  misc_feature: MA Experiment 20000477 PARAMETER Experiment Name: Zm_5mM_SA_P Parameter: Tissue Value: Aerial
  misc_feature: MA Experiment 20000477 PARAMETER Experiment Name: Zm_5mM_SA_P Parameter: Treatment Value: 5mM SA vs. No Treatment
  misc_feature: MA Experiment ID: 20000478 Result: Up-regulated in Transcription
  misc_feature: MA Experiment 20000478 PARAMETER Experiment Name: Zm_5mM_SA_P Parameter: Age (day) Value: 11
  misc_feature: MA Experiment 20000478 PARAMETER Experiment Name: Zm_5mM_SA_P Parameter: Organism Value: Zea mays
  misc_feature: MA Experiment 20000478 PARAMETER Experiment Name: Zm_5mM_SA_P Parameter: Plant Line Value: 35A19
  misc_feature: MA Experiment 20000478 PARAMETER Experiment Name: Zm_5mM_SA_P Parameter: Timepoint (hr) Value: 72
  misc_feature: MA Experiment 20000478 PARAMETER Experiment Name: Zm_5mM_SA_P Parameter: Tissue Value: Aerial
  misc_feature: MA Experiment 20000478 PARAMETER Experiment Name: Zm_5mM_SA_P Parameter: Treatment Value: 5mM SA vs. No Treatment
  misc_feature: MA Experiment ID: 20000488 Result: Up-regulated in Transcription
  misc_feature: MA Experiment 20000488 PARAMETER Experiment Name: Zm_50mM_NH4NO3_L_to_H_P Parameter: Organism Value: Zea mays
  misc_feature: MA Experiment 20000488 PARAMETER Experiment Name: Zm_50mM_NH4NO3_L_to_H_P Parameter: Timepoint (hr) Value: 8
  misc_feature: MA Experiment 20000488 PARAMETER Experiment Name: Zm_50mM_NH4NO3_L_to_H_P Parameter: Tissue Value: Leaves
  misc_feature: MA Experiment 20000488 PARAMETER Experiment Name: Zm_50mM_NH4NO3_L_to_H_P Parameter: Treatment Value: 50mM NH4NO3 vs. 100mM Mannitol
  misc_feature: MA Experiment ID: 20000492 Result: Up-regulated in Transcription
  misc_feature: MA Experiment 20000492 PARAMETER Experiment Name: Zm_Hybrid_Seed_Dev_P Parameter: DAP Value: 12
  misc_feature: MA Experiment 20000492 PARAMETER Experiment Name: Zm_Hybrid_Seed_Dev_P Parameter: Organism Value: Zea mays
  misc_feature: MA Experiment 20000492 PARAMETER Experiment Name: Zm_Hybrid_Seed_Dev_P Parameter: Plant Line Value: 35A19
  misc_feature: MA Experiment 20000492 PARAMETER Experiment Name: Zm_Hybrid_Seed_Dev_P Parameter: Tissue Value: Fert Kernel vs. Unfert Floret
  misc_feature: MA Experiment ID: 20001606 Result: Up-regulated in Transcription
  misc_feature: MA Experiment 20001606 PARAMETER Experiment Name: Zm_50ppm_KNO3_L-to-H_P Parameter: Age (day) Value: 19
  misc_feature: MA Experiment 20001606 PARAMETER Experiment Name: Zm_50ppm_KNO3_L-to-H_P Parameter: Organism Value: Zea mays
  misc_feature: MA Experiment 20001606 PARAMETER Experiment Name: Zm_50ppm_KNO3_L-to-H_P Parameter: Plant Line Value: 35A19
  misc_feature: MA Experiment 20001606 PARAMETER Experiment Name: Zm_50ppm_KNO3_L-to-H_P Parameter: Timepoint (hr) Value: 8
  misc_feature: MA Experiment 20001606 PARAMETER Experiment Name: Zm_50ppm_KNO3_L-to-H_P Parameter: Tissue Value: Shoots
  misc_feature: MA Experiment 20001606 PARAMETER Experiment Name: Zm_50ppm_KNO3_L-to-H_P Parameter: Treatment Value: 50ppm KNO3 vs. 50ppm KCl
ctgcacttttctaccaccgaaggcgagggcgagggggccaaagacgagcgctttttcgtgcccgcctgcctgcctgctggtcattgccgctgctcacgagcctcccgccccgtgccgccctgccctctacggctctgccccaacgagccccaggggagccaggaaaaggagccgtcaaaagccgccgccgaggagagcgcgcaggtcaggcatggcatcaaccgttaccttcaacccagtgagcgcccaagctgcgctgatccaaaagccaaggaaccttggagccataagctatgctggcttaaagatgccggcatctgttagctctggctcagagtcgtcattcctgggctggaatgcatcccttcgggcagctgttactccaaggattgtgcccaaggcaaagtctggatctcagatatctccacaggcatcttacaaggtggcagtgctgggtgctgccggtggcatcggtcaacccttgggcctgttggttaagatgtctcctcttgtccgagctgcatctgtatgatattgctaatgtcaagggagttgctgcagatctcagccactgcaacacgcctgctcaggttcttgacttcactggaccctcagagttagccaactgcttgaaaggtgtggatgtcgttgtcatccctgccggggtcccaaggaagcctgggatgactcgcgatgacctttttaacatcaacgcaagcatcgtcaagacacttgttgaggctgttgcagacagttgcccagaggcgttcatccatatcatcagcaacccggtgaattccacggtgccaattgcagctgaggttctgaagcagaagggtgtctacaatcccaagaagctttttggggttaccaccttggatgttgtcagggccaacacatttgtggcgcagaagaagaaccttaagctcatcgatgttgatgtcccagttgttggtggccatgctggaatcacaattctgccactgttatcgaagacgaggccatctgtcaccttcacagatgaggaaactgaggagctgacaaagaggatacagaatgccgggacagaggtggtggatgccaaggctggtgctgggtctgctaccctgtccatggcctatgccgctgctagattcgttgagtcgtctctccgtgcgctggctggcgatccggatgtttatgagtgcacatttgttcagtctgagataactgacctgccattcttcgcatcaagagtcaagttgggcaagaacggtgttgagtctgtcatttctgccgacctccagggagtgactgagtatgaggccaaggcacttgaggcgctgaaggccgagttgaaggcaagcattgagaagggtattgctttcgtgaacaaacagcgggaagctgctgcatctgtttgaggcgaagcaagtgaaacggaaggaacaatcgtcttgaatggcttttaagttttgcagcctagagtttttttgttgtcggcatgtaggaagatgttccagatggttgctgtttgtttctaattgctacatgggggctgaacatccatcccccaagttatcgccggtttctgaaccaggccttatttacacataaattttgccccttctgtatcgtggtccagtttgtagcttgttggagtctacaaactacaaagaggctaataaaccacttttatttg

SEQ ID NO: 6198 - protein, 348 aa, Zea mays subsp. mays
  peptide (1)..(348): Ceres Seq. ID no. 12349122
  misc_feature (172)..(338): Pfam Name: lactate/malate dehydrogenase, alpha/beta Pfam Description: lactate/malate dehydrogenase, alpha/beta
  misc_feature (51)..(347): Homolog of NCBI NO: 34907952 NR Description: putative NAD-malate dehydrogenase [Oryza sativa
  misc_feature (51)..(345): Homolog of NCBI NO: 5123836 NR Description: NAD-malate dehydrogenase [Nicotiana tabacum]
  misc_feature (51)..(345): Homolog of NCBI NO: 7431178 NR Description: malate dehydrogenase (EC 1.1.1.37) precursor - >gi|2827084|gb|AAB99757.1| malate dehydrogenase precursor
  misc_feature (51)..(347): Homolog of NCBI NO: 15232820 NR Description: chloroplast NAD-dependent malate dehydrogenase; id: At3g47520.1, supported by cDNA: gi_3256065 [Arabidopsis
  misc_feature (51)..(347): Homolog of NCBI NO: 25283601 NR Description: malate dehydrogenase (EC 1.1.1.37), chloroplast
  misc_feature (51)..(345): Homolog of NCBI NO: 7488830 NR Description: probable malate dehydrogenase (EC 1.1.1.37) -
MHPFGQLLLQGLCPRQSLDLRYLHRHLTRWQCWVLPVASVNPWACWLRCLLLSELHLYDIANVKGVAADLSHCNTPAQVLDFTGPSELANCLKGVDVVVIPAGVPRKPGMTRDDLFNINASIVKTLVEAVADSCPEAFIHIISNPVNSTVPIAAEVLKQKGVYNPKKLFGVTTLDVVRANTFVAQKKNLKLIDVDVPVVGGHAGITILPLLSKTRPSVTFTDEETEELTKRIQNAGTEVVDAKAGAGSATLSMAYAAARFVESSLRALAGDPDVYECTFVQSEITDLPFFASRVKLGKNGVESVISADLQGVTEYEAKALEALKAELKASIEKGIAFVNKQREAAASV

SEQ ID NO: 6199 - protein, 239 aa, Zea mays subsp. mays
  peptide (1)..(239): Ceres Seq. ID no. 12349123
  misc_feature (63)..(229): Pfam Name: lactate/malate dehydrogenase, alpha/beta Pfam Description: lactate/malate dehydrogenase, alpha/beta
  misc_feature (1)..(236): Homolog of NCBI NO: 7431178 NR Description: malate dehydrogenase (EC 1.1.1.37) precursor - >gi|2827084|gb|AAB99757.1| malate dehydrogenase precursor
  misc_feature (1)..(238): Homolog of NCBI NO: 15232820 NR Description: chloroplast NAD-dependent malate dehydrogenase; id: At3g47520.1, supported by cDNA: gi_3256065 [Arabidopsis
  misc_feature (1)..(238): Homolog of NCBI NO: 34907952 NR Description: putative NAD-malate dehydrogenase [Oryza sativa
  misc_feature (1)..(236): Homolog of NCBI NO: 5123836 NR Description: NAD-malate dehydrogenase [Nicotiana tabacum]
  misc_feature (1)..(238): Homolog of NCBI NO: 25283601 NR Description: malate dehydrogenase (EC 1.1.1.37), chloroplast
  misc_feature (1)..(236): Homolog of NCBI NO: 7488830 NR Description: probable malate dehydrogenase (EC 1.1.1.37) -
MTRDDLFNINASIVKTLVEAVADSCPEAFIHIISNPVNSTVPIAAEVLKQKGVYNPKKLFGVTTLDVVRANTFVAQKKNLKLIDVDVPVVGGHAGITILPLLSKTRPSVTFTDEETEELTKRIQNAGTEVVDAKAGAGSATLSMAYAAARFVESSLRALAGDPDVYECTFVQSEITDLPFFASRVKLGKNGVESVISADLQGVTEYEAKALEALKAELKASIEKGIAFVNKQREAAASV

SEQ ID NO: 6200 - protein, 176 aa, Zea mays subsp. mays
  peptide (1)..(176): Ceres Seq. ID no. 12349124
  misc_feature (70)..(173): Homolog of NCBI NO: 34907952 NR Description: putative NAD-malate dehydrogenase [Oryza sativa
  misc_feature (97)..(171): Homolog of NCBI NO: 5123836 NR Description: NAD-malate dehydrogenase [Nicotiana tabacum]
  misc_feature (97)..(171): Homolog of NCBI NO: 7431178 NR Description: malate dehydrogenase (EC 1.1.1.37) precursor - >gi|2827084|gb|AAB99757.1| malate dehydrogenase precursor
  misc_feature (97)..(171): Homolog of NCBI NO: 15232820 NR Description: chloroplast NAD-dependent malate dehydrogenase; id: At3g47520.1, supported by cDNA: gi_3256065 [Arabidopsis
  misc_feature (97)..(171): Homolog of NCBI NO: 25283601 NR Description: malate dehydrogenase (EC 1.1.1.37), chloroplast
  misc_feature (72)..(171): Homolog of NCBI NO: 7488830 NR Description: probable malate dehydrogenase (EC 1.1.1.37) -
CTFLPPKARARGPKTSAFSCPPACLLVIAAAHEPPAPCRPALYGSAPTSPRGARKRSRQKPPPRRARRSGMASTVTFNPVSAQAALIQKPRNLGAISYAGLKMPASVSSGSESSFLGWNASLRAAVTPRIVPKAKSGSQISPQASYKVAVLGAAGGIGQPLGLLVKMSPLVRAASV

SEQ ID NO: 6201 - DNA, 878 bp, Zea mays subsp. mays
  misc_feature (1)..(878): Ceres Seq. ID no. 12402552
  misc_feature: MA Experiment ID: 108504 Result: Up-regulated in Transcription
  misc_feature: MA Experiment 108504 PARAMETER Experiment Name: Zm_Drought_P Parameter: Age (day) Value: 8
  misc_feature: MA Experiment 108504 PARAMETER Experiment Name: Zm_Drought_P Parameter: Organism Value: Zea mays
  misc_feature: MA Experiment 108504 PARAMETER Experiment Name: Zm_Drought_P Parameter: Plant Line Value: 35A19
  misc_feature: MA Experiment 108504 PARAMETER Experiment Name: Zm_Drought_P Parameter: Timepoint (hr) Value: 12
  misc_feature: MA Experiment 108504 PARAMETER Experiment Name: Zm_Drought_P Parameter: Tissue Value: Aerial
  misc_feature: MA Experiment 108504 PARAMETER Experiment Name: Zm_Drought_P Parameter: Treatment Value: Drought vs. No Drought
  misc_feature: MA Experiment ID: 108515 Result: Up-regulated in Transcription
  misc_feature: MA Experiment 108515 PARAMETER Experiment Name: Zm_2mM_SA_P Parameter: Age (day) Value: 8
  misc_feature: MA Experiment 108515 PARAMETER Experiment Name: Zm_2mM_SA_P Parameter: Organism Value: Zea mays
  misc_feature: MA Experiment 108515 PARAMETER Experiment Name: Zm_2mM_SA_P Parameter: Plant Line Value: 35A19
  misc_feature: MA Experiment 108515 PARAMETER Experiment Name: Zm_2mM_SA_P Parameter: Timepoint (hr) Value: 12
  misc_feature: MA Experiment 108515 PARAMETER Experiment Name: Zm_2mM_SA_P Parameter: Tissue Value: Aerial
  misc_feature: MA Experiment 108515 PARAMETER Experiment Name: Zm_2mM_SA_P Parameter: Treatment Value: 2mM SA vs. No Treatment
  misc_feature: MA Experiment ID: 108527 Result: Up-regulated in Transcription
  misc_feature: MA Experiment 108527 PARAMETER Experiment Name: Zm_5mM_NO_P Parameter: Age (day) Value: 8
  misc_feature: MA Experiment 108527 PARAMETER Experiment Name: Zm_5mM_NO_P Parameter: Organism Value: Zea mays
  misc_feature: MA Experiment 108527 PARAMETER Experiment Name: Zm_5mM_NO_P Parameter: Plant Line Value: 35A19
  misc_feature: MA Experiment 108527 PARAMETER Experiment Name: Zm_5mM_NO_P Parameter: Timepoint (hr) Value: 6
  misc_feature: MA Experiment 108527 PARAMETER Experiment Name: Zm_5mM_NO_P Parameter: Tissue Value: Aerial
  misc_feature: MA Experiment 108527 PARAMETER Experiment Name: Zm_5mM_NO_P Parameter: Treatment Value: 5mM NO vs. No Treatment
  misc_feature: MA Experiment ID: 108529 Result: Up-regulated in Transcription
  misc_feature: MA Experiment 108529 PARAMETER Experiment Name: Zm_Imbibed_Seeds_P Parameter: Age (day) Value: 5 vs. 2
  misc_feature: MA Experiment 108529 PARAMETER Experiment Name: Zm_Imbibed_Seeds_P Parameter: Organism Value: Zea mays
  misc_feature: MA Experiment 108529 PARAMETER Experiment Name: Zm_Imbibed_Seeds_P Parameter: Plant Line Value: 35A19
  misc_feature: MA Experiment 108529 PARAMETER Experiment Name: Zm_Imbibed_Seeds_P Parameter: Tissue Value: Roots vs. Embryo
  misc_feature: MA Experiment ID: 108535 Result: Down-regulated in Transcription
  misc_feature: MA Experiment 108535 PARAMETER Experiment Name: Zm_Meristem_P Parameter: Age (day) Value: 8
  misc_feature: MA Experiment 108535 PARAMETER Experiment Name: Zm_Meristem_P Parameter: Organism Value: Zea mays
  misc_feature: MA Experiment 108535 PARAMETER Experiment Name: Zm_Meristem_P Parameter: Plant Line Value: 35A19
  misc_feature: MA Experiment 108535 PARAMETER Experiment Name: Zm_Meristem_P Parameter: Tissue Value: Root Meristem vs. Above Root Meristem
  misc_feature: MA Experiment ID: 108540 Result: Up-regulated in Transcription
  misc_feature: MA Experiment 108540 PARAMETER Experiment Name: Zm_20percent_PEG_P Parameter: Age (day) Value: 8
  misc_feature: MA Experiment 108540 PARAMETER Experiment Name: Zm_20percent_PEG_P Parameter: Organism Value: Zea mays
  misc_feature: MA Experiment 108540 PARAMETER Experiment Name: Zm_20percent_PEG_P Parameter: Plant Line Value: 35A19
  misc_feature: MA Experiment 108540 PARAMETER Experiment Name: Zm_20percent_PEG_P Parameter: Timepoint (hr) Value: 6
  misc_feature: MA Experiment 108540 PARAMETER Experiment Name: Zm_20percent_PEG_P Parameter: Tissue Value: Aerial
  misc_feature: MA Experiment 108540 PARAMETER Experiment Name: Zm_20percent_PEG_P Parameter: Treatment Value: 20percent PEG vs. No Treatment
  misc_feature: MA Experiment ID: 108556 Result: Up-regulated in Transcription
  misc_feature: MA Experiment 108556 PARAMETER Experiment Name: Zm_Drought_P Parameter: Age (day) Value: 9
  misc_feature: MA Experiment 108556 PARAMETER Experiment Name: Zm_Drought_P Parameter: Organism Value: Zea mays
  misc_feature: MA Experiment 108556 PARAMETER Experiment Name: Zm_Drought_P Parameter: Plant Line Value: 35A19
  misc_feature: MA Experiment 108556 PARAMETER Experiment Name: Zm_Drought_P Parameter: Timepoint (hr) Value: 24
  misc_feature: MA Experiment 108556 PARAMETER Experiment Name: Zm_Drought_P Parameter: Tissue Value: Aerial
  misc_feature: MA Experiment 108556 PARAMETER Experiment Name: Zm_Drought_P Parameter: Treatment Value: Drought vs. No Drought
  misc_feature: MA Experiment ID: 108559 Result: Up-regulated in Transcription
  misc_feature: MA Experiment 108559 PARAMETER Experiment Name: Zm_5mM_NO_P Parameter: Age (day) Value: 8
  misc_feature: MA Experiment 108559 PARAMETER Experiment Name: Zm_5mM_NO_P Parameter: Organism Value: Zea mays
  misc_feature: MA Experiment 108559 PARAMETER Experiment Name: Zm_5mM_NO_P Parameter: Plant Line Value: 35A19
  misc_feature: MA Experiment 108559 PARAMETER Experiment Name: Zm_5mM_NO_P Parameter: Timepoint (hr) Value: 12
  misc_feature: MA Experiment 108559 PARAMETER Experiment Name: Zm_5mM_NO_P Parameter: Tissue Value: Aerial
  misc_feature: MA Experiment 108559 PARAMETER Experiment Name: Zm_5mM_NO_P Parameter: Treatment Value: 5mM NO vs. No Treatment
  misc_feature: MA Experiment ID: 108688 Result: Down-regulated in Transcription
  misc_feature: MA Experiment 108688 PARAMETER Experiment Name: Zm_Embryos-Flowers__P Parameter: Tissue Value: Immature Flowers vs. Aerial+
  misc_feature: MA Experiment ID: 108689 Result: Up-regulated in Transcription
  misc_feature: MA Experiment 108689 PARAMETER Experiment Name: Zm_Drought_Roots_P Parameter: Age (day) Value: 9
  misc_feature: MA Experiment 108689 PARAMETER Experiment Name: Zm_Drought_Roots_P Parameter: Organism Value: Zea mays
  misc_feature: MA Experiment 108689 PARAMETER Experiment Name: Zm_Drought_Roots_P Parameter: Plant Line Value: 35A19
  misc_feature: MA Experiment 108689 PARAMETER Experiment Name: Zm_Drought_Roots_P Parameter: Timepoint (hr) Value: 24
  misc_feature: MA Experiment 108689 PARAMETER Experiment Name: Zm_Drought_Roots_P Parameter: Tissue Value: Roots
  misc_feature: MA Experiment 108689 PARAMETER Experiment Name: Zm_Drought_Roots_P Parameter: Treatment Value: Drought vs. No Drought
  misc_feature: MA Experiment ID: 20000477 Result: Up-regulated in Transcription
  misc_feature: MA Experiment 20000477 PARAMETER Experiment Name: Zm_5mM_SA_P Parameter: Age (day) Value: 10
  misc_feature: MA Experiment 20000477 PARAMETER Experiment Name: Zm_5mM_SA_P Parameter: Organism Value: Zea mays
  misc_feature: MA Experiment 20000477 PARAMETER Experiment Name: Zm_5mM_SA_P Parameter: Plant Line Value: 35A19
  misc_feature: MA Experiment 20000477 PARAMETER Experiment Name: Zm_5mM_SA_P Parameter: Timepoint (hr) Value: 48
  misc_feature: MA Experiment 20000477 PARAMETER Experiment Name: Zm_5mM_SA_P Parameter: Tissue Value: Aerial
  misc_feature: MA Experiment 20000477 PARAMETER Experiment Name: Zm_5mM_SA_P Parameter: Treatment Value: 5mM SA vs. No Treatment
  misc_feature: MA Experiment ID: 20000478 Result: Up-regulated in Transcription
  misc_feature: MA Experiment 20000478 PARAMETER Experiment Name: Zm_5mM_SA_P Parameter: Age (day) Value: 11
  misc_feature: MA Experiment 20000478 PARAMETER Experiment Name: Zm_5mM_SA_P Parameter: Organism Value: Zea mays
  misc_feature: MA Experiment 20000478 PARAMETER Experiment Name: Zm_5mM_SA_P Parameter: Plant Line Value: 35A19
  misc_feature: MA Experiment 20000478 PARAMETER Experiment Name: Zm_5mM_SA_P Parameter: Timepoint (hr) Value: 72
  misc_feature: MA Experiment 20000478 PARAMETER Experiment Name: Zm_5mM_SA_P Parameter: Tissue Value: Aerial
  misc_feature: MA Experiment 20000478 PARAMETER Experiment Name: Zm_5mM_SA_P Parameter: Treatment Value: 5mM SA vs. No Treatment
  misc_feature: MA Experiment ID: 20000480 Result: Up-regulated in Transcription
  misc_feature: MA Experiment 20000480 PARAMETER Experiment Name: Zm_Drought_P Parameter: Age (day) Value: 11
  misc_feature: MA Experiment 20000480 PARAMETER Experiment Name: Zm_Drought_P Parameter: Organism Value: Zea mays
  misc_feature: MA Experiment 20000480 PARAMETER Experiment Name: Zm_Drought_P Parameter: Plant Line Value: 35A19
  misc_feature: MA Experiment 20000480 PARAMETER Experiment Name: Zm_Drought_P Parameter: Timepoint (hr) Value: 72
  misc_feature: MA Experiment 20000480 PARAMETER Experiment Name: Zm_Drought_P Parameter: Tissue Value: Aerial
  misc_feature: MA Experiment 20000480 PARAMETER Experiment Name: Zm_Drought_P Parameter: Treatment Value: Drought vs. No Drought
  misc_feature: MA Experiment ID: 20000533 Result: Up-regulated in Transcription
  misc_feature: MA Experiment 20000533 PARAMETER Experiment Name: Zm_0.001percent_MeJA_P Parameter: Age (day) Value: 11
  misc_feature: MA Experiment 20000533 PARAMETER Experiment Name: Zm_0.001percent_MeJA_P Parameter: Organism Value: Zea mays
  misc_feature: MA Experiment 20000533 PARAMETER Experiment Name: Zm_0.001percent_MeJA_P Parameter: Plant Line Value: 35A19
  misc_feature: MA Experiment 20000533 PARAMETER Experiment Name: Zm_0.001percent_MeJA_P Parameter: Timepoint (hr) Value: 72
  misc_feature: MA Experiment 20000533 PARAMETER Experiment Name: Zm_0.001percent_MeJA_P Parameter: Tissue Value: Aerial
  misc_feature: MA Experiment 20000533 PARAMETER Experiment Name: Zm_0.001percent_MeJA_P Parameter: Treatment Value: 0.001percent MeJA vs. No Treatment
atctcccacctcgatccctgcactgcaagcaacaaagttctactctgtccatctagctcccaagaaaccaatccgtaccagcgctatccggccggccatggcggcggcgcgccggctctccctgcccctcgtcctgctggtcgtcctggccgtcgccgggcgcgcggcggcgcaggactacgacttcttctacctcgtgctgcagtggccgggggcctactgcgacaccaagcagagctgctgctaccccaagtccggcaagccggcggcggacttcgggatccacggcctctggcccaaccgcgacgacggcacgtacccgcagaactgcagccccgacaacgccttcaacccgtcgaaggtgagcgacctgctgagcagcctccgcgccaagtggccgacgctggcgtgcccgtccaacgacgggctgcgcttctggggccacgagtgggagaagcacggcacctgcgcagccgacgtcttcgacgagcacggctacttccaggccgcgctgcgcctccgcgaccagctgggagtcctcggcgcgctcacctccgccggcgtcaagcccgacggcggctactacacgctgagccagatcaagggcgccatccgccagggcaccggcttcgagccctacgtggagtgcaaccgcgacgaggccggcaacagccagctctaccagctctacttctgcgtcgacgccgccggcgacagcttcgtcgactgccccgtcctccccagcggcaggccctgcggcaaccggatcgagttcccggctttctaagctaactcactcttcacgtcagttgctgcaatatactgctagtccttttgcttgcattctatgcaagaggataatggaatgttcattcccc

SEQ ID NO: 6202 - protein, 263 aa, Zea mays subsp. mays
  peptide (1)..(263): Ceres Seq. ID no. 12402553
ISHLDPCTASNKVLLCPSSSQETNPYQRYPAGHGGGAPALPAPRPAGRPGRRRARGGAGLRLLLPRAAVAGGLLRHQAELLLPQVRQAGGGLRDPRPLAQPRRRHVPAELQPRQRLQPVEGERPAEQPPRQVADAGVPVQRRAALLGPRVGEARHLRSRRLRRARLLPGRAAPPRPAGSPRRAHLRRRQARRRLLHAEPDQGRHPPGHRLRALRGVQPRRGRQQPALPALLLRRRRRRQLRRLPRPPQRQALRQPDRVPGFLS

SEQ ID NO: 6203 - protein, 261 aa, Zea mays subsp. mays
  peptide (1)..(261): Ceres Seq. ID no. 12402554
  misc_feature (60)..(249): Pfam Name: Ribonuclease T2 family Pfam Description: Ribonuclease T2 family
  misc_feature (33)..(261): Homolog of NCBI NO: 11990466 NR Description: ribonuclease [Oryza sativa]
  misc_feature (37)..(261): Homolog of NCBI NO: 7435265 NR Description: ribonuclease (EC 3.1.-.-) - barley
  misc_feature (33)..(250): Homolog of NCBI NO: 11990470 NR Description: ribonuclease [Oryza sativa (japonica
  misc_feature (33)..(261): Homolog of NCBI NO: 7435266 NR Description: ribonuclease M5 (EC 3.1.-.-) precursor,
  misc_feature (33)..(261): Homolog of NCBI NO: 7768564 NR Description: RNase [Nicotiana tabacum]
  misc_feature (40)..(261): Homolog of NCBI NO: 9081845 NR Description: S-like ribonuclease [Prunus dulcis]
  misc_feature (33)..(261): Homolog of NCBI NO: 532754 NR Description: RNase NE [Nicotiana alata]
  misc_feature (45)..(261): Homolog of NCBI NO: 2148018 NR Description: ribonuclease II (EC 3.1.-.-) precursor,
  misc_feature (57)..(261): Homolog of NCBI NO: 34810726 NR Description: Chain A, Crystal Structure Of The Nicotiana Ribonuclease Nw >gi|34810727|pdb|1IYB|B Chain B, Crystal
  misc_feature (40)..(261): Homolog of NCBI NO: 2148017 NR Description: ribonuclease I (EC 3.1.-.-) precursor,
SPTSIPALQATKFYSVHLAPKKPIRTSAIRPAMAAARRLSLPLVLLVVLAVAGRAAAQDYDFFYLVLQWPGAYCDTKQSCCYPKSGKPAADFGIHGLWPNRDDGTYPQNCSPDNAFNPSKVSDLLSSLRAKWPTLACPSNDGLRFWGHEWEKHGTCAADVFDEHGYFQAALRLRDQLGVLGALTSAGVKPDGGYYTLSQIKGAIRQGTGFEPYVECNRDEAGNSQLYQLYFCVDAAGDSFVDCPVLPSGRPCGNRIEFPAF

SEQ ID NO: 6204 - protein, 229 aa, Zea mays subsp. mays
  peptide (1)..(229): Ceres Seq. ID no. 12402555
  misc_feature (28)..(217): Pfam Name: Ribonuclease T2 family Pfam Description: Ribonuclease T2 family
  misc_feature (1)..(229): Homolog of NCBI NO: 11990466 NR Description: ribonuclease [Oryza sativa]
  misc_feature (5)..(229): Homolog of NCBI NO: 7435265 NR Description: ribonuclease (EC 3.1.-.-) - barley
  misc_feature (1)..(218): Homolog of NCBI NO: 11990470 NR Description: ribonuclease [Oryza sativa (japonica
  misc_feature (1)..(229): Homolog of NCBI NO: 7435266 NR Description: ribonuclease M5 (EC 3.1.-.-) precursor,
  misc_feature (1)..(229): Homolog of NCBI NO: 7768564 NR Description: RNase [Nicotiana tabacum]
  misc_feature (8)..(229): Homolog of NCBI NO: 9081845 NR Description: S-like ribonuclease [Prunus dulcis]
  misc_feature (1)..(229): Homolog of NCBI NO: 532754 NR Description: RNase NE [Nicotiana alata]
  misc_feature (13)..(229): Homolog of NCBI NO: 2148018 NR Description: ribonuclease II (EC 3.1.-.-) precursor,
  misc_feature (25)..(229): Homolog of NCBI NO: 34810726 NR Description: Chain A, Crystal Structure Of The Nicotiana Ribonuclease Nw >gi|34810727|pdb|1IYB|B Chain B, Crystal
  misc_feature (8)..(229): Homolog of NCBI NO: 2148017 NR Description: ribonuclease I (EC 3.1.-.-) precursor,
MAAARRLSLPLVLLVVLAVAGRAAAQDYDFFYLVLQWPGAYCDTKQSCCYPKSGKPAADFGIHGLWPNRDDGTYPQNCSPDNAFNPSKVSDLLSSLRAKWPTLACPSNDGLRFWGHEWEKHGTCAADVFDEHGYFQAALRLRDQLGVLGALTSAGVKPDGGYYTLSQIKGAIRQGTGFEPYVECNRDEAGNSQLYQLYFCVDAAGDSFVDCPVLPSGRPCGNRIEFPAF

SEQ ID NO: 6205 - DNA, 1082 bp, Zea mays subsp. mays
  misc_feature (1)..(1082): Ceres Seq. ID no. 12401972
  misc_feature: MA Experiment ID: 108504 Result: Down-regulated in Transcription
  misc_feature: MA Experiment 108504 PARAMETER Experiment Name: Zm_Drought_P Parameter: Age (day) Value: 8
  misc_feature: MA Experiment 108504 PARAMETER Experiment Name: Zm_Drought_P Parameter: Organism Value: Zea mays
  misc_feature: MA Experiment 108504 PARAMETER Experiment Name: Zm_Drought_P Parameter: Plant Line Value: 35A19
  misc_feature: MA Experiment 108504 PARAMETER Experiment Name: Zm_Drought_P Parameter: Timepoint (hr) Value: 12
  misc_feature: MA Experiment 108504 PARAMETER Experiment Name: Zm_Drought_P Parameter: Tissue Value: Aerial
  misc_feature: MA Experiment 108504 PARAMETER Experiment Name: Zm_Drought_P Parameter: Treatment Value: Drought vs. No Drought
  misc_feature: MA Experiment ID: 108522 Result: Up-regulated in Transcription
  misc_feature: MA Experiment 108522 PARAMETER Experiment Name: Zm_42deg_Heat_P Parameter: Age (day) Value: 8
  misc_feature: MA Experiment 108522 PARAMETER Experiment Name: Zm_42deg_Heat_P Parameter: Organism Value: Zea mays
  misc_feature: MA Experiment 108522 PARAMETER Experiment Name: Zm_42deg_Heat_P Parameter: Plant Line Value: 35A19
  misc_feature: MA Experiment 108522 PARAMETER Experiment Name: Zm_42deg_Heat_P Parameter: Temperature (deg C) Value: 42 vs. 22
  misc_feature: MA Experiment 108522 PARAMETER Experiment Name: Zm_42deg_Heat_P Parameter: Timepoint (hr) Value: 1
  misc_feature: MA Experiment 108522 PARAMETER Experiment Name: Zm_42deg_Heat_P Parameter: Tissue Value: Aerial
  misc_feature: MA Experiment ID: 108523 Result: Up-regulated in Transcription
  misc_feature: MA Experiment 108523 PARAMETER Experiment Name: Zm_42deg_Heat_P Parameter: Age (day) Value: 8
  misc_feature: MA Experiment 108523 PARAMETER Experiment Name: Zm_42deg_Heat_P Parameter: Organism Value: Zea mays
  misc_feature: MA Experiment 108523 PARAMETER Experiment Name: Zm_42deg_Heat_P Parameter: Plant Line Value: 35A19
  misc_feature: MA Experiment 108523 PARAMETER Experiment Name: Zm_42deg_Heat_P Parameter: Temperature (deg C) Value: 42 vs. 22
  misc_feature: MA Experiment 108523 PARAMETER Experiment Name: Zm_42deg_Heat_P Parameter: Timepoint (hr) Value: 6
  misc_feature: MA Experiment 108523 PARAMETER Experiment Name: Zm_42deg_Heat_P Parameter: Tissue Value: Aerial
  misc_feature: MA Experiment ID: 108529 Result: Down-regulated in Transcription
  misc_feature: MA Experiment 108529 PARAMETER Experiment Name: Zm_Imbibed_Seeds_P Parameter: Age (day) Value: 5 vs. 2
  misc_feature: MA Experiment 108529 PARAMETER Experiment Name: Zm_Imbibed_Seeds_P Parameter: Organism Value: Zea mays
  misc_feature: MA Experiment 108529 PARAMETER Experiment Name: Zm_Imbibed_Seeds_P Parameter: Plant Line Value: 35A19
  misc_feature: MA Experiment 108529 PARAMETER Experiment Name: Zm_Imbibed_Seeds_P Parameter: Tissue Value: Roots vs. Embryo
  misc_feature: MA Experiment ID: 108534 Result: Up-regulated in Transcription
  misc_feature: MA Experiment 108534 PARAMETER Experiment Name: Zm_4deg_Cold_P Parameter: Age (hr) Value: 8
  misc_feature: MA Experiment 108534 PARAMETER Experiment Name: Zm_4deg_Cold_P Parameter: Organism Value: Zea mays
  misc_feature: MA Experiment 108534 PARAMETER Experiment Name: Zm_4deg_Cold_P Parameter: Plant Line Value: 35A19
  misc_feature: MA Experiment 108534 PARAMETER Experiment Name: Zm_4deg_Cold_P Parameter: Temperature (deg C) Value: 4 vs. 22
  misc_feature: MA Experiment 108534 PARAMETER Experiment Name: Zm_4deg_Cold_P Parameter: Timepoint (hr) Value: 6
  misc_feature: MA Experiment 108534 PARAMETER Experiment Name: Zm_4deg_Cold_P Parameter: Tissue Value: Aerial
  misc_feature: MA Experiment ID: 108535 Result: Down-regulated in Transcription
  misc_feature: MA Experiment 108535 PARAMETER Experiment Name: Zm_Meristem_P Parameter: Age (day) Value: 8
  misc_feature: MA Experiment 108535 PARAMETER Experiment Name: Zm_Meristem_P Parameter: Organism Value: Zea mays
  misc_feature: MA Experiment 108535 PARAMETER Experiment Name: Zm_Meristem_P Parameter: Plant Line Value: 35A19
  misc_feature: MA Experiment 108535 PARAMETER Experiment Name: Zm_Meristem_P Parameter: Tissue Value: Root Meristem vs. Above Root Meristem
  misc_feature: MA Experiment ID: 108536 Result: Up-regulated in Transcription
  misc_feature: MA Experiment 108536 PARAMETER Experiment Name: Zm_Meristem_P Parameter: Age (day) Value: 8
  misc_feature: MA Experiment 108536 PARAMETER Experiment Name: Zm_Meristem_P Parameter: Organism Value: Zea mays
  misc_feature: MA Experiment 108536 PARAMETER Experiment Name: Zm_Meristem_P Parameter: Plant Line Value: 35A19
  misc_feature: MA Experiment 108536 PARAMETER Experiment Name: Zm_Meristem_P Parameter: Tissue Value: Shoot Meristem vs. Above Shoot Meristem
  misc_feature: MA Experiment ID: 108543 Result: Down-regulated in Transcription
  misc_feature: MA Experiment ID: 108687 Result: Down-regulated in Transcription
  misc_feature: MA Experiment 108687 PARAMETER Experiment Name: Zm_Embryos-Flowers__P Parameter: Tissue Value: Embryo vs. Aerial+
  misc_feature: MA Experiment ID: 108688 Result: Down-regulated in Transcription
  misc_feature: MA Experiment 108688 PARAMETER Experiment Name: Zm_Embryos-Flowers__P Parameter: Tissue Value: Immature Flowers vs. Aerial+
  misc_feature: MA Experiment ID: 20000479 Result: Down-regulated in Transcription
  misc_feature: MA Experiment 20000479 PARAMETER Experiment Name: Zm_Drought_P Parameter: Age (day) Value: 10
  misc_feature: MA Experiment 20000479 PARAMETER Experiment Name: Zm_Drought_P Parameter: Organism Value: Zea mays
  misc_feature: MA Experiment 20000479 PARAMETER Experiment Name: Zm_Drought_P Parameter: Plant Line Value: 35A19
  misc_feature: MA Experiment 20000479 PARAMETER Experiment Name: Zm_Drought_P Parameter: Timepoint (hr) Value: 48
  misc_feature: MA Experiment 20000479 PARAMETER Experiment Name: Zm_Drought_P Parameter: Tissue Value: Aerial
  misc_feature: MA Experiment 20000479 PARAMETER Experiment Name: Zm_Drought_P Parameter: Treatment Value: Drought vs. No Drought
  misc_feature: MA Experiment ID: 20000480 Result: Down-regulated in Transcription
  misc_feature: MA Experiment 20000480 PARAMETER Experiment Name: Zm_Drought_P Parameter: Age (day) Value: 11
  misc_feature: MA Experiment 20000480 PARAMETER Experiment Name: Zm_Drought_P Parameter: Organism Value: Zea mays
  misc_feature: MA Experiment 20000480 PARAMETER Experiment Name: Zm_Drought_P Parameter: Plant Line Value: 35A19
  misc_feature: MA Experiment 20000480 PARAMETER Experiment Name: Zm_Drought_P Parameter: Timepoint (hr) Value: 72
  misc_feature: MA Experiment 20000480 PARAMETER Experiment Name: Zm_Drought_P Parameter: Tissue Value: Aerial
  misc_feature: MA Experiment 20000480 PARAMETER Experiment Name: Zm_Drought_P Parameter: Treatment Value: Drought vs. No Drought
  misc_feature: MA Experiment ID: 20000492 Result: Down-regulated in Transcription
  misc_feature: MA Experiment 20000492 PARAMETER Experiment Name: Zm_Hybrid_Seed_Dev_P Parameter: DAP Value: 12
  misc_feature: MA Experiment 20000492 PARAMETER Experiment Name: Zm_Hybrid_Seed_Dev_P Parameter: Organism Value: Zea mays
  misc_feature: MA Experiment 20000492 PARAMETER Experiment Name: Zm_Hybrid_Seed_Dev_P Parameter: Plant Line Value: 35A19
  misc_feature: MA Experiment 20000492 PARAMETER Experiment Name: Zm_Hybrid_Seed_Dev_P Parameter: Tissue Value: Fert Kernel vs. Unfert Floret
  misc_feature: MA Experiment ID: 20000535 Result: Down-regulated in Transcription
  misc_feature: MA Experiment 20000535 PARAMETER Experiment Name: Zm_Hybrid_Seed_Dev_P Parameter: DAP Value: 30 vs. 12
  misc_feature: MA Experiment 20000535 PARAMETER Experiment Name: Zm_Hybrid_Seed_Dev_P Parameter: Organism Value: Zea mays
  misc_feature: MA Experiment 20000535 PARAMETER Experiment Name: Zm_Hybrid_Seed_Dev_P Parameter: Plant Line Value: 35A19
  misc_feature: MA Experiment 20000535 PARAMETER Experiment Name: Zm_Hybrid_Seed_Dev_P Parameter: Tissue Value: Embryo vs. Unfert Floret
ccatcagcgatccttctctcttgagtgtcctcccatctcatccaatccatccccgccaccacaggcaaaggcaacccaaaaggagccgccatgggctcccgctacgaggtggaggtgacggtggggtcggcgagcaacctgaagaacgtcaactggcgcaacggcgacctccggccctacgccgtgctgtgggtggacgacgggcccaagtgctccacccgcgtcgaccccgacaacggcgaggaccccgtgtgggacgagaaggtggtggtccccgtcccgcccgcctccgccgcgcgcctgggcgacgccgtcctccacatcgacgtcgtccacgccgccggcgacgacgccgacgccgtcaagccgctcgtgggctccgcgcgcctcccgctccgcgacgtcctcgatgacgccggcggcgtcggcggcgccagggtctcgcgcacgctcaggctgaagcggccctcgggccgcccgcagggccggctcnaggcccgcgtcgccgtccgcgaggccgcgccgccgccgcgctactacgacccgaacccgtacccggcgcccgcgtacgggaaccccgnnnncgccnncgacccgtactacgcggcgccgccggcgtacggcggacangccgccgtacgccgcgccgccggtggggtacccggccnacgctcctcctcctacggcggtggttatggctacggagctgctgctccgacggcgtacggcgctgaggctgctccactacctgcccagcagcagaagagcagcaagatggggatggggacggggctggccgtgggcgccgcggcggggctgctgggcggcctcgcgctggcggaaggggcgagctacgtggaggacaagttcgaggatcgcgtcgccgagagggtggaggaggagacgttcggcgacggagattacgatgacgattactagaatgaagcaggtcggagaggagatcatgatcatgcatacggaaccgaaatccaggcaacaagtcgaagtcgagtagctcaaatgtattcaaataataagtgagatcaccccagtcgagaaaaaaaatcaaaacttgaaccatg

SEQ ID NO: 6206 - protein, 282 aa, Zea mays subsp. mays
  peptide (1)..(282): Ceres Seq. ID no. 12401973
  misc_feature (7)..(98): Pfam Name: C2 domain Pfam Description: C2 domain
  misc_feature (1)..(268): Homolog of NCBI NO: 34908388 NR Description: P0529E05.20 [Oryza sativa (japonica
  misc_feature (6)..(188): Homolog of NCBI NO: 10176862 NR Description: emb|CAB80929.1~gene_id:MRO11.1~similar to unknown
  misc_feature (6)..(188): Homolog of NCBI NO: 30689212 NR Description: C2 domain-containing protein [Arabidopsis
  misc_feature (6)..(175): Homolog of NCBI NO: 18390752 NR Description: extensin-related; protein id: At1g07310.1, by cDNA: gi_15451131, supported by cDNA: gi_20148320 [Arabidopsis >gi|8778551|gb|AAF79559.1|AC022464_17 F22G5.35 [Arabidopsis
  misc_feature (135)..(135): Xaa is any aa, unknown or other
  misc_feature (164)..(164): Xaa is any aa, unknown or other
  misc_feature (165)..(165): Xaa is any aa, unknown or other
  misc_feature (167)..(167): Xaa is any aa, unknown or other
  misc_feature (180)..(180): Xaa is any aa, unknown or other
  misc_feature (193)..(193): Xaa is any aa, unknown or other
MGSRYEVEVTVGSASNLKNVNWRNGDLRPYAVLWVDDGPKCSTRVDPDNGEDPVWDEKVVVPVPPASAARLGDAVLHIDVVHAAGDDADAVKPLVGSARLPLRDVLDDAGGVGGARVSRTLRLKRPSGRPQGRLXARVAVREAAPPPRYYDPNPYPAPAYGNPXXAXDPYYAAPPAYGGXAAVRRAAGGVPGXRSSSYGGGYGYGAAAPTAYGAEAAPLPAQQQKSSKMGMGTGLAVGAAAGLLGGLALAEGASYVEDKFEDRVAERVEEETFGDGDYDDDY

SEQ ID NO: 6207 - DNA, 1060 bp, Zea mays subsp. mays
  misc_feature (1)..(1060): Ceres Seq. ID no. 12350534
  misc_feature: MA Experiment ID: 20000535 Result: Down-regulated in Transcription
  misc_feature: MA Experiment 20000535 PARAMETER Experiment Name: Zm_Hybrid_Seed_Dev_P Parameter: DAP Value: 30 vs. 12
  misc_feature: MA Experiment 20000535 PARAMETER Experiment Name: Zm_Hybrid_Seed_Dev_P Parameter: Organism Value: Zea mays
  misc_feature: MA Experiment 20000535 PARAMETER Experiment Name: Zm_Hybrid_Seed_Dev_P Parameter: Plant Line Value: 35A19
  misc_feature: MA Experiment 20000535 PARAMETER Experiment Name: Zm_Hybrid_Seed_Dev_P Parameter: Tissue Value: Embryo vs. Unfert Floret
gcaaaccgcgtctcgcgcgaagaatccgcatttccccttccccgcaccgcaccgcaccgcacccaacccccgtcggagagagagatggcatcggtggcggagatgcagcccctcgcgccggcggggtaccgccgcgcgccggagatgaaggagaaggtggaggcgtcggtggtggacctggaggccgggaccggggagacgctgtacccggggatctcgcgcggggagagcgccctccgatggggcttcgtccgcaaggtctacggcatcctcgctgcgcagctgctcctcaccaccgccgtctccgccctcaccgttctccaccccaccctcaacgccacgctctccgactccccgggcctcgcgctcgtgctcgccgtcctgcccttcatcctgatgatcccattgtaccattatcagcacaagcacccacacaatttcgttttcctgggtctgttcacgttgtgcttgagcttcagcatcggcgtggcttgtgctaacacccaaggaaaaatcgttctggaggctttagtgctgacggctggcgtggtggtttctctgactgcgtatgctttctgggcgtcaaagaagggcaaggaatttgggtacctggggcctatcctgtcttccgcgcttactatcctcgtcctaactagctttcttcaggttttcttcccactgggacccgtgtcggtgggcttgttcggtggtctaggggctctggtcttctcaggcttcatcctgtacgacaccgagaacctgatcaagcgccacacctacgacgagtacatctgggcgtcggttgggctgtacctcgacatcctgaacctgttcctctccatcctgaacatgctcaggagcatgcaatccgacaactagcctcttgatcgaacacggtatacccccatggtaaatgcggtcctgtgctctggttgttagaggacgggatcgacgtgcgacatatgtattgtgtgagcccactcgtgtcaacactgcaaacaattgtggtcatgtcaccttgtatgttcttggtcacttttcaaacaattgtaagtacctc

SEQ ID NO: 6208 - protein, 292 aa, Zea mays subsp. mays
  peptide (1)..(292): Ceres Seq. ID no. 12350535
  misc_feature (76)..(286): Pfam Name: Uncharacterised protein family UPF0005 Pfam Description: Uncharacterised protein family UPF0005
  misc_feature (58)..(292): Homolog of NCBI NO: 18414455 NR Description: Expressed protein; protein id: At4g15470.1, by cDNA: gi_15215826, supported by cDNA: gi_15810200, supported cDNA: gi_20453266 [Arabidopsis thaliana]
  misc_feature (58)..(250): Homolog of NCBI NO: 15810201 NR Description: AT4g15470/dl3775w [Arabidopsis thaliana]
  misc_feature (59)..(287): Homolog of NCBI NO: 34393841 NR Description: putative z-protein [Oryza sativa (japonica
  misc_feature (59)..(290): Homolog of NCBI NO: 15229411 NR Description: putative protein; protein id: At3g63310.1
  misc_feature (59)..(289): Homolog of NCBI NO: 15218701 NR Description: putative glutamate/aspartate-binding peptide;
  misc_feature (59)..(289): Homolog of NCBI NO: 15235466 NR Description: putative glutamate-/aspartate-binding peptide; id: At4g02690.1 [Arabidopsis thaliana] >gi|7486855|pir||T01080
  misc_feature (68)..(290): Homolog of NCBI NO: 14626300 NR Description: putative receptor-associated protein [Oryza
  misc_feature (58)..(133): Homolog of NCBI NO: 7485070 NR Description: hypothetical protein - Arabidopsis thaliana hypothetical protein [Arabidopsis thaliana]
  misc_feature (170)..(241): Homolog of NCBI NO: 7485070 NR Description: hypothetical protein - Arabidopsis thaliana hypothetical protein [Arabidopsis thaliana]
  misc_feature (130)..(170): Homolog of NCBI NO: 7485070 NR Description: hypothetical protein - Arabidopsis thaliana hypothetical protein [Arabidopsis thaliana]
ANRVSREESAFPLPRTAPHRTQPPSEREMASVAEMQPLAPAGYRRAPEMKEKVEASVVDLEAGTGETLYPGISRGESALRWGFVRKVYGILAAQLLLTTAVSALTVLHPTLNATLSDSPGLALVLAVLPFILMIPLYHYQHKHPHNFVFLGLFTLCLSFSIGVACANTQGKIVLEALVLTAGVVVSLTAYAFWASKKGKEFGYLGPILSSALTILVLTSFLQVFFPLGPVSVGLFGGLGALVFSGFILYDTENLIKRHTYDEYIWASVGLYLDILNLFLSILNMLRSMQSDN

SEQ ID NO: 6209 - protein, 264 aa, Zea mays subsp. mays; identical to SEQ ID NO: 5153
  peptide (1)..(264): Ceres Seq. ID no. 12350536
  misc_feature (48)..(258): Pfam Name: Uncharacterised protein family UPF0005 Pfam Description: Uncharacterised protein family UPF0005
  misc_feature (30)..(264): Homolog of NCBI NO: 18414455 NR Description: Expressed protein; protein id: At4g15470.1, by cDNA: gi_15215826, supported by cDNA: gi_15810200, supported cDNA: gi_20453266 [Arabidopsis thaliana]
  misc_feature (30)..(222): Homolog of NCBI NO: 15810201 NR Description: AT4g15470/dl3775w [Arabidopsis thaliana]
  misc_feature (31)..(259): Homolog of NCBI NO: 34393841 NR Description: putative z-protein [Oryza sativa (japonica
  misc_feature (31)..(262): Homolog of NCBI NO: 15229411 NR Description: putative protein; protein id: At3g63310.1
  misc_feature (31)..(261): Homolog of NCBI NO: 15218701 NR Description: putative glutamate/aspartate-binding peptide;
  misc_feature (31)..(261): Homolog of NCBI NO: 15235466 NR Description: putative glutamate-/aspartate-binding peptide; id: At4g02690.1 [Arabidopsis thaliana] >gi|7486855|pir||T01080
  misc_feature (40)..(262): Homolog of NCBI NO: 14626300 NR Description: putative receptor-associated protein [Oryza
  misc_feature (30)..(105): Homolog of NCBI NO: 7485070 NR Description: hypothetical protein - Arabidopsis thaliana hypothetical protein [Arabidopsis thaliana]
  misc_feature (142)..(213): Homolog of NCBI NO: 7485070 NR Description: hypothetical protein - Arabidopsis thaliana hypothetical protein [Arabidopsis thaliana]
  misc_feature (102)..(142): Homolog of NCBI NO: 7485070 NR Description: hypothetical protein - Arabidopsis thaliana hypothetical protein [Arabidopsis thaliana]

SEQ ID NO: 6210 - protein, 258 aa, Zea mays subsp. mays; identical to SEQ ID NO: 5154
  peptide (1)..(258): Ceres Seq. ID no. 12350537
  misc_feature (42)..(252): Pfam Name: Uncharacterised protein family UPF0005 Pfam Description: Uncharacterised protein family UPF0005
  misc_feature (24)..(258): Homolog of NCBI NO: 18414455 NR Description: Expressed protein; protein id: At4g15470.1, by cDNA: gi_15215826, supported by cDNA: gi_15810200, supported cDNA: gi_20453266 [Arabidopsis thaliana]
  misc_feature (24)..(216): Homolog of NCBI NO: 15810201 NR Description: AT4g15470/dl3775w [Arabidopsis thaliana]
  misc_feature (25)..(253): Homolog of NCBI NO: 34393841 NR Description: putative z-protein [Oryza sativa (japonica
  misc_feature (25)..(256): Homolog of NCBI NO: 15229411 NR Description: putative protein; protein id: At3g63310.1
  misc_feature (25)..(255): Homolog of NCBI NO: 15218701 NR Description: putative glutamate/aspartate-binding peptide;
  misc_feature (25)..(255): Homolog of NCBI NO: 15235466 NR Description: putative glutamate-/aspartate-binding peptide; id: At4g02690.1 [Arabidopsis thaliana] >gi|7486855|pir||T01080
  misc_feature (34)..(256): Homolog of NCBI NO: 14626300 NR Description: putative receptor-associated protein [Oryza
  misc_feature (24)..(99): Homolog of NCBI NO: 7485070 NR Description: hypothetical protein - Arabidopsis thaliana hypothetical protein [Arabidopsis thaliana]
  misc_feature (136)..(207): Homolog of NCBI NO: 7485070 NR Description: hypothetical protein - Arabidopsis thaliana hypothetical protein [Arabidopsis thaliana]
  misc_feature (96)..(136): Homolog of NCBI NO: 7485070 NR Description: hypothetical protein - Arabidopsis thaliana hypothetical protein [Arabidopsis thaliana]

SEQ ID NO: 6211 - DNA, 1251 bp, Zea mays subsp. mays
  misc_feature (1)..(1251): Ceres Seq. ID no. 12402548
  misc_feature: MA Experiment ID: 20000534 Result: Down-regulated in Transcription
  misc_feature: MA Experiment 20000534 PARAMETER Experiment Name: Zm_Hybrid_Pollen_P Parameter: Age (day) Value: 8
  misc_feature: MA Experiment 20000534 PARAMETER Experiment Name: Zm_Hybrid_Pollen_P Parameter: Organism Value: Zea mays
  misc_feature: MA Experiment 20000534 PARAMETER Experiment Name: Zm_Hybrid_Pollen_P Parameter: Plant Line Value: 35A19
  misc_feature: MA Experiment 20000534 PARAMETER Experiment Name: Zm_Hybrid_Pollen_P Parameter: Tissue Value: Pollen vs. Aerial
aatctagcatcagcgcgcggggtctgagagcagagcggcagggcgccatggcggcatcggtggcgctgagcagcgggcaccggatgccggcggtggggctgggcgtgtggcggatggagaaggcggacatccgcggcctcatccacacagcgctccgcgtcggctaccgccacctggactgcgccgctgactaccagaacgaagctgaagttggtgacgcgctcgcagaggcattccagaccggactcgtcaagcgggaggacctgttcatcacaaccaagctgtggaactcagaccatgggcatgtgcttgaagcctgcaaggacagcctgaagaagctgcagctagactatctcgacctctacctcatccatttcccagtagccactcggcacaccggagtcggcacgacttctagcgctctgggtgacgatggcgtgctggacatcgacaccactatctccctggaaacgacatggcacgcgatggaagagcttgtttccatggggctggtgcgcagcattggaatcagcaactacgacatcttcctcaccagagactgcctggcctacgccaagataaagccggcggtgaaccagatcgagacgcacccctacttccagcgcgactcacttgtcaagttctgccagaagcacgggatctgcgtgaccgcgcacaccccgctgggtggctccaccgccaacgccgagtggttcgggacggtctcgtgcctggacgaccctgtcatcaagagcttggctgataagtacggcaagacgccggcgcagctcgtcctccgctggggtctgcagcgggacacggtggtgatccccaagacctccaaggtggagaggctgcaggagaactttgacgtcttcggtttcgacatctccggcgaggacatggagaggatgaaggccatcgaccggaagtaccggactaaccagcctgccaagttctggggcatcgacctctatgcttagcttttagttcggttgcgttgcgtcgcgtactcgcgtgctgcgtctctcggcccccccagacaagacagcatcaataatgaggataccctcagacggcatcagtcaaagtcatgaggatctcagacagcatcttccatcacatgtgacggtgtgaggttgatggtagggtttggtatccccacgtgtccctctctctttcagctcagctaatcatcaccatgtagactacgcagtgtttgcctccgattatttactgtttttcttcctt

SEQ ID NO: 6212 - protein, 326 aa, Zea mays subsp. mays
  peptide (1)..(326): Ceres Seq. ID no. 12402549
  misc_feature (20)..(326): Homolog of NCBI NO: 15226489 NR Description: mannose 6-phosphate reductase (NADPH-dependent), protein id: At2g21250.1, supported by cDNA: 33., supported by
  misc_feature (20)..(326): Homolog of NCBI NO: 21592829 NR Description: putative NADPH dependent mannose 6-phosphate
  misc_feature (20)..(326): Homolog of NCBI NO: 15226502 NR Description: mannose 6-phosphate reductase (NADPH-dependent), protein id: At2g21260.1, supported by cDNA: 21730. [Arabidopsis
  misc_feature (20)..(326): Homolog of NCBI NO: 10334991 NR Description: NADPH-dependent mannose 6-phosphate reductase
  misc_feature (20)..(326): Homolog of NCBI NO: 21554266 NR Description: putative NADPH dependent mannose 6-phosphate
  misc_feature (19)..(326): Homolog of NCBI NO: 1835701 NR Description: NADPH-dependent mannose 6-phosphate reductase
  misc_feature (18)..(326): Homolog of NCBI NO: 134153 NR Description: NADP-dependent D-sorbitol-6-phosphate
  misc_feature (62)..(326): Homolog of NCBI NO: 19310926 NR Description: NADP dependent sorbitol 6-phosphate dehydrogenase
  misc_feature (62)..(326): Homolog of NCBI NO: 19310928 NR Description: NADP dependent sorbitol 6-phosphate dehydrogenase
  misc_feature (62)..(326): Homolog of NCBI NO: 19310934 NR Description: NADP dependent sorbitol 6-phosphate dehydrogenase
SSISARGLRAERQGAMAASVALSSGHRMPAVGLGVWRMEKADIRGLIHTALRVGYRHLDCAADYQNEAEVGDALAEAFQTGLVKREDLFITTKLWNSDHGHVLEACKDSLKKLQLDYLDLYLIHFPVATRHTGVGTTSSALGDDGVLDIDTTISLETTWHAMEELVSMGLVRSIGISNYDIFLTRDCLAYAKIKPAVNQIETHPYFQRDSLVKFCQKHGICVTAHTPLGGSTANAEWFGTVSCLDDPVIKSLADKYGKTPAQLVLRWGLQRDTVVIPKTSKVERLQENFDVFGFDISGEDMERMKAIDRKYRTNQPAKFWGIDLYA

SEQ ID NO: 6213 - protein, 311 aa, Zea mays subsp. mays
  peptide (1)..(311): Ceres Seq. ID no. 12402550
  misc_feature (5)..(311): Homolog of NCBI NO: 15226489 NR Description: mannose 6-phosphate reductase (NADPH-dependent), protein id: At2g21250.1, supported by cDNA: 33., supported by
  misc_feature (5)..(311): Homolog of NCBI NO: 21592829 NR Description: putative NADPH dependent mannose 6-phosphate
  misc_feature (5)..(311): Homolog of NCBI NO: 15226502 NR Description: mannose 6-phosphate reductase (NADPH-dependent), protein id: At2g21260.1, supported by cDNA: 21730. [Arabidopsis
  misc_feature (5)..(311): Homolog of NCBI NO: 10334991 NR Description: NADPH-dependent mannose 6-phosphate reductase
  misc_feature (5)..(311): Homolog of NCBI NO: 21554266 NR Description: putative NADPH dependent mannose 6-phosphate
  misc_feature (4)..(311): Homolog of NCBI NO: 1835701 NR Description: NADPH-dependent mannose 6-phosphate reductase
  misc_feature (3)..(311): Homolog of NCBI NO: 134153 NR Description: NADP-dependent D-sorbitol-6-phosphate
  misc_feature (47)..(311): Homolog of NCBI NO: 19310926 NR Description: NADP dependent sorbitol 6-phosphate dehydrogenase
  misc_feature (47)..(311): Homolog of NCBI NO: 19310928 NR Description: NADP dependent sorbitol 6-phosphate dehydrogenase
  misc_feature (47)..(311): Homolog of NCBI NO: 19310934 NR Description: NADP dependent sorbitol 6-phosphate dehydrogenase
MAASVALSSGHRMPAVGLGVWRMEKADIRGLIHTALRVGYRHLDCAADYQNEAEVGDALAEAFQTGLVKREDLFITTKLWNSDHGHVLEACKDSLKKLQLDYLDLYLIHFPVATRHTGVGTTSSALGDDGVLDIDTTISLETTWHAMEELVSMGLVRSIGISNYDIFLTRDCLAYAKIKPAVNQIETHPYFQRDSLVKFCQKHGICVTAHTPLGGSTANAEWFGTVSCLDDPVIKSLADKYGKTPAQLVLRWGLQRDTVVIPKTSKVERLQENFDVFGFDISGEDMERMKAIDRKYRTNQPAKFWGIDLYA

SEQ ID NO: 6214 - protein, 299 aa, Zea mays subsp. mays
  peptide (1)..(299): Ceres Seq. ID no. 12402551
  misc_feature (1)..(299): Homolog of NCBI NO: 15226489 NR Description: mannose 6-phosphate reductase (NADPH-dependent), protein id: At2g21250.1, supported by cDNA: 33., supported by
  misc_feature (1)..(299): Homolog of NCBI NO: 21592829 NR Description: putative NADPH dependent mannose 6-phosphate
  misc_feature (1)..(299): Homolog of NCBI NO: 15226502 NR Description: mannose 6-phosphate reductase (NADPH-dependent), protein id: At2g21260.1, supported by cDNA: 21730. [Arabidopsis
  misc_feature (1)..(299): Homolog of NCBI NO: 10334991 NR Description: NADPH-dependent mannose 6-phosphate reductase
  misc_feature (1)..(299): Homolog of NCBI NO: 21554266 NR Description: putative NADPH dependent mannose 6-phosphate
  misc_feature (1)..(299): Homolog of NCBI NO: 1835701 NR Description: NADPH-dependent mannose 6-phosphate reductase
  misc_feature (1)..(299): Homolog of NCBI NO: 134153 NR Description: NADP-dependent D-sorbitol-6-phosphate
  misc_feature (35)..(299): Homolog of NCBI NO: 19310926 NR Description: NADP dependent sorbitol 6-phosphate dehydrogenase
  misc_feature (35)..(299): Homolog of NCBI NO: 19310928 NR Description: NADP dependent sorbitol 6-phosphate dehydrogenase
  misc_feature (35)..(299): Homolog of NCBI NO: 19310934 NR Description: NADP dependent sorbitol 6-phosphate dehydrogenase
MPAVGLGVWRMEKADIRGLIHTALRVGYRHLDCAADYQNEAEVGDALAEAFQTGLVKREDLFITTKLWNSDHGHVLEACKDSLKKLQLDYLDLYLIHFPVATRHTGVGTTSSALGDDGVLDIDTTISLETTWHAMEELVSMGLVRSIGISNYDIFLTRDCLAYAKIKPAVNQIETHPYFQRDSLVKFCQKHGICVTAHTPLGGSTANAEWFGTVSCLDDPVIKSLADKYGKTPAQLVLRWGLQRDTVVIPKTSKVERLQENFDVFGFDISGEDMERMKAIDRKYRTNQPAKFWGIDLYA

SEQ ID NO: 6215 - DNA, 629 bp, Zea mays subsp. mays
  misc_feature (1)..(629): Ceres Seq. ID no. 12372485
  misc_feature: MA Experiment ID: 20000488 Result: Up-regulated in Transcription
  misc_feature: MA Experiment 20000488 PARAMETER Experiment Name: Zm_50mM_NH4NO3_L_to_H_P Parameter: Organism Value: Zea mays
  misc_feature: MA Experiment 20000488 PARAMETER Experiment Name: Zm_50mM_NH4NO3_L_to_H_P Parameter: Timepoint (hr) Value: 8
  misc_feature: MA Experiment 20000488 PARAMETER Experiment Name: Zm_50mM_NH4NO3_L_to_H_P Parameter: Tissue Value: Leaves
  misc_feature: MA Experiment 20000488 PARAMETER Experiment Name: Zm_50mM_NH4NO3_L_to_H_P Parameter: Treatment Value: 50mM NH4NO3 vs. 100mM Mannitol
atgatggtgtcaagctttgggatcttcggaaattaagaaattttaggaccttctctccctatgattcagatacgccaacaaatactgtggaatttgattttagtggaaactatcttgccattggtggttcagatataagggtctaccaagtagctaatgttaaggccgaatggaatctcatcaagacattaccagatttatctggaacagggaaagtaacttcggtaaagttcggagcagatgctaagtacatagccgtaggttctatggaccgcaatctacggatatttggcctccctggagacgaccaaatggaggaatcaaccacagcggcagagtgaggaaaatccatggttatcagcattcattgtctatttggccactgtcgagaggtaatccacggagacacaccgctggcgcccgtgacacttggcctgtttggttacttgctaaaaattgctacacatttttgtgccacacttgtttaagcacacttgtttaaggtgtttaaggttatacgctcaaattccgcgtcacagcttgtttgtcactcataagagaatattgcctgtaaaatgagagtctgaacgacttgcccgtaaaatgagatggaaaatcagttagctgct

SEQ ID NO: 6216 - protein, 112 aa, Zea mays subsp. mays
  peptide (1)..(112): Ceres Seq. ID no. 12372486
  misc_feature (1)..(112): Homolog of NCBI NO: 37535206 NR Description: putative WD-repeat containing protein [Oryza
  misc_feature (1)..(107): Homolog of NCBI NO: 18390401 NR Description: putative pre-mRNA splicing factor PRP19; protein At1g04510.1, supported by cDNA: gi_14532631 [Arabidopsis
  misc_feature (1)..(92): Homolog of NCBI NO: 30685653 NR Description: transducin / WD-40 repeat protein family
  misc_feature (1)..(92): Homolog of NCBI NO: 25408261 NR Description: probable PRP19-like spliceosomal protein
  misc_feature (1)..(92): Homolog of NCBI NO: 30685651 NR Description: transducin / WD-40 repeat protein family
  misc_feature (47)..(107): Homolog of NCBI NO: 25406791 NR Description: hypothetical protein [imported] - Arabidopsis
  misc_feature (1)..(32): Homolog of NCBI NO: 25406791 NR Description: hypothetical protein [imported] - Arabidopsis
  misc_feature (3)..(98): Homolog of NCBI NO: 28278498 NR Description: Similar to nuclear matrix protein NMP200 related
  misc_feature (3)..(97): Homolog of NCBI NO: 29841245 NR Description: similar to NM_079059 GTP-binding-protein in
  misc_feature (3)..(98): Homolog of NCBI NO: 17647459 NR Description: GTP-binding-protein CG5519-PA [Drosophila >gi|5679074|gb|AAD46846.1|AF160906_1 BcDNA.LD02793 [Drosophila
DGVKLWDLRKLRNFRTFSPYDSDTPTNTVEFDFSGNYLAIGGSDIRVYQVANVKAEWNLIKTLPDLSGTGKVTSVKFGADAKYIAVGSMDRNLRIFGLPGDDQMEESTTAAE

SEQ ID NO: 6217 - DNA, 888 bp, Zea mays subsp. mays
  misc_feature (1)..(888): Ceres Seq. ID no. 12402297
  misc_feature: MA Experiment ID: 108535 Result: Up-regulated in Transcription
  misc_feature: MA Experiment 108535 PARAMETER Experiment Name: Zm_Meristem_P Parameter: Age (day) Value: 8
  misc_feature: MA Experiment 108535 PARAMETER Experiment Name: Zm_Meristem_P Parameter: Organism Value: Zea mays
  misc_feature: MA Experiment 108535 PARAMETER Experiment Name: Zm_Meristem_P Parameter: Plant Line Value: 35A19
  misc_feature: MA Experiment 108535 PARAMETER Experiment Name: Zm_Meristem_P Parameter: Tissue Value: Root Meristem vs. Above Root Meristem
  misc_feature: MA Experiment ID: 20000535 Result: Up-regulated in Transcription
  misc_feature: MA Experiment 20000535 PARAMETER Experiment Name: Zm_Hybrid_Seed_Dev_P Parameter: DAP Value: 30 vs. 12
  misc_feature: MA Experiment 20000535 PARAMETER Experiment Name: Zm_Hybrid_Seed_Dev_P Parameter: Organism Value: Zea mays
  misc_feature: MA Experiment 20000535 PARAMETER Experiment Name: Zm_Hybrid_Seed_Dev_P Parameter: Plant Line Value: 35A19
  misc_feature: MA Experiment 20000535 PARAMETER Experiment Name: Zm_Hybrid_Seed_Dev_P Parameter: Tissue Value: Embryo vs. Unfert Floret
acaaaataagttctgcggcggcgatggcgctctcctcctcccggccgaagcacctcctgcgccccctcctgcggggtttccacgcctcagcgcgggccctggcgcgggtggagccgcacgagttctccaagcccagcgagtacctgggcagctgggagcccgcggcggagcctcgggaggcgtgggcgcggctggaccggctgcgcaaggggtacgcgagcgaggtgcgggagctgcggcggcagtacgcctacgaggtgcagctgttgcaggccgagcggcagcggaaggccgacgccagagccgaggccgcccgcgccgccaaccaggagcgcaaggccgccaagctcgccgccgcccagacgcgcgccgccgagcgccgcgcgttcgaggaggacttccgccagaccctcatgaaagaaagagctgagaagctggagagctggcggaagaaggagaagcgcaaagaggagaagaaggcaataaagaaggagctcctgcgcaggaagagcagcatgtggctttctgaagataagattgaagaacaaatacaaactgctatcatgcaaaccactcctctatgaggttggttctgcgaggaaagctgataatagtagcttgcgaatcatgaggaggggggtggacatcacatggacgtgctcgtcgttacctgtgagaagctaataagaacggacctggtatttggcgtggaaaaggccgtgtgtttatttagttagacttgatcacaccaaaagctgtgcctggagagatggctgaatctgctgtgccttcctttttcacgatccatttgttgttctcgtctgcttaaactcttggcgtgatctggacggaacatatttttggcaattttcttgacgaagaatgacc

SEQ ID NO: 6218 - protein, 193 aa, Zea mays subsp. mays
  peptide (1)..(193): Ceres Seq. ID no. 12402298
  misc_feature (77)..(182): Pfam Name: Troponin Pfam Description: Troponin
  misc_feature (23)..(193): Homolog of NCBI NO: 18423002 NR Description: expressed protein; protein id: At5g49210.1, by cDNA: 31573., supported by cDNA: gi_15724194, supported by gi_20453328 [Arabidopsis thaliana]
  misc_feature (23)..(193): Homolog of NCBI NO: 21618271 NR Description: unknown [Arabidopsis thaliana]
  misc_feature (23)..(138): Homolog of NCBI NO: 10177150 NR Description: gene_id:K21P3.8~unknown protein [Arabidopsis
KISSAAAMALSSSRPKHLLRPLLRGFHASARALARVEPHEFSKPSEYLGSWEPAAEPREAWARLDRLRKGYASEVRELRRQYAYEVQLLQAERQRKADARAEAARAANQERKAAKLAAAQTRAAERRAFEEDFRQTLMKERAEKLESWRKKEKRKEEKKAIKKELLRRKSSMWLSEDKIEEQIQTAIMQTTPL

SEQ ID NO: 6219 - protein, 186 aa, Zea mays subsp. mays
  peptide (1)..(186): Ceres Seq. ID no. 12402299
  misc_feature (70)..(175): Pfam Name: Troponin Pfam Description: Troponin
  misc_feature (16)..(186): Homolog of NCBI NO: 18423002 NR Description: expressed protein; protein id: At5g49210.1, by cDNA: 31573., supported by cDNA: gi_15724194, supported by gi_20453328 [Arabidopsis thaliana]
  misc_feature (16)..(186): Homolog of NCBI NO: 21618271 NR Description: unknown [Arabidopsis thaliana]
  misc_feature (16)..(131): Homolog of NCBI NO: 10177150 NR Description: gene_id:K21P3.8~unknown protein [Arabidopsis
MALSSSRPKHLLRPLLRGFHASARALARVEPHEFSKPSEYLGSWEPAAEPREAWARLDRLRKGYASEVRELRRQYAYEVQLLQAERQRKADARAEAARAANQERKAAKLAAAQTRAAERRAFEEDFRQTLMKERAEKLESWRKKEKRKEEKKAIKKELLRRKSSMWLSEDKIEEQIQTAIMQTTPL

SEQ ID NO: 6220 - protein, 142 aa, Zea mays subsp. mays
  peptide (1)..(142): Ceres Seq. ID no. 12402300
  misc_feature (12)..(133): Homolog of NCBI NO: 37533904 NR Description: Red chlorophyll catabolite reductase [Oryza
  misc_feature (12)..(133): Homolog of NCBI NO: 14018063 NR Description: Putative red chlorophyll catabolite reductase
QNKFCGGDGALLLPAEAPPAPPPAGFPRLSAGPGAGGAARVLQAQRVPGQLGARGGASGGVGAAGPAAQGVRERGAGAAAAVRLRGAAVAGRAAAEGRRQSRGRPRRQPGAQGRQARRRPDARRRAPRVRGGLPPDPHERKS

SEQ ID NO: 6221 - DNA, 1401 bp, Zea mays subsp. mays
  misc_feature (1)..(1401): Ceres Seq. ID no. 12409176
  misc_feature: MA Experiment ID: 108515 Result: Down-regulated in Transcription
  misc_feature: MA Experiment 108515 PARAMETER Experiment Name: Zm_2mM_SA_P Parameter: Age (day) Value: 8
  misc_feature: MA Experiment 108515 PARAMETER Experiment Name: Zm_2mM_SA_P Parameter: Organism Value: Zea mays
  misc_feature: MA Experiment 108515 PARAMETER Experiment Name: Zm_2mM_SA_P Parameter: Plant Line Value: 35A19
  misc_feature: MA Experiment 108515 PARAMETER Experiment Name: Zm_2mM_SA_P Parameter: Timepoint (hr) Value: 12
  misc_feature: MA Experiment 108515 PARAMETER Experiment Name: Zm_2mM_SA_P Parameter: Tissue Value: Aerial
  misc_feature: MA Experiment 108515 PARAMETER Experiment Name: Zm_2mM_SA_P Parameter: Treatment Value: 2mM SA vs. No Treatment
  misc_feature: MA Experiment ID: 108529 Result: Up-regulated in Transcription
  misc_feature: MA Experiment 108529 PARAMETER Experiment Name: Zm_Imbibed_Seeds_P Parameter: Age (day) Value: 5 vs. 2
  misc_feature: MA Experiment 108529 PARAMETER Experiment Name: Zm_Imbibed_Seeds_P Parameter: Organism Value: Zea mays
  misc_feature: MA Experiment 108529 PARAMETER Experiment Name: Zm_Imbibed_Seeds_P Parameter: Plant Line Value: 35A19
  misc_feature: MA Experiment 108529 PARAMETER Experiment Name: Zm_Imbibed_Seeds_P Parameter: Tissue Value: Roots vs. Embryo
  misc_feature: MA Experiment ID: 108535 Result: Down-regulated in Transcription
  misc_feature: MA Experiment 108535 PARAMETER Experiment Name: Zm_Meristem_P Parameter: Age (day) Value: 8
  misc_feature: MA Experiment 108535 PARAMETER Experiment Name: Zm_Meristem_P Parameter: Organism Value: Zea mays
  misc_feature: MA Experiment 108535 PARAMETER Experiment Name: Zm_Meristem_P Parameter: Plant Line Value: 35A19
  misc_feature: MA Experiment 108535 PARAMETER Experiment Name: Zm_Meristem_P Parameter: Tissue Value: Root Meristem vs. Above Root Meristem
  misc_feature: MA Experiment ID: 108543 Result: Up-regulated in Transcription
  misc_feature: MA Experiment ID: 108546 Result: Up-regulated in Transcription
  misc_feature: MA Experiment 108546 PARAMETER Experiment Name: Zm_Imbibed_Seeds_P Parameter: Age (day) Value: 3 vs. 2
  misc_feature: MA Experiment 108546 PARAMETER Experiment Name: Zm_Imbibed_Seeds_P Parameter: Organism Value: Zea mays
  misc_feature: MA Experiment 108546 PARAMETER Experiment Name: Zm_Imbibed_Seeds_P Parameter: Plant Line Value: 35A19
  misc_feature: MA Experiment 108546 PARAMETER Experiment Name: Zm_Imbibed_Seeds_P Parameter: Tissue Value: Roots vs. Embryo
  misc_feature: MA Experiment ID: 108556 Result: Down-regulated in Transcription
  misc_feature: MA Experiment 108556 PARAMETER Experiment Name: Zm_Drought_P Parameter: Age (day) Value: 9
  misc_feature: MA Experiment 108556 PARAMETER Experiment Name: Zm_Drought_P Parameter: Organism Value: Zea mays
  misc_feature: MA Experiment 108556 PARAMETER Experiment Name: Zm_Drought_P Parameter: Plant Line Value: 35A19
  misc_feature: MA Experiment 108556 PARAMETER Experiment Name: Zm_Drought_P Parameter: Timepoint (hr) Value: 24
  misc_feature: MA Experiment 108556 PARAMETER Experiment Name: Zm_Drought_P Parameter: Tissue Value: Aerial
  misc_feature: MA Experiment 108556 PARAMETER Experiment Name: Zm_Drought_P Parameter: Treatment Value: Drought vs. No Drought
  misc_feature: MA Experiment ID: 108687 Result: Down-regulated in Transcription
  misc_feature: MA Experiment 108687 PARAMETER Experiment Name: Zm_Embryos-Flowers__P Parameter: Tissue Value: Embryo vs. Aerial+
  misc_feature: MA Experiment ID: 108688 Result: Down-regulated in Transcription
  misc_feature: MA Experiment 108688 PARAMETER Experiment Name: Zm_Embryos-Flowers__P Parameter: Tissue Value: Immature Flowers vs. Aerial+
  misc_feature: MA Experiment ID: 20000478 Result: Down-regulated in Transcription
  misc_feature: MA Experiment 20000478 PARAMETER Experiment Name: Zm_5mM_SA_P Parameter: Age (day) Value: 11
  misc_feature: MA Experiment 20000478 PARAMETER Experiment Name: Zm_5mM_SA_P Parameter: Organism Value: Zea mays
  misc_feature: MA Experiment 20000478 PARAMETER Experiment Name: Zm_5mM_SA_P Parameter: Plant Line Value: 35A19
  misc_feature: MA Experiment 20000478 PARAMETER Experiment Name: Zm_5mM_SA_P Parameter: Timepoint (hr) Value: 72
  misc_feature: MA Experiment 20000478 PARAMETER Experiment Name: Zm_5mM_SA_P Parameter: Tissue Value: Aerial
  misc_feature: MA Experiment 20000478 PARAMETER Experiment Name: Zm_5mM_SA_P Parameter: Treatment Value: 5mM SA vs. No Treatment
  misc_feature: MA Experiment ID: 20000480 Result: Down-regulated in Transcription
  misc_feature: MA Experiment 20000480 PARAMETER Experiment Name: Zm_Drought_P Parameter: Age (day) Value: 11
  misc_feature: MA Experiment 20000480 PARAMETER Experiment Name: Zm_Drought_P Parameter: Organism Value: Zea mays
  misc_feature: MA Experiment 20000480 PARAMETER Experiment Name: Zm_Drought_P Parameter: Plant Line Value: 35A19
  misc_feature: MA Experiment 20000480 PARAMETER Experiment Name: Zm_Drought_P Parameter: Timepoint (hr) Value: 72
  misc_feature: MA Experiment 20000480 PARAMETER Experiment Name: Zm_Drought_P Parameter: Tissue Value: Aerial
  misc_feature: MA Experiment 20000480 PARAMETER Experiment Name: Zm_Drought_P Parameter: Treatment Value: Drought vs. No Drought
  misc_feature: MA Experiment ID: 20000535 Result: Down-regulated in Transcription
  misc_feature: MA Experiment 20000535 PARAMETER Experiment Name: Zm_Hybrid_Seed_Dev_P Parameter: DAP Value: 30 vs. 12
  misc_feature: MA Experiment 20000535 PARAMETER Experiment Name: Zm_Hybrid_Seed_Dev_P Parameter: Organism Value: Zea mays
  misc_feature: MA Experiment 20000535 PARAMETER Experiment Name: Zm_Hybrid_Seed_Dev_P Parameter: Plant Line Value: 35A19
  misc_feature: MA Experiment 20000535 PARAMETER Experiment Name: Zm_Hybrid_Seed_Dev_P Parameter: Tissue Value: Embryo vs. Unfert Floret
aaccaccaccatagatcgatccttgagttgacgaaaacatacacagctgctagctaatcctgccgtgagtgcaatgcatgcgaagatgacgaagcccgcagccatcgttgttgctgctatcgccgtcctctccgtcagcctgctggctggggtcgtcgtgccttgcccttgcgcggcccagcggcgacttctccatcgtgggctactcagaggaggacctgtcgtcgcacgagagcctggcggagctgttcgagcgctggctgtcccgccaccgcagggcgtacgccagcctggaggagaagctccggcggttccaggtgttcaaggacaacctgcaccacatcgacgagaccaaccgcaaggtgagcagctactggctgggcctcaacgagttcgccgacctcacgcacgacgagttcaaggccacctacctcggcctacggagcagtgttggcgatggtggtagtggtatcgatgacgacgacgagccggaggaggaggagggctacgagggtgtggacggggcgagcctccccaagtcggtggactggcggagcaagggcgcggtgacgggggtaaagaaccagggccagtgcggcagctgctgggccttctccacggtggccgccgtcgagggcatcaaccagatcgtcacgggcaacctcacggcgctgtcggagcaggagctcatcgactgcgacacggacggcaacaacggctgcaacggcggcctcatggactacgccttctcctacatcgcacacaacggcggcctccacacggaggaggcctacccgtacctcatggaggaaggcacctgccagcgcagcagcagcagcgagaagaagtggccgggatcgtcggaggacgccaacgacgatgccgcggtggtcaccatctccgggtacgaggacgtgccgaggaacaacgagcaggcgctgctcaaagcgctggcgcaacagcccgtcagcgtcgccatcgaggcctccggcaggaacttccagttctacagcggcggcgtcttcgatgggccctgcggcacgcagctggaccacggggtagcggccgtcggctacgggacggcggccaagggccatgactacatcatcgtcaagaactcgtgggggcccagctggggcgagaaggggtacatccgcatgaggaggggcaccggcaagcgccagggcctctgcggcatcaacaagatggcctcctacccaaccaagaactgaactcagatcatcgattcatcgtcaagcagcagctggctgattactcccactgctggcgctccacgcttcactagttcttcgtcgttctccttcacttccattgttttcaagattggacgatctttcgttgtttgaaatgaaataataatgatgatggaattagtgttcc

SEQ ID NO: 6222 - protein, 165 aa, Zea mays subsp. mays
  peptide (1)..(165): Ceres Seq. ID no. 12409177
  misc_feature (1)..(163): Pfam Name: Papain family cysteine protease Pfam Description: Papain family cysteine protease
  misc_feature (1)..(165): Homolog of NCBI NO: 34905996 NR Description: putative cysteine proteinase [Oryza sativa
  misc_feature (1)..(165): Homolog of NCBI NO: 14719319 NR Description: putative cysteine proteinase [Oryza sativa]
  misc_feature (1)..(164): Homolog of NCBI NO: 37780041 NR Description: cysteine protease 14 [Trifolium repens]
  misc_feature (1)..(164): Homolog of NCBI NO: 37780039 NR Description: cysteine protease 14 [Trifolium repens]
  misc_feature (1)..(164): Homolog of NCBI NO: 18394919 NR Description: cysteine proteinase XCP2; protein id: supported by cDNA: gi_6708182 [Arabidopsis thaliana]
  misc_feature (1)..(164): Homolog of NCBI NO: 22759715 NR Description: cysteine proteinase [Zinnia elegans]
  misc_feature (1)..(164): Homolog of NCBI NO: 30141025 NR Description: cysteine protease-4 [Helianthus annuus]
  misc_feature (1)..(164): Homolog of NCBI NO: 18418684 NR Description: cysteine protease XCP1; protein id: At4g35350.1, by cDNA: gi_6708180 [Arabidopsis thaliana]
  misc_feature (1)..(151): Homolog of NCBI NO: 7435773 NR Description: cysteine proteinase (EC 3.4.22.-) precursor -
  misc_feature (1)..(125): Homolog of NCBI NO: 8886940 NR Description: F2D10.37 [Arabidopsis thaliana]
MDYAFSYIAHNGGLHTEEAYPYLMEEGTCQRSSSSEKKWPGSSEDANDDAAVVTISGYEDVPRNNEQALLKALAQQPVSVAIEASGRNFQFYSGGVFDGPCGTQLDHGVAAVGYGTAAKGHDYIIVKNSWGPSWGEKGYIRMRRGTGKRQGLCGINKMASYPTKN

SEQ ID NO: 6223 - protein, 142 aa, Zea mays subsp. mays
  peptide (1)..(142): Ceres Seq. ID no. 12409178
  misc_feature (1)..(140): Pfam Name: Papain family cysteine protease Pfam Description: Papain family cysteine protease
  misc_feature (1)..(142): Homolog of NCBI NO: 34905996 NR Description: putative cysteine proteinase [Oryza sativa
  misc_feature (1)..(142): Homolog of NCBI NO: 14719319 NR Description: putative cysteine proteinase [Oryza sativa]
  misc_feature (1)..(141): Homolog of NCBI NO: 37780041 NR Description: cysteine protease 14 [Trifolium repens]
  misc_feature (1)..(141): Homolog of NCBI NO: 37780039 NR Description: cysteine protease 14 [Trifolium repens]
  misc_feature (1)..(141): Homolog of NCBI NO: 18394919 NR Description: cysteine proteinase XCP2; protein id: supported by cDNA: gi_6708182 [Arabidopsis thaliana]
  misc_feature (1)..(141): Homolog of NCBI NO: 22759715 NR Description: cysteine proteinase [Zinnia elegans]
  misc_feature (1)..(141): Homolog of NCBI NO: 30141025 NR Description: cysteine protease-4 [Helianthus annuus]
  misc_feature (1)..(141): Homolog of NCBI NO: 18418684 NR Description: cysteine protease XCP1; protein id: At4g35350.1, by cDNA: gi_6708180 [Arabidopsis thaliana]
  misc_feature (1)..(128): Homolog of NCBI NO: 7435773 NR Description: cysteine proteinase (EC 3.4.22.-) precursor -
  misc_feature (1)..(102): Homolog of NCBI NO: 8886940 NR Description: F2D10.37 [Arabidopsis thaliana]
MEEGTCQRSSSSEKKWPGSSEDANDDAAVVTISGYEDVPRNNEQALLKALAQQPVSVAIEASGRNFQFYSGGVFDGPCGTQLDHGVAAVGYGTAAKGHDYIIVKNSWGPSWGEKGYIRMRRGTGKRQGLCGINKMASYPTKN

SEQ ID NO: 6224 - protein, 130 aa, Zea mays subsp. mays
  peptide (1)..(130): Ceres Seq. ID no. 12409179
MHAKMTKPAAIVVAAIAVLSVSLLAGVVVPCPCAAQRRLLHRGLLRGGPVVAREPGGAVRALAVPPPQGVRQPGGEAPAVPGVQGQPAPHRRDQPQGEQLLAGPQRVRRPHARRVQGHLPRPTEQCWRWW

SEQ ID NO: 6225 - DNA, 912 bp, Zea mays subsp. mays
  misc_feature (1)..(912): Ceres Seq. ID no. 12414036
  misc_feature: MA Experiment ID: 108535 Result: Up-regulated in Transcription
  misc_feature: MA Experiment 108535 PARAMETER Experiment Name: Zm_Meristem_P Parameter: Age (day) Value: 8
  misc_feature: MA Experiment 108535 PARAMETER Experiment Name: Zm_Meristem_P Parameter: Organism Value: Zea mays
  misc_feature: MA Experiment 108535 PARAMETER Experiment Name: Zm_Meristem_P Parameter: Plant Line Value: 35A19
  misc_feature: MA Experiment 108535 PARAMETER Experiment Name: Zm_Meristem_P Parameter: Tissue Value: Root Meristem vs. Above Root Meristem
gcacgagaccattacctagaacatcctaatcgaaaaatcagccctcacgcatgtggcacgcgatgggccggatctgaggttgagtgtgcgatcccgttggcatatcgacaaagtttggtgggtcccaccgcagatcccggcccggtaggtactagttccgccgtcccccctccctagtctccggggaggaccgtctcggccgcgagagtgcgctcgtcgactccactcagctctctcgctccctctcctcccccaaggccccagagacaggcagccggcgaggcccgccgccgcgaagcaatggatttcaaggggttctgggagtccagattcgggggcaagaaggaacccgagccggagcagaacgggcacgccaacggggtccagaaccagaagaggacctccgatctggcggtctacgagcagttcgagcagcaggccaggcagacccaggtccgagccgccgcgattcgcgacggagacgctgatgtcataagccccttctaccttcatttgagtcagctgaaatgcgtaatctcgcagagacattgttgagggatattattcgcgggagcccagatgtgaaatgggagagcatcaaaggactggaaaatgcaaaacgccttctaaaagaggctgttgtcatgcccataaagtacccaaaatacttcactggtctcctttctccatggaaaggcatcttactttttggccccccagggacaggaaagacaatgctggcaaaagcggtcgctactgagtgcaaaaccaccttcttcaacatttcagcatcatcaattgtcagcaaatggcgtggagattcagagaagcttgtcaaagttctgtttgagcttgctaggcatcatgcaccatccacaatattccttgatgaaatagatgctatcatcagcc

SEQ ID NO: 6226 - protein, 128 aa, Zea mays subsp. mays
  peptide (1)..(128): Ceres Seq. ID no. 12414037
  misc_feature (57)..(127): Pfam Name: ATPase family associated with various cellular Pfam Description: ATPase family associated with various cellular
  misc_feature (1)..(127): Homolog of NCBI NO: 34909678 NR Description: katanin p60 subunit A 1-like [Oryza sativa
  misc_feature (1)..(127): Homolog of NCBI NO: 18403587 NR Description: putative katanin; protein id: At2g34560.1, by cDNA: 119620. [Arabidopsis thaliana] putative katanin [Arabidopsis thaliana]
  misc_feature (1)..(127): Homolog of NCBI NO: 25408335 NR Description: probable katanin [imported] - Arabidopsis thaliana
  misc_feature (1)..(127): Homolog of NCBI NO: 11071772 NR Description: probable AAA ATPase [Leishmania major]
  misc_feature (1)..(127): Homolog of NCBI NO: 34911050 NR Description: putative katanin [Oryza sativa (japonica
  misc_feature (1)..(127): Homolog of NCBI NO: 21313044 NR Description: RIKEN cDNA 4933439B08 [Mus musculus]
  misc_feature (1)..(127): Homolog of NCBI NO: 34190544 NR Description: Unknown (protein for MGC:33211) [Homo sapiens]
  misc_feature (43)..(127): Homolog of NCBI NO: 34932450 NR Description: similar to RIKEN cDNA 4933439B08 [Rattus
  misc_feature (1)..(44): Homolog of NCBI NO: 34932450 NR Description: similar to RIKEN cDNA 4933439B08 [Rattus
  misc_feature (1)..(126): Homolog of NCBI NO: 32478841 NR Description: katanin [Gossypium hirsutum]
MRNLAETLLRDIIRGSPDVKWESIKGLENAKRLLKEAVVMPIKYPKYFTGLLSPWKGILLFGPPGTGKTMLAKAVATECKTTFFNISASSIVSKWRGDSEKLVKVLFELARHHAPSTIFLDEIDAIIS

SEQ ID NO: 6227 - protein, 89 aa, Zea mays subsp. mays
  peptide (1)..(89): Ceres Seq. ID no. 12414038
  misc_feature (18)..(88): Pfam Name: ATPase family associated with various cellular Pfam Description: ATPase family associated with various cellular
  misc_feature (1)..(88): Homolog of NCBI NO: 34909678 NR Description: katanin p60 subunit A 1-like [Oryza sativa
  misc_feature (1)..(88): Homolog of NCBI NO: 18403587 NR Description: putative katanin; protein id: At2g34560.1, by cDNA: 119620. [Arabidopsis thaliana] putative katanin [Arabidopsis thaliana]
  misc_feature (1)..(88): Homolog of NCBI NO: 25408335 NR Description: probable katanin [imported] - Arabidopsis thaliana
  misc_feature (1)..(88): Homolog of NCBI NO: 11071772 NR Description: probable AAA ATPase [Leishmania major]
  misc_feature (1)..(88): Homolog of NCBI NO: 34911050 NR Description: putative katanin [Oryza sativa (japonica
  misc_feature (1)..(88): Homolog of NCBI NO: 21313044 NR Description: RIKEN cDNA 4933439B08 [Mus musculus]
  misc_feature (1)..(88): Homolog of NCBI NO: 34190544 NR Description: Unknown (protein for MGC:33211) [Homo sapiens]
  misc_feature (4)..(88): Homolog of NCBI NO: 34932450 NR Description: similar to RIKEN cDNA 4933439B08 [Rattus
  misc_feature (1)..(87): Homolog of NCBI NO: 32478841 NR Description: katanin [Gossypium hirsutum]
  misc_feature (1)..(87): Homolog of NCBI NO: 32478843 NR Description: katanin [Gossypium barbadense]
MPIKYPKYFTGLLSPWKGILLFGPPGTGKTMLAKAVATECKTTFFNISASSIVSKWRGDSEKLVKVLFELARHHAPSTIFLDEIDAIIS

SEQ ID NO: 6228 - protein, 84 aa, Zea mays subsp. mays
  peptide (1)..(84): Ceres Seq. ID no. 12414039
  misc_feature (1)..(46): Homolog of NCBI NO: 34909678 NR Description: katanin p60 subunit A 1-like [Oryza sativa
  misc_feature (46)..(65): Homolog of NCBI NO: 34909678 NR Description: katanin p60 subunit A 1-like [Oryza sativa
MDFKGFWESRFGGKKEPEPEQNGHANGVQNQKRTSDLAVYEQFEQQARQTQVRAAAIRDGDADVISPFYLHLSQLKCVISQRHC

SEQ ID NO: 6229 - DNA, 1621 bp, Zea mays subsp. mays
  misc_feature (1)..(1621): Ceres Seq. ID no. 12384203
  misc_feature: MA Experiment ID: 108523 Result: Up-regulated in Transcription
  misc_feature: MA Experiment 108523 PARAMETER Experiment Name: Zm_42deg_Heat_P Parameter: Age (day) Value: 8
  misc_feature: MA Experiment 108523 PARAMETER Experiment Name: Zm_42deg_Heat_P Parameter: Organism Value: Zea mays
  misc_feature: MA Experiment 108523 PARAMETER Experiment Name: Zm_42deg_Heat_P Parameter: Plant Line Value: 35A19
  misc_feature: MA Experiment 108523 PARAMETER Experiment Name: Zm_42deg_Heat_P Parameter: Temperature (deg C) Value: 42 vs. 22
  misc_feature: MA Experiment 108523 PARAMETER Experiment Name: Zm_42deg_Heat_P Parameter: Timepoint (hr) Value: 6
  misc_feature: MA Experiment 108523 PARAMETER Experiment Name: Zm_42deg_Heat_P Parameter: Tissue Value: Aerial
  misc_feature: MA Experiment ID: 20000487 Result: Up-regulated in Transcription
  misc_feature: MA Experiment 20000487 PARAMETER Experiment Name: Zm_50mM_NH4NO3_L_to_H_P Parameter: Organism Value: Zea mays
  misc_feature: MA Experiment 20000487 PARAMETER Experiment Name: Zm_50mM_NH4NO3_L_to_H_P Parameter: Timepoint (hr) Value: 4
  misc_feature: MA Experiment 20000487 PARAMETER Experiment Name: Zm_50mM_NH4NO3_L_to_H_P Parameter: Tissue Value: Leaves
  misc_feature: MA Experiment 20000487 PARAMETER Experiment Name: Zm_50mM_NH4NO3_L_to_H_P Parameter: Treatment Value: 50mM NH4NO3 vs. 100mM Mannitol
  misc_feature: MA Experiment ID: 20000535 Result: Up-regulated in Transcription
  misc_feature: MA Experiment 20000535 PARAMETER Experiment Name: Zm_Hybrid_Seed_Dev_P Parameter: DAP Value: 30 vs. 12
  misc_feature: MA Experiment 20000535 PARAMETER Experiment Name: Zm_Hybrid_Seed_Dev_P Parameter: Organism Value: Zea mays
  misc_feature: MA Experiment 20000535 PARAMETER Experiment Name: Zm_Hybrid_Seed_Dev_P Parameter: Plant Line Value: 35A19
  misc_feature: MA Experiment 20000535 PARAMETER Experiment Name: Zm_Hybrid_Seed_Dev_P Parameter: Tissue Value: Embryo vs. Unfert Floret
gcacgagaccattacctagaacatcctaatcgaaaagcatacttgcagctcgcacatctcatggtgtcgcaggaacgacaagagccagctgtgcctagcagcagcagcagcagcgccaagcgcgcagccacgtccatggacgccagcccggccccgccgctcctcctccgcgcccccactcccagccccagcattgacctccccgctggcaaggacaaggccgacgcggcggccagcaaggccggcgcggccgtgttcgacctgcgccgggagcccaagatccccgcgccattcctgtggccgcaggaagaggcgcggccgtcctcggccgcggagctggaggtgccgatggtggacgtgggcgtgctgcgcaatggcgaccgcgcggggctgcggcgcgccgcggcgcaggtggccgcggcgtgcgcgacgcacgggttcttccaggtgtgcgggcacggcgtggacgcggcgctggggcgcgccgcgctggacggcgccagcgacttcttccggctgccgctcgccgagaancagcgcgcccggcgcgtccccggcaccgtgtccgggtacaagagcgcgcacgccgaccggttcgcggccaagctcccctggaaggagaccctgncgttcggctaccacgacggcgccgcnncnnctgtcgtcgtggactacttngtcggcaccctcggccaggatttcgagccaatggggtgggtgtaccagaggtactgcgagnagatgaaggagctgtcgctgacgatcatggagctgctggagctgagcctgggcgtggagctgcgcggctactaccgggagttcttcgaggacagccggtccatcatgcggtgcaactactacccgccgtgcccggagccggagcgcacgctgggcacgggcccgcactgcgaccccacggcgctgaccatcctcctgcaggacgacgtgggcgggctggaggtgctggtggacggtgagtggcgccccgtccggcccgtcccgggcgccatggtcatcaacatcggcgacaccttcatggcgctgtcgaacgggaggtacaagagctgcctgcaccgcgcggtggtgaaccagcggcgggcgcggcggtcgctggccttcttcctgtgcccgcgcgaggaccgggtggtgcgcccgccggccagtgctgcgccgcggcgctacccggacttcacctgggccgacctcatgcgcttcacgcagcgccactaccgcgccgacacccgcacgctggacgccttcacccgctggctctcccacggcccggcccaggcggcggcgcctccctgcacctagcgagccgggccaaggccgtctctttcgccccacgtgcgcgcccagctgggcaggtgggcagacacgcggcccgcgggccccgcgccgccttgccattttttgacgctggccctactgctgtgctactagtgtacatatgcaagagtacatatatatatatatatacgtattttctatatattatatataaaagcaaggcggcccggtgcccttctcttgttttgtccacaactgtttgatcccattattctatggaccatggatacttcaatgtttgtactaagaccgtgaacgtgggattcttttc

SEQ ID NO: 6230 - protein, 437 aa, Zea mays subsp. mays
  peptide (1)..(437): Ceres Seq. ID no. 12384204
  misc_feature (278)..(377): Pfam Name: 2OG-Fe(II) oxygenase superfamily Pfam Description: 2OG-Fe(II) oxygenase superfamily
  misc_feature (50)..(433): Homolog of NCBI NO: 19422259 NR Description: gibberellin-20 oxidase [Oryza sativa]
  misc_feature (85)..(424): Homolog of NCBI NO: 8919865 NR Description: gibberellin 20-oxidase [Citrus sinensis x
  misc_feature (85)..(424): Homolog of NCBI NO: 7433210 NR Description: gibberellin 20-oxidase (EC 1.14.11.-) - kidney
  misc_feature (85)..(424): Homolog of NCBI NO: 18496057 NR Description: gibberellin 20-oxidase 1 [Fagus sylvatica]
  misc_feature (85)..(437): Homolog of NCBI NO: 13625525 NR Description: gibberellin 20-oxidase [Lolium perenne]
  misc_feature (85)..(424): Homolog of NCBI NO: 7433209 NR Description: gibberellin 20-oxidase (EC 1.14.11.-) - kidney
  misc_feature (61)..(424): Homolog of NCBI NO: 12231168 NR Description: gibberellin 20-oxidase [Malus x domestica]
  misc_feature (73)..(424): Homolog of NCBI NO: 4164141 NR Description: gibberelin 20-oxidase [Lactuca sativa]
  misc_feature (85)..(437): Homolog of NCBI NO: 13625519 NR Description: gibberellin 20-oxidase [Lolium perenne]
  misc_feature (73)..(424): Homolog of NCBI NO: 6855711 NR Description: gibberellin c20-oxidase [Pisum sativum]
  misc_feature (178)..(178): Xaa is any aa, unknown or other
  misc_feature (210)..(210): Xaa is any aa, unknown or other
  misc_feature (218)..(218): Xaa is any aa, unknown or other
  misc_feature (219)..(219): Xaa is any aa, unknown or other
  misc_feature (220)..(220): Xaa is any aa, unknown or other
  misc_feature (226)..(226): Xaa is any aa, unknown or other
  misc_feature (247)..(247): Xaa is any aa, unknown or other
ARDHYLEHPNRKAYLQLAHLMVSQERQEPAVPSSSSSSAKRAATSMDASPAPPLLLRAPTPSPSIDLPAGKDKADAAASKAGAAVFDLRREPKIPAPFLWPQEEARPSSAAELEVPMVDVGVLRNGDRAGLRRAAAQVAAACATHGFFQVCGHGVDAALGRAALDGASDFFRLPLAEXQRARRVPGTVSGYKSAHADRFAAKLPWKETLXFGYHDGAXXXVVVDYXVGTLGQDFEPMGWVYQRYCEXMKELSLTIMELLELSLGVELRGYYREFFEDSRSIMRCNYYPPCPEPERTLGTGPHCDPTALTILLQDDVGGLEVLVDGEWRPVRPVPGAMVINIGDTFMALSNGRYKSCLHRAVVNQRRARRSLAFFLCPREDRVVRPPASAAPRRYPDFTWADLMRFTQRHYRADTRTLDAFTRWLSHGPAQAAAPPCT

SEQ ID NO: 6231 - protein, 417 aa, Zea mays subsp. mays
  peptide (1)..(417): Ceres Seq. ID no. 12384205
  misc_feature (258)..(357): Pfam Name: 2OG-Fe(II) oxygenase superfamily Pfam Description: 2OG-Fe(II) oxygenase superfamily
  misc_feature (30)..(413): Homolog of NCBI NO: 19422259 NR Description: gibberellin-20 oxidase [Oryza sativa]
  misc_feature (65)..(404): Homolog of NCBI NO: 8919865 NR Description: gibberellin 20-oxidase [Citrus sinensis x
  misc_feature (65)..(404): Homolog of NCBI NO: 7433210 NR Description: gibberellin 20-oxidase (EC 1.14.11.-) - kidney
  misc_feature (65)..(404): Homolog of NCBI NO: 18496057 NR Description: gibberellin 20-oxidase 1 [Fagus sylvatica]
  misc_feature (65)..(417): Homolog of NCBI NO: 13625525 NR Description: gibberellin 20-oxidase [Lolium perenne]
  misc_feature (65)..(404): Homolog of NCBI NO: 7433209 NR Description: gibberellin 20-oxidase (EC 1.14.11.-) - kidney
  misc_feature (41)..(404): Homolog of NCBI NO: 12231168 NR Description: gibberellin 20-oxidase [Malus x domestica]
  misc_feature (53)..(404): Homolog of NCBI NO: 4164141 NR Description: gibberelin 20-oxidase [Lactuca sativa]
  misc_feature (65)..(417): Homolog of NCBI NO: 13625519 NR Description: gibberellin 20-oxidase [Lolium perenne]
  misc_feature (53)..(404): Homolog of NCBI NO: 6855711 NR Description: gibberellin c20-oxidase [Pisum sativum]
  misc_feature (158)..(158): Xaa is any aa, unknown or other
  misc_feature (190)..(190): Xaa is any aa, unknown or other
  misc_feature (198)..(198): Xaa is any aa, unknown or other
  misc_feature (199)..(199): Xaa is any aa, unknown or other
  misc_feature (200)..(200): Xaa is any aa, unknown or other
  misc_feature (206)..(206): Xaa is any aa, unknown or other
  misc_feature (227)..(227): Xaa is any aa, unknown or other
MVSQERQEPAVPSSSSSSAKRAATSMDASPAPPLLLRAPTPSPSIDLPAGKDKADAAASKAGAAVFDLRREPKIPAPFLWPQEEARPSSAAELEVPMVDVGVLRNGDRAGLRRAAAQVAAACATHGFFQVCGHGVDAALGRAALDGASDFFRLPLAEXQRARRVPGTVSGYKSAHADRFAAKLPWKETLXFGYHDGAXXXVVVDYXVGTLGQDFEPMGWVYQRYCEXMKELSLTIMELLELSLGVELRGYYREFFEDSRSIMRCNYYPPCPEPERTLGTGPHCDPTALTILLQDDVGGLEVLVDGEWRPVRPVPGAMVINIGDTFMALSNGRYKSCLHRAVVNQRRARRSLAFFLCPREDRVVRPPASAAPRRYPDFTWADLMRFTQRHYRADTRTLDAFTRWLSHGPAQAAAPPCT

SEQ ID NO: 6232 - protein, 392 aa, Zea mays subsp. mays
  peptide (1)..(392): Ceres Seq. ID no. 12384206
  misc_feature (233)..(332): Pfam Name: 2OG-Fe(II) oxygenase superfamily Pfam Description: 2OG-Fe(II) oxygenase superfamily
  misc_feature (5)..(388): Homolog of NCBI NO: 19422259 NR Description: gibberellin-20 oxidase [Oryza sativa]
  misc_feature (40)..(379): Homolog of NCBI NO: 8919865 NR Description: gibberellin 20-oxidase [Citrus sinensis x
  misc_feature (40)..(379): Homolog of NCBI NO: 7433210 NR Description: gibberellin 20-oxidase (EC 1.14.11.-) - kidney
  misc_feature (40)..(379): Homolog of NCBI NO: 18496057 NR Description: gibberellin 20-oxidase 1 [Fagus sylvatica]
  misc_feature (40)..(392): Homolog of NCBI NO: 13625525 NR Description: gibberellin 20-oxidase [Lolium perenne]
  misc_feature (40)..(379): Homolog of NCBI NO: 7433209 NR Description: gibberellin 20-oxidase (EC 1.14.11.-) - kidney
  misc_feature (16)..(379): Homolog of NCBI NO: 12231168 NR Description: gibberellin 20-oxidase [Malus x domestica]
  misc_feature (28)..(379): Homolog of NCBI NO: 4164141 NR Description: gibberelin 20-oxidase [Lactuca sativa]
  misc_feature (40)..(392): Homolog of NCBI NO: 13625519 NR Description: gibberellin 20-oxidase [Lolium perenne]
  misc_feature (28)..(379): Homolog of NCBI NO: 6855711 NR Description: gibberellin c20-oxidase [Pisum sativum]
  misc_feature (133)..(133): Xaa is any aa, unknown or other
  misc_feature (165)..(165): Xaa is any aa, unknown or other
  misc_feature (173)..(173): Xaa is any aa, unknown or other
  misc_feature (174)..(174): Xaa is any aa, unknown or other
  misc_feature (175)..(175): Xaa is any aa, unknown or other
  misc_feature (181)..(181): Xaa is any aa, unknown or other
  misc_feature (202)..(202): Xaa is any aa, unknown or other
MDASPAPPLLLRAPTPSPSIDLPAGKDKADAAASKAGAAVFDLRREPKIPAPFLWPQEEARPSSAAELEVPMVDVGVLRNGDRAGLRRAAAQVAAACATHGFFQVCGHGVDAALGRAALDGASDFFRLPLAEXQRARRVPGTVSGYKSAHADRFAAKLPWKETLXFGYHDGAXXXVVVDYXVGTLGQDFEPMGWVYQRYCEXMKELSLTIMELLELSLGVELRGYYREFFEDSRSIMRCNYYPPCPEPERTLGTGPHCDPTALTILLQDDVGGLEVLVDGEWRPVRPVPGAMVINIGDTFMALSNGRYKSCLHRAVVNQRRARRSLAFFLCPREDRVVRPPASAAPRRYPDFTWADLMRFTQRHYRADTRTLDAFTRWLSHGPAQAAAPPCT

SEQ ID NO: 6233 - DNA, 1112 bp, Zea mays subsp. mays
  misc_feature (1)..(1112): Ceres Seq. ID no. 12379356
  misc_feature: MA Experiment ID: 108535 Result: Up-regulated in Transcription
  misc_feature: MA Experiment 108535 PARAMETER Experiment Name: Zm_Meristem_P Parameter: Age (day) Value: 8
  misc_feature: MA Experiment 108535 PARAMETER Experiment Name: Zm_Meristem_P Parameter: Organism Value: Zea mays
  misc_feature: MA Experiment 108535 PARAMETER Experiment Name: Zm_Meristem_P Parameter: Plant Line Value: 35A19
  misc_feature: MA Experiment 108535 PARAMETER Experiment Name: Zm_Meristem_P Parameter: Tissue Value: Root Meristem vs. Above Root Meristem
  misc_feature: MA Experiment ID: 108536 Result: Down-regulated in Transcription
  misc_feature: MA Experiment 108536 PARAMETER Experiment Name: Zm_Meristem_P Parameter: Age (day) Value: 8
  misc_feature: MA Experiment 108536 PARAMETER Experiment Name: Zm_Meristem_P Parameter: Organism Value: Zea mays
  misc_feature: MA Experiment 108536 PARAMETER Experiment Name: Zm_Meristem_P Parameter: Plant Line Value: 35A19
  misc_feature: MA Experiment 108536 PARAMETER Experiment Name: Zm_Meristem_P Parameter: Tissue Value: Shoot Meristem vs. Above Shoot Meristem
  misc_feature: MA Experiment ID: 20000534 Result: Down-regulated in Transcription
  misc_feature: MA Experiment 20000534 PARAMETER Experiment Name: Zm_Hybrid_Pollen_P Parameter: Age (day) Value: 8
  misc_feature: MA Experiment 20000534 PARAMETER Experiment Name: Zm_Hybrid_Pollen_P Parameter: Organism Value: Zea mays
  misc_feature: MA Experiment 20000534 PARAMETER Experiment Name: Zm_Hybrid_Pollen_P Parameter: Plant Line Value: 35A19
  misc_feature: MA Experiment 20000534 PARAMETER Experiment Name: Zm_Hybrid_Pollen_P Parameter: Tissue Value: Pollen vs. Aerial
aacacgcatccgcagcactccctcctcggtccctcctctgcttcacacagaccagtgcgcgctcaattcccccctctagcgcctccaccgcaccaaaccggtccaacgggacctatgctctagcctcagagcaaaccaccgcctgaattgggcggcaattgggggaggattcgcggcaggcagggcgcggatccgttggcgggatgattgcggctgtcaacagagtgccggcgggctggggcgaggatgagatgtccgtgctgccgcggcacaccaaggtggtggtcaccggcaacaaccgcaccaagtcggtgctcgtgggattgcacggggtcgtgaagaaagccgtcggcctcggaggatggcattggctggtccttactaatggaatagaggtaaagctgcagcggaatgctttaagtgtgatagaacctccgactggcaacgaggatgatgataaatttgattgtgaaaacatgcagtggaatagttcagatatggcctccgatgatgcactatcaccaaagccacagcggtcacggagcaggcagcataggggtttccacagaaaatccatcagccgttcaatgtcatgtgactcccactccaagacgtctgtttcatcttcctcaagagctcacacgaaagttgacctaagcaagctagaactgactgcactgctgagatattggcgtcacttcaatctcgatgcatgtcctaatccatccagagagcagttagttgatgctgttcaaaggcacttcacagcccagcaattggatgagttgcaggtcattgtcggctttgtgcaagctgcaaagaggctaaagacgactatgaaagtggcctgactgtgaagcctgaacttcaactaacagattcaagagaggatgtagcatgtttgatgaatgttgccgtgctatgtaatatatatgcatgaagttctttagattcaggtggctaggttaatggacaactagactatgttagcctcatctgatgtagatatgcagtatcctgtctaaagatgtttcaacctctagctcagttctttcctgctgactggatgtggattgaaatgacaagtttaaaacaagttattttgtcatccc

SEQ ID NO: 6234 - protein, 215 aa, Zea mays subsp. mays
  peptide (1)..(215): Ceres Seq. ID no. 12379357
  misc_feature (1)..(215): Homolog of NCBI NO: 18767383 NR Description: Hypothetical protein [Oryza sativa]
  misc_feature (1)..(215): Homolog of NCBI NO: 37533376 NR Description: hypothetical protein [Oryza sativa (japonica group)] >gi|18057114|gb|AAL58137.1| hypothetical protein [Oryza
  misc_feature (14)..(213): Homolog of NCBI NO: 25372870 NR Description: protein F18O14.5 [imported] - Arabidopsis >gi|8778446|gb|AAF79454.1|AC025808_36 F18O14.5 [Arabidopsis
  misc_feature (14)..(213): Homolog of NCBI NO: 18394724 NR Description: expressed protein; protein id: At1g19330.1, by cDNA: 4026. [Arabidopsis thaliana] >gi|21593580|gb|AAM65547.1|
  misc_feature (14)..(214): Homolog of NCBI NO: 15222092 NR Description: hypothetical protein; protein id: At1g75060.1
  misc_feature (13)..(210): Homolog of NCBI NO: 38346468 NR Description: OSJNBa0019G23.16 [Oryza sativa (japonica
  misc_feature (13)..(84): Homolog of NCBI NO: 38567956 NR Description: OSJNBb0115I21.12 [Oryza sativa (japonica
  misc_feature (190)..(210): Homolog of NCBI NO: 38567956 NR Description: OSJNBb0115I21.12 [Oryza sativa (japonica
MIAAVNRVPAGWGEDEMSVLPRHTKVVVTGNNRTKSVLVGLHGVVKKAVGLGGWHWLVLTNGIEVKLQRNALSVIEPPTGNEDDDKFDCENMQWNSSDMASDDALSPKPQRSRSRQHRGFHRKSISRSMSCDSHSKTSVSSSSRAHTKVDLSKLELTALLRYWRHFNLDACPNPSREQLVDAVQRHFTAQQLDELQVIVGFVQAAKRLKTTMKVA

SEQ ID NO: 6235 - protein, 199 aa, Zea mays subsp. mays
  peptide (1)..(199): Ceres Seq. ID no. 12379358
  misc_feature (1)..(199): Homolog of NCBI NO: 18767383 NR Description: Hypothetical protein [Oryza sativa]
  misc_feature (1)..(199): Homolog of NCBI NO: 37533376 NR Description: hypothetical protein [Oryza sativa (japonica group)] >gi|18057114|gb|AAL58137.1| hypothetical protein [Oryza
  misc_feature (1)..(197): Homolog of NCBI NO: 25372870 NR Description: protein F18O14.5 [imported] - Arabidopsis >gi|8778446|gb|AAF79454.1|AC025808_36 F18O14.5 [Arabidopsis
  misc_feature (1)..(197): Homolog of NCBI NO: 18394724 NR Description: expressed protein; protein id: At1g19330.1, by cDNA: 4026. [Arabidopsis thaliana] >gi|21593580|gb|AAM65547.1|
  misc_feature (1)..(198): Homolog of NCBI NO: 15222092 NR Description: hypothetical protein; protein id: At1g75060.1
  misc_feature (1)..(194): Homolog of NCBI NO: 38346468 NR Description: OSJNBa0019G23.16 [Oryza sativa (japonica
  misc_feature (1)..(68): Homolog of NCBI NO: 38567956 NR Description: OSJNBb0115I21.12 [Oryza sativa (japonica
  misc_feature (174)..(194): Homolog of NCBI NO: 38567956 NR Description: OSJNBb0115I21.12 [Oryza sativa (japonica
MSVLPRHTKVVVTGNNRTKSVLVGLHGVVKKAVGLGGWHWLVLTNGIEVKLQRNALSVIEPPTGNEDDDKFDCENMQWNSSDMASDDALSPKPQRSRSRQHRGFHRKSISRSMSCDSHSKTSVSSSSRAHTKVDLSKLELTALLRYWRHFNLDACPNPSREQLVDAVQRHFTAQQLDELQVIVGFVQAAKRLKTTMKVA

SEQ ID NO: 6236 - protein, 124 aa, Zea mays subsp. mays
  peptide (1)..(124): Ceres Seq. ID no. 12379359
  misc_feature (1)..(124): Homolog of NCBI NO: 18767383 NR Description: Hypothetical protein [Oryza sativa]
  misc_feature (1)..(124): Homolog of NCBI NO: 37533376 NR Description: hypothetical protein [Oryza sativa (japonica group)] >gi|18057114|gb|AAL58137.1| hypothetical protein [Oryza
  misc_feature (1)..(122): Homolog of NCBI NO: 25372870 NR Description: protein F18O14.5 [imported] - Arabidopsis >gi|8778446|gb|AAF79454.1|AC025808_36 F18O14.5 [Arabidopsis
  misc_feature (1)..(122): Homolog of NCBI NO: 18394724 NR Description: expressed protein; protein id: At1g19330.1, by cDNA: 4026. [Arabidopsis thaliana] >gi|21593580|gb|AAM65547.1|
  misc_feature (1)..(123): Homolog of NCBI NO: 15222092 NR Description: hypothetical protein; protein id: At1g75060.1
  misc_feature (1)..(119): Homolog of NCBI NO: 38346468 NR Description: OSJNBa0019G23.16 [Oryza sativa (japonica
  misc_feature (99)..(119): Homolog of NCBI NO: 38567956 NR Description: OSJNBb0115I21.12 [Oryza sativa (japonica
MQWNSSDMASDDALSPKPQRSRSRQHRGFHRKSISRSMSCDSHSKTSVSSSSRAHTKVDLSKLELTALLRYWRHFNLDACPNPSREQLVDAVQRHFTAQQLDELQVIVGFVQAAKRLKTTMKVA

SEQ ID NO: 6237 - DNA, 1012 bp, Zea mays subsp. mays
  misc_feature (1)..(1012): Ceres Seq. ID no. 12434780
  misc_feature: MA Experiment ID: 108504 Result: Up-regulated in Transcription
  misc_feature: MA Experiment 108504 PARAMETER Experiment Name: Zm_Drought_P Parameter: Age (day) Value: 8
  misc_feature: MA Experiment 108504 PARAMETER Experiment Name: Zm_Drought_P Parameter: Organism Value: Zea mays
  misc_feature: MA Experiment 108504 PARAMETER Experiment Name: Zm_Drought_P Parameter: Plant Line Value: 35A19
  misc_feature: MA Experiment 108504 PARAMETER Experiment Name: Zm_Drought_P Parameter: Timepoint (hr) Value: 12
  misc_feature: MA Experiment 108504 PARAMETER Experiment Name: Zm_Drought_P Parameter: Tissue Value: Aerial
  misc_feature: MA Experiment 108504 PARAMETER Experiment Name: Zm_Drought_P Parameter: Treatment Value: Drought vs. No Drought
  misc_feature: MA Experiment ID: 108526 Result: Up-regulated in Transcription
  misc_feature: MA Experiment 108526 PARAMETER Experiment Name: Zm_5mM_NO_P Parameter: Age (day) Value: 8
  misc_feature: MA Experiment 108526 PARAMETER Experiment Name: Zm_5mM_NO_P Parameter: Organism Value: Zea mays
  misc_feature: MA Experiment 108526 PARAMETER Experiment Name: Zm_5mM_NO_P Parameter: Plant Line Value: 35A19
  misc_feature: MA Experiment 108526 PARAMETER Experiment Name: Zm_5mM_NO_P Parameter: Timepoint (hr) Value: 1
  misc_feature: MA Experiment 108526 PARAMETER Experiment Name: Zm_5mM_NO_P Parameter: Tissue Value: Aerial
  misc_feature: MA Experiment 108526 PARAMETER Experiment Name: Zm_5mM_NO_P Parameter: Treatment Value: 5mM NO vs. No Treatment
  misc_feature: MA Experiment ID: 108527 Result: Up-regulated in Transcription
  misc_feature: MA Experiment 108527 PARAMETER Experiment Name: Zm_5mM_NO_P Parameter: Age (day) Value: 8
  misc_feature: MA Experiment 108527 PARAMETER Experiment Name: Zm_5mM_NO_P Parameter: Organism Value: Zea mays
  misc_feature: MA Experiment 108527 PARAMETER Experiment Name: Zm_5mM_NO_P Parameter: Plant Line Value: 35A19
  misc_feature: MA Experiment 108527 PARAMETER Experiment Name: Zm_5mM_NO_P Parameter: Timepoint (hr) Value: 6
  misc_feature: MA Experiment 108527 PARAMETER Experiment Name: Zm_5mM_NO_P Parameter: Tissue Value: Aerial
  misc_feature: MA Experiment 108527 PARAMETER Experiment Name: Zm_5mM_NO_P Parameter: Treatment Value: 5mM NO vs. No Treatment
  misc_feature: MA Experiment ID: 108559 Result: Up-regulated in Transcription
  misc_feature: MA Experiment 108559 PARAMETER Experiment Name: Zm_5mM_NO_P Parameter: Age (day) Value: 8
  misc_feature: MA Experiment 108559 PARAMETER Experiment Name: Zm_5mM_NO_P Parameter: Organism Value: Zea mays
  misc_feature: MA Experiment 108559 PARAMETER Experiment Name: Zm_5mM_NO_P Parameter: Plant Line Value: 35A19
  misc_feature: MA Experiment 108559 PARAMETER Experiment Name: Zm_5mM_NO_P Parameter: Timepoint (hr) Value: 12
  misc_feature: MA Experiment 108559 PARAMETER Experiment Name: Zm_5mM_NO_P Parameter: Tissue Value: Aerial
  misc_feature: MA Experiment 108559 PARAMETER Experiment Name: Zm_5mM_NO_P Parameter: Treatment Value: 5mM NO vs. No Treatment
  misc_feature: MA Experiment ID: 20000478 Result: Up-regulated in Transcription
  misc_feature: MA Experiment 20000478 PARAMETER Experiment Name: Zm_5mM_SA_P Parameter: Age (day) Value: 11
  misc_feature: MA Experiment 20000478 PARAMETER Experiment Name: Zm_5mM_SA_P Parameter: Organism Value: Zea mays
  misc_feature: MA Experiment 20000478 PARAMETER Experiment Name: Zm_5mM_SA_P Parameter: Plant Line Value: 35A19
  misc_feature: MA Experiment 20000478 PARAMETER Experiment Name: Zm_5mM_SA_P Parameter: Timepoint (hr) Value: 72
  misc_feature: MA Experiment 20000478 PARAMETER Experiment Name: Zm_5mM_SA_P Parameter: Tissue Value: Aerial
  misc_feature: MA Experiment 20000478 PARAMETER Experiment Name: Zm_5mM_SA_P Parameter: Treatment Value: 5mM SA vs. No Treatment
  misc_feature: MA Experiment ID: 20000480 Result: Up-regulated in Transcription
  misc_feature: MA Experiment 20000480 PARAMETER Experiment Name: Zm_Drought_P Parameter: Age (day) Value: 11
  misc_feature: MA Experiment 20000480 PARAMETER Experiment Name: Zm_Drought_P Parameter: Organism Value: Zea mays
  misc_feature: MA Experiment 20000480 PARAMETER Experiment Name: Zm_Drought_P Parameter: Plant Line Value: 35A19
  misc_feature: MA Experiment 20000480 PARAMETER Experiment Name: Zm_Drought_P Parameter: Timepoint (hr) Value: 72
  misc_feature: MA Experiment 20000480 PARAMETER Experiment Name: Zm_Drought_P Parameter: Tissue Value: Aerial
  misc_feature: MA Experiment 20000480 PARAMETER Experiment Name: Zm_Drought_P Parameter: Treatment Value: Drought vs. No Drought
  misc_feature: MA Experiment ID: 20000487 Result: Up-regulated in Transcription
  misc_feature: MA Experiment 20000487 PARAMETER Experiment Name: Zm_50mM_NH4NO3_L_to_H_P Parameter: Organism Value: Zea mays
  misc_feature: MA Experiment 20000487 PARAMETER Experiment Name: Zm_50mM_NH4NO3_L_to_H_P Parameter: Timepoint (hr) Value: 4
  misc_feature: MA Experiment 20000487 PARAMETER Experiment Name: Zm_50mM_NH4NO3_L_to_H_P Parameter: Tissue Value: Leaves
  misc_feature: MA Experiment 20000487 PARAMETER Experiment Name: Zm_50mM_NH4NO3_L_to_H_P Parameter: Treatment Value: 50mM NH4NO3 vs. 100mM Mannitol
  misc_feature: MA Experiment ID: 20000626 Result: Down-regulated in Transcription
  misc_feature: MA Experiment 20000626 PARAMETER Experiment Name: Zm_Herbicide-Treatments_P Parameter: Timepoint (hr) Value: 12
  misc_feature: MA Experiment 20000626 PARAMETER Experiment Name: Zm_Herbicide-Treatments_P Parameter: Tissue Value: Aerial
  misc_feature: MA Experiment 20000626 PARAMETER Experiment Name: Zm_Herbicide-Treatments_P Parameter: Treatment Value: Roundup vs. No Treatment
  misc_feature: MA Experiment ID: 20000629 Result: Down-regulated in Transcription
  misc_feature: MA Experiment 20000629 PARAMETER Experiment Name: Zm_Herbicide-Treatments_P Parameter: Timepoint (hr) Value: 12
  misc_feature: MA Experiment 20000629 PARAMETER Experiment Name: Zm_Herbicide-Treatments_P Parameter: Tissue Value: Aerial
  misc_feature: MA Experiment 20000629 PARAMETER Experiment Name: Zm_Herbicide-Treatments_P Parameter: Treatment Value: Trimec vs. No Treatment
  misc_feature: MA Experiment ID: 20001610 Result: Up-regulated in Transcription
  misc_feature: MA Experiment 20001610 PARAMETER Experiment Name: Zm_50ppm_KNO3_L-to-H_P Parameter: Age (day) Value: 19
  misc_feature: MA Experiment 20001610 PARAMETER Experiment Name: Zm_50ppm_KNO3_L-to-H_P Parameter: Organism Value: Zea mays
  misc_feature: MA Experiment 20001610 PARAMETER Experiment Name: Zm_50ppm_KNO3_L-to-H_P Parameter: Plant Line Value: 35A19
  misc_feature: MA Experiment 20001610 PARAMETER Experiment Name: Zm_50ppm_KNO3_L-to-H_P Parameter: Timepoint (hr) Value: 2
  misc_feature: MA Experiment 20001610 PARAMETER Experiment Name: Zm_50ppm_KNO3_L-to-H_P Parameter: Tissue Value: Roots
  misc_feature: MA Experiment 20001610 PARAMETER Experiment Name: Zm_50ppm_KNO3_L-to-H_P Parameter: Treatment Value: 50ppm KNO3 vs. 50ppm KCl
  misc_feature: MA Experiment ID: 20001612 Result: Up-regulated in Transcription
  misc_feature: MA Experiment 20001612 PARAMETER Experiment Name: Zm_50ppm_KNO3_L-to-H_P Parameter: Age (day) Value: 19
  misc_feature: MA Experiment 20001612 PARAMETER Experiment Name: Zm_50ppm_KNO3_L-to-H_P Parameter: Organism Value: Zea mays
  misc_feature: MA Experiment 20001612 PARAMETER Experiment Name: Zm_50ppm_KNO3_L-to-H_P Parameter: Plant Line Value: 35A19
  misc_feature: MA Experiment 20001612 PARAMETER Experiment Name: Zm_50ppm_KNO3_L-to-H_P Parameter: Timepoint (hr) Value: 8
  misc_feature: MA Experiment 20001612 PARAMETER Experiment Name: Zm_50ppm_KNO3_L-to-H_P Parameter: Tissue Value: Roots
  misc_feature: MA Experiment 20001612 PARAMETER Experiment Name: Zm_50ppm_KNO3_L-to-H_P Parameter: Treatment Value: 50ppm KNO3 vs. 50ppm KCl
  misc_feature: MA Experiment ID: 20001613 Result: Up-regulated in Transcription
  misc_feature: MA Experiment 20001613 PARAMETER Experiment Name: Zm_50ppm_KNO3_L-to-H_P Parameter: Age (day) Value: 20
  misc_feature: MA Experiment 20001613 PARAMETER Experiment Name: Zm_50ppm_KNO3_L-to-H_P Parameter: Organism Value: Zea mays
  misc_feature: MA Experiment 20001613 PARAMETER Experiment Name: Zm_50ppm_KNO3_L-to-H_P Parameter: Plant Line Value: 35A19
  misc_feature: MA Experiment 20001613 PARAMETER Experiment Name: Zm_50ppm_KNO3_L-to-H_P Parameter: Timepoint (hr) Value: 24
  misc_feature: MA Experiment 20001613 PARAMETER Experiment Name: Zm_50ppm_KNO3_L-to-H_P Parameter: Tissue Value: Roots
  misc_feature: MA Experiment 20001613 PARAMETER Experiment Name: Zm_50ppm_KNO3_L-to-H_P Parameter: Treatment Value: 50ppm KNO3 vs. 50ppm KCl
  misc_feature: MA Experiment ID: 20001614 Result: Up-regulated in Transcription
  misc_feature: MA Experiment 20001614 PARAMETER Experiment Name: Zm_50ppm_KNO3_L-to-H_P Parameter: Age (day) Value: 21
  misc_feature: MA Experiment 20001614 PARAMETER Experiment Name: Zm_50ppm_KNO3_L-to-H_P Parameter: Organism Value: Zea mays
  misc_feature: MA Experiment 20001614 PARAMETER Experiment Name: Zm_50ppm_KNO3_L-to-H_P Parameter: Plant Line Value: 35A19
  misc_feature: MA Experiment 20001614 PARAMETER Experiment Name: Zm_50ppm_KNO3_L-to-H_P Parameter: Timepoint (hr) Value: 48
  misc_feature: MA Experiment 20001614 PARAMETER Experiment Name: Zm_50ppm_KNO3_L-to-H_P Parameter: Tissue Value: Roots
  misc_feature: MA Experiment 20001614 PARAMETER Experiment Name: Zm_50ppm_KNO3_L-to-H_P Parameter: Treatment Value: 50ppm KNO3 vs. 50ppm KCl
gcacgagaccattacctagaacatcctaatcgaaaaagacttcgctcggtaagagtcctacctcaaggacgatagacatgttgaacagcctttgccgcgacaggaacaacatggtcttccttgtgagcgcaaagagccggatgactctgaacgaatggttcttaccatgtgagagccttggactagcagctgaacacggctgcttcctcaggctgagaagagacgcagaatgggagacatgcgttccggtgatagactgcagctggaagcagatcgcagagcctgtgatgaagacctataccgagactacggacgggtcgactattgaggacaaggagactgccatcgtgtggtgctacgaggacgccgatccagatttcggatcctgccaggccaaggagctccacgaccatctggagagcgtgcttgcaaacgagccggtctcagtgaaagctggacccaacctcgtcgaggtgaagccacagggcgtaagcaagggcctggtggcgaagcggatcctgtcgacgacgcaggagcggggcgacgccgacgacgacctgccggacttcgtgctgtgcgtgggcgacgaccggtccgacgaggacatgttcgaggtgatcgcggcggcggcggccgcgaggggcgtgtcctccctgcaggcggaggcggaggtgttcgcgtgcacggtggggcgcaagcccagcaaggccaagtactacctggacgaccccgcggacatcgtgcgcctcgtccagggcctcgccagcgtctccgacgacgaccagacgcacgccccaccgccgccgcctccctcggcggcgacgacggcggcggacaccgtgccgaggtgaaccgtgtcggcgtgcgggggtgcggtgcagttagctctaggcggcatgagaccttgtggttgtggtggaactagtggaagggaccgtcgctcgcgactgttcgcaggtggtgtacaaaatgctctaggaatgttgtggtctgggaatgtccttgttcgtgc

SEQ ID NO: 6238 - protein, 257 aa, Zea mays subsp. mays
  peptide (1)..(257): Ceres Seq. ID no. 12434781
  misc_feature (1)..(217): Pfam Name: Trehalose-phosphatase Pfam Description: Trehalose-phosphatase
  misc_feature (1)..(233): Homolog of NCBI NO: 25347119 NR Description: hypothetical protein T23K23.13 [imported] -
  misc_feature (1)..(242): Homolog of NCBI NO: 34902280 NR Description: Putative trehalose-6-phosphate synthase [Oryza
  misc_feature (1)..(244): Homolog of NCBI NO: 7488400 NR Description: trehalose-6-phosphate synthase homolog DL4920W -
  misc_feature (1)..(244): Homolog of NCBI NO: 18414960 NR Description: trehalose-6-phosphate synthase like protein;
  misc_feature (1)..(255): Homolog of NCBI NO: 15219002 NR Description: trehalose-6-phosphate synthase, putative; protein
  misc_feature (1)..(232): Homolog of NCBI NO: 7488401 NR Description: trehalose-6-phosphate synthase homolog F17O7.18 -
  misc_feature (1)..(232): Homolog of NCBI NO: 30698024 NR Description: alpha,alpha-trehalose-phosphate synthase,
  misc_feature (1)..(242): Homolog of NCBI NO: 19568935 NR Description: putative trehalose synthase [Solanum tuberosum]
  misc_feature (1)..(235): Homolog of NCBI NO: 34909526 NR Description: putative trehalose-6-phosphate synthase homolog
  misc_feature (1)..(236): Homolog of NCBI NO: 15220891 NR Description: trehalose 6-phosphate synthase, putative; protein At1g23870.1, supported by cDNA: gi_18176366, supported by cDNA: [Arabidopsis thaliana] >gi|9369388|gb|AAF87136.1|AC002423_1
MLNSLCRDRNNMVFLVSAKSRMTLNEWFLPCESLGLAAEHGCFLRLRRDAEWETCVPVIDCSWKQIAEPVMKTYTETTDGSTIEDKETAIVWCYEDADPDFGSCQAKELHDHLESVLANEPVSVKAGPNLVEVKPQGVSKGLVAKRILSTTQERGDADDDLPDFVLCVGDDRSDEDMFEVIAAAAAARGVSSLQAEAEVFACTVGRKPSKAKYYLDDPADIVRLVQGLASVSDDDQTHAPPPPPPSAATTAADTVPR

SEQ ID NO: 6239 - protein, 246 aa, Zea mays subsp. mays
  peptide (1)..(246): Ceres Seq. ID no. 12434782
  misc_feature (1)..(206): Pfam Name: Trehalose-phosphatase Pfam Description: Trehalose-phosphatase
  misc_feature (1)..(222): Homolog of NCBI NO: 25347119 NR Description: hypothetical protein T23K23.13 [imported] -
  misc_feature (1)..(231): Homolog of NCBI NO: 34902280 NR Description: Putative trehalose-6-phosphate synthase [Oryza
  misc_feature (1)..(233): Homolog of NCBI NO: 7488400 NR Description: trehalose-6-phosphate synthase homolog DL4920W -
  misc_feature (1)..(233): Homolog of NCBI NO: 18414960 NR Description: trehalose-6-phosphate synthase like protein;
  misc_feature (1)..(244): Homolog of NCBI NO: 15219002 NR Description: trehalose-6-phosphate synthase, putative; protein
  misc_feature (1)..(221): Homolog of NCBI NO: 7488401 NR Description: trehalose-6-phosphate synthase homolog F17O7.18 -
  misc_feature (1)..(221): Homolog of NCBI NO: 30698024 NR Description: alpha,alpha-trehalose-phosphate synthase,
  misc_feature (1)..(231): Homolog of NCBI NO: 19568935 NR Description: putative trehalose synthase [Solanum tuberosum]
  misc_feature (1)..(224): Homolog of NCBI NO: 34909526 NR Description: putative trehalose-6-phosphate synthase homolog
  misc_feature (1)..(225): Homolog of NCBI NO: 15220891 NR Description: trehalose 6-phosphate synthase, putative; protein At1g23870.1, supported by cDNA: gi_18176366, supported by cDNA: [Arabidopsis thaliana] >gi|9369388|gb|AAF87136.1|AC002423_1
MVFLVSAKSRMTLNEWFLPCESLGLAAEHGCFLRLRRDAEWETCVPVIDCSWKQIAEPVMKTYTETTDGSTIEDKETAIVWCYEDADPDFGSCQAKELHDHLESVLANEPVSVKAGPNLVEVKPQGVSKGLVAKRILSTTQERGDADDDLPDFVLCVGDDRSDEDMFEVIAAAAAARGVSSLQAEAEVFACTVGRKPSKAKYYLDDPADIVRLVQGLASVSDDDQTHAPPPPPPSAATTAADTVPR

SEQ ID NO: 6240 - protein, 236 aa, Zea mays subsp. mays
  peptide (1)..(236): Ceres Seq. ID no. 12434783
  misc_feature (1)..(196): Pfam Name: Trehalose-phosphatase Pfam Description: Trehalose-phosphatase
  misc_feature (1)..(215): Homolog of NCBI NO: 15220891 NR Description: trehalose 6-phosphate synthase, putative; protein At1g23870.1, supported by cDNA: gi_18176366, supported by cDNA: [Arabidopsis thaliana] >gi|9369388|gb|AAF87136.1|AC002423_1
  misc_feature (1)..(212): Homolog of NCBI NO: 25347119 NR Description: hypothetical protein T23K23.13 [imported] -
  misc_feature (1)..(221): Homolog of NCBI NO: 34902280 NR Description: Putative trehalose-6-phosphate synthase [Oryza
  misc_feature (1)..(223): Homolog of NCBI NO: 7488400 NR Description: trehalose-6-phosphate synthase homolog DL4920W -
  misc_feature (1)..(223): Homolog of NCBI NO: 18414960 NR Description: trehalose-6-phosphate synthase like protein;
  misc_feature (1)..(234): Homolog of NCBI NO: 15219002 NR Description: trehalose-6-phosphate synthase, putative; protein
  misc_feature (1)..(211): Homolog of NCBI NO: 7488401 NR Description: trehalose-6-phosphate synthase homolog F17O7.18 -
  misc_feature (1)..(211): Homolog of NCBI NO: 30698024 NR Description: alpha,alpha-trehalose-phosphate synthase,
  misc_feature (1)..(221): Homolog of NCBI NO: 19568935 NR Description: putative trehalose synthase [Solanum tuberosum]
  misc_feature (1)..(214): Homolog of NCBI NO: 34909526 NR Description: putative trehalose-6-phosphate synthase homolog
MTLNEWFLPCESLGLAAEHGCFLRLRRDAEWETCVPVIDCSWKQIAEPVMKTYTETTDGSTIEDKETAIVWCYEDADPDFGSCQAKELHDHLESVLANEPVSVKAGPNLVEVKPQGVSKGLVAKRILSTTQERGDADDDLPDFVLCVGDDRSDEDMFEVIAAAAAARGVSSLQAEAEVFACTVGRKPSKAKYYLDDPADIVRLVQGLASVSDDDQTHAPPPPPPSAATTAADTVPR

SEQ ID NO: 6241 - DNA, 610 bp, Zea mays subsp. mays
  misc_feature (1)..(610): Ceres Seq. ID no. 12594280
  misc_feature: MA Experiment ID: 108535 Result: Down-regulated in Transcription
  misc_feature: MA Experiment 108535 PARAMETER Experiment Name: Zm_Meristem_P Parameter: Age (day) Value: 8
  misc_feature: MA Experiment 108535 PARAMETER Experiment Name: Zm_Meristem_P Parameter: Organism Value: Zea mays
  misc_feature: MA Experiment 108535 PARAMETER Experiment Name: Zm_Meristem_P Parameter: Plant Line Value: 35A19
  misc_feature: MA Experiment 108535 PARAMETER Experiment Name: Zm_Meristem_P Parameter: Tissue Value: Root Meristem vs. Above Root Meristem
  misc_feature: MA Experiment ID: 108544 Result: Up-regulated in Transcription
  misc_feature: MA Experiment ID: 20000535 Result: Down-regulated in Transcription
  misc_feature: MA Experiment 20000535 PARAMETER Experiment Name: Zm_Hybrid_Seed_Dev_P Parameter: DAP Value: 30 vs. 12
  misc_feature: MA Experiment 20000535 PARAMETER Experiment Name: Zm_Hybrid_Seed_Dev_P Parameter: Organism Value: Zea mays
  misc_feature: MA Experiment 20000535 PARAMETER Experiment Name: Zm_Hybrid_Seed_Dev_P Parameter: Plant Line Value: 35A19
  misc_feature: MA Experiment 20000535 PARAMETER Experiment Name: Zm_Hybrid_Seed_Dev_P Parameter: Tissue Value: Embryo vs. Unfert Floret
cggtcagcgctgactagcaaggagccaagcaggacataatactgaagcaggctgcggctgcggctgcagcaacaagtcaaggaggttgaaggcgaattagagagaagaggaagatgttggcggcgacggatccgatgctgtggcacaaggtggccgccgtctccggggttgccgctttggggctcggcacctacggcgcgcacatgttccgccccaagaaccccgcgtacaaagaggtttggcacacggcgtccctgtaccatctcgtccacaccgcggcgctgctcggggcgcccatcaccaagcgccccaacgttttcggagggctcctcactgctggaattgtgctcttctctggaacgtgctacaccgtggcttatcttgaagacaggaagttttcttcaccggcaccattggggggctttgcgtttattgctgcttgggccagcctcctcttctgattaaattgtgcttttccaagaaaacaaaaaaagtcataaacctctctatatggtgttttatcaggttgtgaaaaatatacttgtaaagtgtatacagtggacagtatgcgcctctgtttaataattcaatctgtgattcctatgtttct

SEQ ID NO: 6242 - protein, 115 aa, Zea mays subsp. mays
  peptide (1)..(115): Ceres Seq. ID no. 12594281
  misc_feature (10)..(106): Pfam Name: Protein of unknown function (DUF423) Pfam Description: Protein of unknown function (DUF423)
  misc_feature (10)..(106): Pfam Name: Protein of unknown function (DUF423) Pfam Description: Protein of unknown function (DUF423)
  misc_feature (2)..(115): Homolog of NCBI NO: 40538985 NR Description: expressed protein [Oryza sativa (japonica
  misc_feature (1)..(106): Homolog of NCBI NO: 7963702 NR Description: unknown [Agropyron cristatum]
  misc_feature (1)..(106): Homolog of NCBI NO: 7963659 NR Description: unknown [Leymus cinereus]
  misc_feature (1)..(115): Homolog of NCBI NO: 18395895 NR Description: expressed protein; protein id: At2g04900.1, by cDNA: 34035. [Arabidopsis thaliana] expressed protein [Arabidopsis thaliana]
  misc_feature (6)..(115): Homolog of NCBI NO: 17065460 NR Description: Unknown protein [Arabidopsis thaliana] unknown protein [Arabidopsis thaliana]
  misc_feature (1)..(106): Homolog of NCBI NO: 7963702 NR Description: unknown [Agropyron cristatum]
  misc_feature (1)..(115): Homolog of NCBI NO: 18395895 NR Description: expressed protein; protein id: At2g04900.1, by cDNA: 34035. [Arabidopsis thaliana] expressed protein [Arabidopsis thaliana]
  misc_feature (14)..(93): Homolog of NCBI NO: 7963689 NR Description: unknown [Hordeum vulgare]
  misc_feature (19)..(115): Homolog of NCBI NO: 25411133 NR Description: hypothetical protein At2g04900 [imported] -
  misc_feature (8)..(96): Homolog of NCBI NO: 7963697 NR Description: unknown [Haynaldia villosa]
  misc_feature (8)..(100): Homolog of NCBI NO: 7963694 NR Description: unknown [Psathyrostachys juncea]
  misc_feature (8)..(100): Homolog of NCBI NO: 7963699 NR Description: unknown [Leymus triticoides]
  misc_feature (6)..(115): Homolog of NCBI NO: 17065460 NR Description: Unknown protein [Arabidopsis thaliana] unknown protein [Arabidopsis thaliana]
  misc_feature (1)..(106): Homolog of NCBI NO: 7963659 NR Description: unknown [Leymus cinereus]
  misc_feature (2)..(115): Homolog of NCBI NO: 40538985 NR Description: expressed protein [Oryza sativa (japonica
  misc_feature (8)..(100): Homolog of NCBI NO: 7963699 NR Description: unknown [Leymus triticoides]
  misc_feature (8)..(100): Homolog of NCBI NO: 7963694 NR Description: unknown [Psathyrostachys juncea]
  misc_feature (8)..(96): Homolog of NCBI NO: 7963697 NR Description: unknown [Haynaldia villosa]
  misc_feature (19)..(115): Homolog of NCBI NO: 25411133 NR Description: hypothetical protein At2g04900 [imported] -
  misc_feature (14)..(93): Homolog of NCBI NO: 7963689 NR Description: unknown [Hordeum vulgare]
MLAATDPMLWHKVAAVSGVAALGLGTYGAHMFRPKNPAYKEVWHTASLYHLVHTAALLGAPITKRPNVFGGLLTAGIVLFSGTCYTVAYLEDRKFSSPAPLGGFAFIAAWASLLF

SEQ ID NO: 6243 - protein, 108 aa, Zea mays subsp. mays
  peptide (1)..(108): Ceres Seq. ID no. 12594282
  misc_feature (3)..(99): Pfam Name: Protein of unknown function (DUF423) Pfam Description: Protein of unknown function (DUF423)
  misc_feature (3)..(99): Pfam Name: Protein of unknown function (DUF423) Pfam Description: Protein of unknown function (DUF423)
  misc_feature (1)..(108): Homolog of NCBI NO: 40538985 NR Description: expressed protein [Oryza sativa (japonica
  misc_feature (1)..(99): Homolog of NCBI NO: 7963702 NR Description: unknown [Agropyron cristatum]
  misc_feature (1)..(99): Homolog of NCBI NO: 7963659 NR Description: unknown [Leymus cinereus]
  misc_feature (1)..(108): Homolog of NCBI NO: 18395895 NR Description: expressed protein; protein id: At2g04900.1, by cDNA: 34035. [Arabidopsis thaliana] expressed protein [Arabidopsis thaliana]
  misc_feature (1)..(108): Homolog of NCBI NO: 17065460 NR Description: Unknown protein [Arabidopsis thaliana] unknown protein [Arabidopsis thaliana]
  misc_feature (1)..(99): Homolog of NCBI NO: 7963702 NR Description: unknown [Agropyron cristatum]
  misc_feature (1)..(108): Homolog of NCBI NO: 18395895 NR Description: expressed protein; protein id: At2g04900.1, by cDNA: 34035. [Arabidopsis thaliana] expressed protein [Arabidopsis thaliana]
  misc_feature (7)..(86): Homolog of NCBI NO: 7963689 NR Description: unknown [Hordeum vulgare]
  misc_feature (12)..(108): Homolog of NCBI NO: 25411133 NR Description: hypothetical protein At2g04900 [imported] -
  misc_feature (1)..(89): Homolog of NCBI NO: 7963697 NR Description: unknown [Haynaldia villosa]
  misc_feature (1)..(93): Homolog of NCBI NO: 7963694 NR Description: unknown [Psathyrostachys juncea]
  misc_feature (1)..(93): Homolog of NCBI NO: 7963699 NR Description: unknown [Leymus triticoides]
  misc_feature (1)..(108): Homolog of NCBI NO: 17065460 NR Description: Unknown protein [Arabidopsis thaliana] unknown protein [Arabidopsis thaliana]
  misc_feature (1)..(99): Homolog of NCBI NO: 7963659 NR Description: unknown [Leymus cinereus]
  misc_feature (1)..(108): Homolog of NCBI NO: 40538985 NR Description: expressed protein [Oryza sativa (japonica
  misc_feature (1)..(93): Homolog of NCBI NO: 7963699 NR Description: unknown [Leymus triticoides]
  misc_feature (1)..(93): Homolog of NCBI NO: 7963694 NR Description: unknown [Psathyrostachys juncea]
  misc_feature (1)..(89): Homolog of NCBI NO: 7963697 NR Description: unknown [Haynaldia villosa]
  misc_feature (12)..(108): Homolog of NCBI NO: 25411133 NR Description: hypothetical protein At2g04900 [imported] -
  misc_feature (7)..(86): Homolog of NCBI NO: 7963689 NR Description: unknown [Hordeum vulgare]
MLWHKVAAVSGVAALGLGTYGAHMFRPKNPAYKEVWHTASLYHLVHTAALLGAPITKRPNVFGGLLTAGIVLFSGTCYTVAYLEDRKFSSPAPLGGFAFIAAWASLLF

SEQ ID NO: 6244 - protein, 85 aa, Zea mays subsp. mays
  peptide (1)..(85): Ceres Seq. ID no. 12594283
  misc_feature (1)..(76): Pfam Name: Protein of unknown function (DUF423) Pfam Description: Protein of unknown function (DUF423)
  misc_feature (1)..(76): Pfam Name: Protein of unknown function (DUF423) Pfam Description: Protein of unknown function (DUF423)
  misc_feature (1)..(85): Homolog of NCBI NO: 40538985 NR Description: expressed protein [Oryza sativa (japonica
  misc_feature (1)..(76): Homolog of NCBI NO: 7963702 NR Description: unknown [Agropyron cristatum]
  misc_feature (1)..(76): Homolog of NCBI NO: 7963659 NR Description: unknown [Leymus cinereus]
  misc_feature (1)..(85): Homolog of NCBI NO: 18395895 NR Description: expressed protein; protein id: At2g04900.1, by cDNA: 34035. [Arabidopsis thaliana] expressed protein [Arabidopsis thaliana]
  misc_feature (1)..(85): Homolog of NCBI NO: 17065460 NR Description: Unknown protein [Arabidopsis thaliana] unknown protein [Arabidopsis thaliana]
  misc_feature (1)..(76): Homolog of NCBI NO: 7963702 NR Description: unknown [Agropyron cristatum]
  misc_feature (1)..(85): Homolog of NCBI NO: 18395895 NR Description: expressed protein; protein id: At2g04900.1, by cDNA: 34035. [Arabidopsis thaliana] expressed protein [Arabidopsis thaliana]
  misc_feature (1)..(63): Homolog of NCBI NO: 7963689 NR Description: unknown [Hordeum vulgare]
  misc_feature (1)..(85): Homolog of NCBI NO: 25411133 NR Description: hypothetical protein At2g04900 [imported] -
  misc_feature (1)..(66): Homolog of NCBI NO: 7963697 NR Description: unknown [Haynaldia villosa]
  misc_feature (1)..(70): Homolog of NCBI NO: 7963694 NR Description: unknown [Psathyrostachys juncea]
  misc_feature (1)..(70): Homolog of NCBI NO: 7963699 NR Description: unknown [Leymus triticoides]
  misc_feature (1)..(85): Homolog of NCBI NO: 17065460 NR Description: Unknown protein [Arabidopsis thaliana] unknown protein [Arabidopsis thaliana]
  misc_feature (1)..(76): Homolog of NCBI NO: 7963659 NR Description: unknown [Leymus cinereus]
  misc_feature (1)..(85): Homolog of NCBI NO: 40538985 NR Description: expressed protein [Oryza sativa (japonica
  misc_feature (1)..(70): Homolog of NCBI NO: 7963699 NR Description: unknown [Leymus triticoides]
  misc_feature (1)..(70): Homolog of NCBI NO: 7963694 NR Description: unknown [Psathyrostachys juncea]
  misc_feature (1)..(66): Homolog of NCBI NO: 7963697 NR Description: unknown [Haynaldia villosa]
  misc_feature (1)..(85): Homolog of NCBI NO: 25411133 NR Description: hypothetical protein At2g04900 [imported] -
  misc_feature (1)..(63): Homolog of NCBI NO: 7963689 NR Description: unknown [Hordeum vulgare]
MFRPKNPAYKEVWHTASLYHLVHTAALLGAPITKRPNVFGGLLTAGIVLFSGTCYTVAYLEDRKFSSPAPLGGFAFIAAWASLLF

SEQ ID NO: 6245 - DNA, 728 bp, Zea mays subsp. mays
  misc_feature (1)..(728): Ceres Seq. ID no. 12351303
  misc_feature: MA Experiment ID: 108529 Result: Up-regulated in Transcription
  misc_feature: MA Experiment 108529 PARAMETER Experiment Name: Zm_Imbibed_Seeds_P Parameter: Age (day) Value: 5 vs. 2
  misc_feature: MA Experiment 108529 PARAMETER Experiment Name: Zm_Imbibed_Seeds_P Parameter: Organism Value: Zea mays
  misc_feature: MA Experiment 108529 PARAMETER Experiment Name: Zm_Imbibed_Seeds_P Parameter: Plant Line Value: 35A19
  misc_feature: MA Experiment 108529 PARAMETER Experiment Name: Zm_Imbibed_Seeds_P Parameter: Tissue Value: Roots vs. Embryo
  misc_feature: MA Experiment ID: 20000492 Result: Down-regulated in Transcription
  misc_feature: MA Experiment 20000492 PARAMETER Experiment Name: Zm_Hybrid_Seed_Dev_P Parameter: DAP Value: 12
  misc_feature: MA Experiment 20000492 PARAMETER Experiment Name: Zm_Hybrid_Seed_Dev_P Parameter: Organism Value: Zea mays
  misc_feature: MA Experiment 20000492 PARAMETER Experiment Name: Zm_Hybrid_Seed_Dev_P Parameter: Plant Line Value: 35A19
  misc_feature: MA Experiment 20000492 PARAMETER Experiment Name: Zm_Hybrid_Seed_Dev_P Parameter: Tissue Value: Fert Kernel vs. Unfert Floret
  misc_feature: MA Experiment ID: 20000535 Result: Down-regulated in Transcription
  misc_feature: MA Experiment 20000535 PARAMETER Experiment Name: Zm_Hybrid_Seed_Dev_P Parameter: DAP Value: 30 vs. 12
  misc_feature: MA Experiment 20000535 PARAMETER Experiment Name: Zm_Hybrid_Seed_Dev_P Parameter: Organism Value: Zea mays
  misc_feature: MA Experiment 20000535 PARAMETER Experiment Name: Zm_Hybrid_Seed_Dev_P Parameter: Plant Line Value: 35A19
  misc_feature: MA Experiment 20000535 PARAMETER Experiment Name: Zm_Hybrid_Seed_Dev_P Parameter: Tissue Value: Embryo vs. Unfert Floret
  misc_feature: MA Experiment ID: 20001613 Result: Down-regulated in Transcription
  misc_feature: MA Experiment 20001613 PARAMETER Experiment Name: Zm_50ppm_KNO3_L-to-H_P Parameter: Age (day) Value: 20
  misc_feature: MA Experiment 20001613 PARAMETER Experiment Name: Zm_50ppm_KNO3_L-to-H_P Parameter: Organism Value: Zea mays
  misc_feature: MA Experiment 20001613 PARAMETER Experiment Name: Zm_50ppm_KNO3_L-to-H_P Parameter: Plant Line Value: 35A19
  misc_feature: MA Experiment 20001613 PARAMETER Experiment Name: Zm_50ppm_KNO3_L-to-H_P Parameter: Timepoint (hr) Value: 24
  misc_feature: MA Experiment 20001613 PARAMETER Experiment Name: Zm_50ppm_KNO3_L-to-H_P Parameter: Tissue Value: Roots
  misc_feature: MA Experiment 20001613 PARAMETER Experiment Name: Zm_50ppm_KNO3_L-to-H_P Parameter: Treatment Value: 50ppm KNO3 vs. 50ppm KCl
  misc_feature: MA Experiment ID: 20001614 Result: Down-regulated in Transcription
  misc_feature: MA Experiment 20001614 PARAMETER Experiment Name: Zm_50ppm_KNO3_L-to-H_P Parameter: Age (day) Value: 21
  misc_feature: MA Experiment 20001614 PARAMETER Experiment Name: Zm_50ppm_KNO3_L-to-H_P Parameter: Organism Value: Zea mays
  misc_feature: MA Experiment 20001614 PARAMETER Experiment Name: Zm_50ppm_KNO3_L-to-H_P Parameter: Plant Line Value: 35A19
  misc_feature: MA Experiment 20001614 PARAMETER Experiment Name: Zm_50ppm_KNO3_L-to-H_P Parameter: Timepoint (hr) Value: 48
  misc_feature: MA Experiment 20001614 PARAMETER Experiment Name: Zm_50ppm_KNO3_L-to-H_P Parameter: Tissue Value: Roots
  misc_feature: MA Experiment 20001614 PARAMETER Experiment Name: Zm_50ppm_KNO3_L-to-H_P Parameter: Treatment Value: 50ppm KNO3 vs. 50ppm KCl
aaataattggccgctcagcgcttcgggtgaacgggttcccttgcaagcgtgaggcgaacgtgacggcggacgacttcttcttcggcgggctcgccgcggccgccgacgtgtactcgggcaacccgatggggtcggcggcgacggcggcggacgtgtcggtgctcccgggtctcaacaccctgggcgtgtccatggcgcgcacggacttcgcgccgtcgggcggcgtcagcccgccgcacgtgcacccgcgcgccacggagatcctcttcgtcgtggagggcaccctcgaggtgggcttcgtcacctcggcaaaccgcctcttcagccgcgccgtcggcaagggagaggtgttcgtgttcccccgcggcctcgtgcacttccagcgcatcgtcggggcggcgcccgccgtggcgatctcggctttcaacgcccagctgcctggcacgcagacggtcgccggggcactgttcggcgctgcgccggcggtgccgacggacgtgctggcgcgggcgttacagatcgacggtggagcgatcgagtacatcaagtccaagtttgcgcccaactagggcatgtctcgaattgcaaatgctcaggtgatcgaaaagagggtacgaacgaacataactactaaactaggtgtgtgcccgtgcgttgcaacgggaacgtataataccacggtaatttatgtacaaatgtgtgttatattgttatgaaaaaagttttgt

SEQ ID NO: 6246 - protein, 188 aa, Zea mays subsp. mays
  peptide (1)..(188): Ceres Seq. ID no. 12351304
  misc_feature (29)..(179): Pfam Name: Cupin Pfam Description: Cupin
  misc_feature (7)..(185): Homolog of NCBI NO: 34906614 NR Description: germin(oxalate oxidase)-like protein [Oryza
  misc_feature (4)..(187): Homolog of NCBI NO: 34906612 NR Description: germin(oxalate oxidase)-like protein [Oryza
  misc_feature (4)..(187): Homolog of NCBI NO: 31712108 NR Description: germin-like protein [Oryza sativa (japonica
  misc_feature (5)..(185): Homolog of NCBI NO: 34902528 NR Description: probable germin protein 4 [Oryza sativa (japonica
  misc_feature (5)..(187): Homolog of NCBI NO: 34904670 NR Description: putative germin protein [Oryza sativa (japonica group)] >gi|5042461|gb|AAD38298.1| putative oxalate oxidase
  misc_feature (5)..(187): Homolog of NCBI NO: 1934730 NR Description: germin-like protein [Arabidopsis thaliana]
  misc_feature (5)..(187): Homolog of NCBI NO: 15228673 NR Description: germin-like protein (GLP10); protein id:
  misc_feature (5)..(187): Homolog of NCBI NO: 15217561 NR Description: germin-like protein; protein id: At1g09560.1, by cDNA: gi_11908055, supported by cDNA: gi_12642871, supported cDNA: gi_13265455, supported by cDNA: gi_1755159, supported by
  misc_feature (8)..(186): Homolog of NCBI NO: 18202917 NR Description: Germin-like protein subfamily 2 member 2 precursor
  misc_feature (8)..(186): Homolog of NCBI NO: 26449711 NR Description: putative germin [Arabidopsis thaliana]
IIGRSALRVNGFPCKREANVTADDFFFGGLAAAADVYSGNPMGSAATAADVSVLPGLNTLGVSMARTDFAPSGGVSPPHVHPRATEILFVVEGTLEVGFVTSANRLFSRAVGKGEVFVFPRGLVHFQRIVGAAPAVAISAFNAQLPGTQTVAGALFGAAPAVPTDVLARALQIDGGAIEYIKSKFAPN

SEQ ID NO: 6247 - protein, 147 aa, Zea mays subsp. mays
  peptide (1)..(147): Ceres Seq. ID no. 12351305
  misc_feature (1)..(138): Pfam Name: Cupin Pfam Description: Cupin
  misc_feature (1)..(144): Homolog of NCBI NO: 34906614 NR Description: germin(oxalate oxidase)-like protein [Oryza
  misc_feature (1)..(146): Homolog of NCBI NO: 34906612 NR Description: germin(oxalate oxidase)-like protein [Oryza
  misc_feature (1)..(146): Homolog of NCBI NO: 31712108 NR Description: germin-like protein [Oryza sativa (japonica
  misc_feature (1)..(144): Homolog of NCBI NO: 34902528 NR Description: probable germin protein 4 [Oryza sativa (japonica
  misc_feature (1)..(146): Homolog of NCBI NO: 34904670 NR Description: putative germin protein [Oryza sativa (japonica group)] >gi|5042461|gb|AAD38298.1| putative oxalate oxidase
  misc_feature (1)..(146): Homolog of NCBI NO: 1934730 NR Description: germin-like protein [Arabidopsis thaliana]
  misc_feature (1)..(146): Homolog of NCBI NO: 15228673 NR Description: germin-like protein (GLP10); protein id:
  misc_feature (1)..(146): Homolog of NCBI NO: 15217561 NR Description: germin-like protein; protein id: At1g09560.1, by cDNA: gi_11908055, supported by cDNA: gi_12642871, supported cDNA: gi_13265455, supported by cDNA: gi_1755159, supported by
  misc_feature (1)..(145): Homolog of NCBI NO: 18202917 NR Description: Germin-like protein subfamily 2 member 2 precursor
  misc_feature (1)..(145): Homolog of NCBI NO: 26449711 NR Description: putative germin [Arabidopsis thaliana]
MGSAATAADVSVLPGLNTLGVSMARTDFAPSGGVSPPHVHPRATEILFVVEGTLEVGFVTSANRLFSRAVGKGEVFVFPRGLVHFQRIVGAAPAVAISAFNAQLPGTQTVAGALFGAAPAVPTDVLARALQIDGGAIEYIKSKFAPN

SEQ ID NO: 6248 - protein, 125 aa, Zea mays subsp. mays
  peptide (1)..(125): Ceres Seq. ID no. 12351306
  misc_feature (1)..(116): Pfam Name: Cupin Pfam Description: Cupin
  misc_feature (1)..(122): Homolog of NCBI NO: 34906614 NR Description: germin(oxalate oxidase)-like protein [Oryza
  misc_feature (1)..(124): Homolog of NCBI NO: 34906612 NR Description: germin(oxalate oxidase)-like protein [Oryza
  misc_feature (1)..(124): Homolog of NCBI NO: 31712108 NR Description: germin-like protein [Oryza sativa (japonica
  misc_feature (1)..(122): Homolog of NCBI NO: 34902528 NR Description: probable germin protein 4 [Oryza sativa (japonica
  misc_feature (1)..(124): Homolog of NCBI NO: 34904670 NR Description: putative germin protein [Oryza sativa (japonica group)] >gi|5042461|gb|AAD38298.1| putative oxalate oxidase
  misc_feature (1)..(124): Homolog of NCBI NO: 1934730 NR Description: germin-like protein [Arabidopsis thaliana]
  misc_feature (1)..(124): Homolog of NCBI NO: 15228673 NR Description: germin-like protein (GLP10); protein id:
  misc_feature (1)..(124): Homolog of NCBI NO: 15217561 NR Description: germin-like protein; protein id: At1g09560.1, by cDNA: gi_11908055, supported by cDNA: gi_12642871, supported cDNA: gi_13265455, supported by cDNA: gi_1755159, supported by
  misc_feature (1)..(123): Homolog of NCBI NO: 18202917 NR Description: Germin-like protein subfamily 2 member 2 precursor
  misc_feature (1)..(123): Homolog of NCBI NO: 26449711 NR Description: putative germin [Arabidopsis thaliana]
MARTDFAPSGGVSPPHVHPRATEILFVVEGTLEVGFVTSANRLFSRAVGKGEVFVFPRGLVHFQRIVGAAPAVAISAFNAQLPGTQTVAGALFGAAPAVPTDVLARALQIDGGAIEYIKSKFAPN

SEQ ID NO: 6249 - DNA, 1053 bp, Zea mays subsp. mays
  misc_feature (1)..(1053): Ceres Seq. ID no. 12350538
  misc_feature: MA Experiment ID: 108527 Result: Up-regulated in Transcription
  misc_feature: MA Experiment 108527 PARAMETER Experiment Name: Zm_5mM_NO_P Parameter: Age (day) Value: 8
  misc_feature: MA Experiment 108527 PARAMETER Experiment Name: Zm_5mM_NO_P Parameter: Organism Value: Zea mays
  misc_feature: MA Experiment 108527 PARAMETER Experiment Name: Zm_5mM_NO_P Parameter: Plant Line Value: 35A19
  misc_feature: MA Experiment 108527 PARAMETER Experiment Name: Zm_5mM_NO_P Parameter: Timepoint (hr) Value: 6
  misc_feature: MA Experiment 108527 PARAMETER Experiment Name: Zm_5mM_NO_P Parameter: Tissue Value: Aerial
  misc_feature: MA Experiment 108527 PARAMETER Experiment Name: Zm_5mM_NO_P Parameter: Treatment Value: 5mM NO vs. No Treatment
  misc_feature: MA Experiment ID: 108529 Result: Up-regulated in Transcription
  misc_feature: MA Experiment 108529 PARAMETER Experiment Name: Zm_Imbibed_Seeds_P Parameter: Age (day) Value: 5 vs. 2
  misc_feature: MA Experiment 108529 PARAMETER Experiment Name: Zm_Imbibed_Seeds_P Parameter: Organism Value: Zea mays
  misc_feature: MA Experiment 108529 PARAMETER Experiment Name: Zm_Imbibed_Seeds_P Parameter: Plant Line Value: 35A19
  misc_feature: MA Experiment 108529 PARAMETER Experiment Name: Zm_Imbibed_Seeds_P Parameter: Tissue Value: Roots vs. Embryo
  misc_feature: MA Experiment ID: 108535 Result: Down-regulated in Transcription
  misc_feature: MA Experiment 108535 PARAMETER Experiment Name: Zm_Meristem_P Parameter: Age (day) Value: 8
  misc_feature: MA Experiment 108535 PARAMETER Experiment Name: Zm_Meristem_P Parameter: Organism Value: Zea mays
  misc_feature: MA Experiment 108535 PARAMETER Experiment Name: Zm_Meristem_P Parameter: Plant Line Value: 35A19
  misc_feature: MA Experiment 108535 PARAMETER Experiment Name: Zm_Meristem_P Parameter: Tissue Value: Root Meristem vs. Above Root Meristem
  misc_feature: MA Experiment ID: 108543 Result: Down-regulated in Transcription
  misc_feature: MA Experiment ID: 108546 Result: Up-regulated in Transcription
  misc_feature: MA Experiment 108546 PARAMETER Experiment Name: Zm_Imbibed_Seeds_P Parameter: Age (day) Value: 3 vs. 2
  misc_feature: MA Experiment 108546 PARAMETER Experiment Name: Zm_Imbibed_Seeds_P Parameter: Organism Value: Zea mays
  misc_feature: MA Experiment 108546 PARAMETER Experiment Name: Zm_Imbibed_Seeds_P Parameter: Plant Line Value: 35A19
  misc_feature: MA Experiment 108546 PARAMETER Experiment Name: Zm_Imbibed_Seeds_P Parameter: Tissue Value: Roots vs. Embryo
  misc_feature: MA Experiment ID: 20000478 Result: Up-regulated in Transcription
  misc_feature: MA Experiment 20000478 PARAMETER Experiment Name: Zm_5mM_SA_P Parameter: Age (day) Value: 11
  misc_feature: MA Experiment 20000478 PARAMETER Experiment Name: Zm_5mM_SA_P Parameter: Organism Value: Zea mays
  misc_feature: MA Experiment 20000478 PARAMETER Experiment Name: Zm_5mM_SA_P Parameter: Plant Line Value: 35A19
  misc_feature: MA Experiment 20000478 PARAMETER Experiment Name: Zm_5mM_SA_P Parameter: Timepoint (hr) Value: 72
  misc_feature: MA Experiment 20000478 PARAMETER Experiment Name: Zm_5mM_SA_P Parameter: Tissue Value: Aerial
  misc_feature: MA Experiment 20000478 PARAMETER Experiment Name: Zm_5mM_SA_P Parameter: Treatment Value: 5mM SA vs. No Treatment
  misc_feature: MA Experiment ID: 20000630 Result: Up-regulated in Transcription
  misc_feature: MA Experiment 20000630 PARAMETER Experiment Name: Zm_Herbicide-Treatments_P Parameter: Timepoint (hr) Value: 4
  misc_feature: MA Experiment 20000630 PARAMETER Experiment Name: Zm_Herbicide-Treatments_P Parameter: Tissue Value: Aerial
  misc_feature: MA Experiment 20000630 PARAMETER Experiment Name: Zm_Herbicide-Treatments_P Parameter: Treatment Value: Roundup vs. No Treatment
  misc_feature: MA Experiment ID: 20001610 Result: Up-regulated in Transcription
  misc_feature: MA Experiment 20001610 PARAMETER Experiment Name: Zm_50ppm_KNO3_L-to-H_P Parameter: Age (day) Value: 19
  misc_feature: MA Experiment 20001610 PARAMETER Experiment Name: Zm_50ppm_KNO3_L-to-H_P Parameter: Organism Value: Zea mays
  misc_feature: MA Experiment 20001610 PARAMETER Experiment Name: Zm_50ppm_KNO3_L-to-H_P Parameter: Plant Line Value: 35A19
  misc_feature: MA Experiment 20001610 PARAMETER Experiment Name: Zm_50ppm_KNO3_L-to-H_P Parameter: Timepoint (hr) Value: 2
  misc_feature: MA Experiment 20001610 PARAMETER Experiment Name: Zm_50ppm_KNO3_L-to-H_P Parameter: Tissue Value: Roots
  misc_feature: MA Experiment 20001610 PARAMETER Experiment Name: Zm_50ppm_KNO3_L-to-H_P Parameter: Treatment Value: 50ppm KNO3 vs. 50ppm KCl
  misc_feature: MA Experiment ID: 20001612 Result: Up-regulated in Transcription
  misc_feature: MA Experiment 20001612 PARAMETER Experiment Name: Zm_50ppm_KNO3_L-to-H_P Parameter: Age (day) Value: 19
  misc_feature: MA Experiment 20001612 PARAMETER Experiment Name: Zm_50ppm_KNO3_L-to-H_P Parameter: Organism Value: Zea mays
  misc_feature: MA Experiment 20001612 PARAMETER Experiment Name: Zm_50ppm_KNO3_L-to-H_P Parameter: Plant Line Value: 35A19
  misc_feature: MA Experiment 20001612 PARAMETER Experiment Name: Zm_50ppm_KNO3_L-to-H_P Parameter: Timepoint (hr) Value: 8
  misc_feature: MA Experiment 20001612 PARAMETER Experiment Name: Zm_50ppm_KNO3_L-to-H_P Parameter: Tissue Value: Roots
  misc_feature: MA Experiment 20001612 PARAMETER Experiment Name: Zm_50ppm_KNO3_L-to-H_P Parameter: Treatment Value: 50ppm KNO3 vs. 50ppm KCl
acagagcgaaacaatccgcagagactcggaagtcggaaagaatccctcctgttcttcgtcaaccctccagaacctgctctctcttcctctacgagactacgaccgtgtaaggacatggccgtcgagcgcttgaagaccgggttcgagcagttcaaggccgacgtctacgacaagaagccggagctgttcgagccactcaaggcgcaccagtcgcccaagtacatggtgttcgcctgctccgactcccgcgtgtgcccgtcggtgaccctgggcctgcaccccggcgaggcctttgccgtccgcaacatcgccagcatggtgccgccctacgacaagaccaagtacgccggcgtcggctccgccatcgagtacgccgtctgcgccctcaaggtggaggtcatcgtggtcataggccacagccgctgcggcgggatcaaggcgctcctctccctcgaggacggcgcgcccgacaagttccacttcgtggaggaatgggtcagggtcggcgccccggcgaagtccaaggtgctggccgaccacgcctcggtgcctttcgaagaccaatgctccatcctggagaaggaggccgtcaacgtgtcccttgagaacctcaagtcctacccgttcgtcaaggaagggctggagaaagggaccctcaagctggtcggcggccattacgacttcgtcaatggaaagttcgagacatgggaaccctaagtgaccatacgtacaaatacgccccaccggacttatttgccgcgtggagtgcttaattatttgccgatatatatatacacatatacaggaaatgaccggtgagaactatactgttgtaataataatagcgaggaaaaaaatatttgcatccgggatataaaaaacacttctttacaaatagaagaaaaataaattactaagagattaatttataaatttgatatgtttttgtgggcctgcctctaggtagtagatgtgaggggctttaaaagagtgtttgtatcccgaatgcaaagaattttttccagaaaggaatacatgtgttctttgacttcg

SEQ ID NO: 6250 - protein, 238 aa, Zea mays subsp. mays
  peptide (1)..(238): Ceres Seq. ID no. 12350539
  misc_feature (16)..(238): Homolog of NCBI NO: 7489810 NR Description: probable carbonate dehydratase (EC 4.2.1.1) -
  misc_feature (22)..(238): Homolog of NCBI NO: 7489809 NR Description: probable carbonate dehydratase (EC 4.2.1.1) -
  misc_feature (38)..(237): Homolog of NCBI NO: 729003 NR Description: CARBONIC ANHYDRASE, CHLOROPLAST PRECURSOR DEHYDRATASE) >gi|7436817|pir||T04478 probable carbonate
  misc_feature (38)..(238): Homolog of NCBI NO: 7436816 NR Description: probable carbonate dehydratase (EC 4.2.1.1), - rice >gi|606817|gb|AAA86943.1| carbonic anhydrase
  misc_feature (38)..(238): Homolog of NCBI NO: 34911604 NR Description: carbonic anhydrase [Oryza sativa (japonica >gi|3345477|dbj|BAA31953.1| carbonic anhydrase [Oryza sativa]
  misc_feature (35)..(237): Homolog of NCBI NO: 7489809 NR Description: probable carbonate dehydratase (EC 4.2.1.1) -
  misc_feature (35)..(237): Homolog of NCBI NO: 7489810 NR Description: probable carbonate dehydratase (EC 4.2.1.1) -
  misc_feature (35)..(238): Homolog of NCBI NO: 7489810 NR Description: probable carbonate dehydratase (EC 4.2.1.1) -
  misc_feature (41)..(237): Homolog of NCBI NO: 882246 NR Description: carbonic anhydrase 2
  misc_feature (41)..(237): Homolog of NCBI NO: 882248 NR Description: carbonic anhydrase 1
TERNNPQRLGSRKESLLFFVNPPEPALSSSTRLRPCKDMAVERLKTGFEQFKADVYDKKPELFEPLKAHQSPKYMVFACSDSRVCPSVTLGLHPGEAFAVRNIASMVPPYDKTKYAGVGSAIEYAVCALKVEVIVVIGHSRCGGIKALLSLEDGAPDKFHFVEEWVRVGAPAKSKVLADHASVPFEDQCSILEKEAVNVSLENLKSYPFVKEGLEKGTLKLVGGHYDFVNGKFETWEP

SEQ ID NO: 6251 - protein, 200 aa, Zea mays subsp. mays
  peptide (1)..(200): Ceres Seq. ID no. 12350540
  misc_feature (1)..(200): Homolog of NCBI NO: 7489810 NR Description: probable carbonate dehydratase (EC 4.2.1.1) -
  misc_feature (1)..(200): Homolog of NCBI NO: 7489809 NR Description: probable carbonate dehydratase (EC 4.2.1.1) -
  misc_feature (1)..(199): Homolog of NCBI NO: 729003 NR Description: CARBONIC ANHYDRASE, CHLOROPLAST PRECURSOR DEHYDRATASE) >gi|7436817|pir||T04478 probable carbonate
  misc_feature (1)..(200): Homolog of NCBI NO: 7436816 NR Description: probable carbonate dehydratase (EC 4.2.1.1), - rice >gi|606817|gb|AAA86943.1| carbonic anhydrase
  misc_feature (1)..(200): Homolog of NCBI NO: 34911604 NR Description: carbonic anhydrase [Oryza sativa (japonica >gi|3345477|dbj|BAA31953.1| carbonic anhydrase [Oryza sativa]
  misc_feature (1)..(199): Homolog of NCBI NO: 7489809 NR Description: probable carbonate dehydratase (EC 4.2.1.1) -
  misc_feature (1)..(199): Homolog of NCBI NO: 7489810 NR Description: probable carbonate dehydratase (EC 4.2.1.1) -
  misc_feature (1)..(200): Homolog of NCBI NO: 7489810 NR Description: probable carbonate dehydratase (EC 4.2.1.1) -
  misc_feature (3)..(199): Homolog of NCBI NO: 882246 NR Description: carbonic anhydrase 2
  misc_feature (3)..(199): Homolog of NCBI NO: 882248 NR Description: carbonic anhydrase 1
MAVERLKTGFEQFKADVYDKKPELFEPLKAHQSPKYMVFACSDSRVCPSVTLGLHPGEAFAVRNIASMVPPYDKTKYAGVGSAIEYAVCALKVEVIVVIGHSRCGGIKALLSLEDGAPDKFHFVEEWVRVGAPAKSKVLADHASVPFEDQCSILEKEAVNVSLENLKSYPFVKEGLEKGTLKLVGGHYDFVNGKFETWEP

SEQ ID NO: 6252 - protein, 164 aa, Zea mays subsp. mays
  peptide (1)..(164): Ceres Seq. ID no. 12350541
  misc_feature (1)..(164): Homolog of NCBI NO: 7489810 NR Description: probable carbonate dehydratase (EC 4.2.1.1) -
  misc_feature (1)..(164): Homolog of NCBI NO: 7489809 NR Description: probable carbonate dehydratase (EC 4.2.1.1) -
  misc_feature (1)..(163): Homolog of NCBI NO: 729003 NR Description: CARBONIC ANHYDRASE, CHLOROPLAST PRECURSOR DEHYDRATASE) >gi|7436817|pir||T04478 probable carbonate
  misc_feature (1)..(164): Homolog of NCBI NO: 7436816 NR Description: probable carbonate dehydratase (EC 4.2.1.1), - rice >gi|606817|gb|AAA86943.1| carbonic anhydrase
  misc_feature (1)..(164): Homolog of NCBI NO: 34911604 NR Description: carbonic anhydrase [Oryza sativa (japonica >gi|3345477|dbj|BAA31953.1| carbonic anhydrase [Oryza sativa]
  misc_feature (1)..(163): Homolog of NCBI NO: 7489809 NR Description: probable carbonate dehydratase (EC 4.2.1.1) -
  misc_feature (1)..(163): Homolog of NCBI NO: 7489810 NR Description: probable carbonate dehydratase (EC 4.2.1.1) -
  misc_feature (1)..(164): Homolog of NCBI NO: 7489810 NR Description: probable carbonate dehydratase (EC 4.2.1.1) -
  misc_feature (1)..(163): Homolog of NCBI NO: 882246 NR Description: carbonic anhydrase 2
  misc_feature (1)..(163): Homolog of NCBI NO: 882248 NR Description: carbonic anhydrase 1
MVFACSDSRVCPSVTLGLHPGEAFAVRNIASMVPPYDKTKYAGVGSAIEYAVCALKVEVIVVIGHSRCGGIKALLSLEDGAPDKFHFVEEWVRVGAPAKSKVLADHASVPFEDQCSILEKEAVNVSLENLKSYPFVKEGLEKGTLKLVGGHYDFVNGKFETWEP

SEQ ID NO: 6253 - DNA, 936 bp, Zea mays subsp. mays
  misc_feature (1)..(936): Ceres Seq. ID no. 12361812
  misc_feature: MA Experiment ID: 108529 Result: Up-regulated in Transcription
  misc_feature: MA Experiment 108529 PARAMETER Experiment Name: Zm_Imbibed_Seeds_P Parameter: Age (day) Value: 5 vs. 2
  misc_feature: MA Experiment 108529 PARAMETER Experiment Name: Zm_Imbibed_Seeds_P Parameter: Organism Value: Zea mays
  misc_feature: MA Experiment 108529 PARAMETER Experiment Name: Zm_Imbibed_Seeds_P Parameter: Plant Line Value: 35A19
  misc_feature: MA Experiment 108529 PARAMETER Experiment Name: Zm_Imbibed_Seeds_P Parameter: Tissue Value: Roots vs. Embryo
  misc_feature: MA Experiment ID: 108530 Result: Up-regulated in Transcription
  misc_feature: MA Experiment 108530 PARAMETER Experiment Name: Zm_Imbibed_Seeds_P Parameter: Age (day) Value: 6 vs. 2
  misc_feature: MA Experiment 108530 PARAMETER Experiment Name: Zm_Imbibed_Seeds_P Parameter: Organism Value: Zea mays
  misc_feature: MA Experiment 108530 PARAMETER Experiment Name: Zm_Imbibed_Seeds_P Parameter: Plant Line Value: 35A19
  misc_feature: MA Experiment 108530 PARAMETER Experiment Name: Zm_Imbibed_Seeds_P Parameter: Tissue Value: Aerial vs. Embryo
  misc_feature: MA Experiment ID: 108535 Result: Down-regulated in Transcription
  misc_feature: MA Experiment 108535 PARAMETER Experiment Name: Zm_Meristem_P Parameter: Age (day) Value: 8
  misc_feature: MA Experiment 108535 PARAMETER Experiment Name: Zm_Meristem_P Parameter: Organism Value: Zea mays
  misc_feature: MA Experiment 108535 PARAMETER Experiment Name: Zm_Meristem_P Parameter: Plant Line Value: 35A19
  misc_feature: MA Experiment 108535 PARAMETER Experiment Name: Zm_Meristem_P Parameter: Tissue Value: Root Meristem vs. Above Root Meristem
  misc_feature: MA Experiment ID: 20000535 Result: Down-regulated in Transcription
  misc_feature: MA Experiment 20000535 PARAMETER Experiment Name: Zm_Hybrid_Seed_Dev_P Parameter: DAP Value: 30 vs. 12
  misc_feature: MA Experiment 20000535 PARAMETER Experiment Name: Zm_Hybrid_Seed_Dev_P Parameter: Organism Value: Zea mays
  misc_feature: MA Experiment 20000535 PARAMETER Experiment Name: Zm_Hybrid_Seed_Dev_P Parameter: Plant Line Value: 35A19
  misc_feature: MA Experiment 20000535 PARAMETER Experiment Name: Zm_Hybrid_Seed_Dev_P Parameter: Tissue Value: Embryo vs. Unfert Floret
atccaatccaaagaagcctcctgctgtccacctcattccccatccgtccccgtgggaagcggggcaaagcgacgtacgctaccctttgcgtgcgcgtagcatttaaccaagcaactcccaatccccactcctcccccaccatttcttccctctcgccttcccctccgccggcaatcccacgtccaatcagccgccgctccagccttccatccatccatcccgtagctgctctctattacgccagcgatcgagagaccaagaggagcaggagcgatggcgaggagctcgttcaagctggagcaccccttcgaaaggaggcaagctgaggctaaccgcatcagggagaagtaccccgatagaattcctgtcattgttgagaaggccgagaggagtgacatcccagacatcgacaagaaaaagtaccttgtccccgccgacctcacagtgggacagtttgtgtacgtggtgcggaagcgcatcaagctcagcgccgagaaggcgatcttcatcttcgtgaagaacaccctcccaccaacagctgccctgatgtctgccatctacgaggagaacaaggacgaggacgggttcctctacatgacctacagcggcgagaacacctttgggctgctatgagtggcgccgcgccgccgtggatcgacgtcggacaatgcccctcctcctgtaaatacttaaaaaaaaaataggcgtctcaagaatccgtgtacataataatctggcatgtcttgcatcaaaagcaactcgttgcgtccactgtctgttgaaactattgaagcgtactaaacatttaagcaactcgttgcgtccactgtcagctctgggttgcttcagaagttctgtcacctgctgcgtcctccgtgagcttgtcgatgtggcaaagtaacacagggtgcctgtggtcattccacccgtttaggt

SEQ ID NO: 6254 - protein, 119 aa, Zea mays subsp. mays
  peptide (1)..(119): Ceres Seq. ID no. 12361813
  misc_feature (14)..(117): Pfam Name: Microtubule associated protein 1A/1B, light chain 3 Pfam Description: Microtubule associated protein 1A/1B, light
  misc_feature (14)..(117): Pfam Name: Microtubule associated protein 1A/1B, light chain 3 Pfam Description: Microtubule associated protein 1A/1B, light
  misc_feature (1)..(119): Homolog of NCBI NO: 38344173 NR Description: OSJNBa0053K19.12 [Oryza sativa (japonica
  misc_feature (1)..(117): Homolog of NCBI NO: 34595981 NR Description: microtubule-associated protein 1 light chain 3
  misc_feature (1)..(119): Homolog of NCBI NO: 15220686 NR Description: symbiosis-related protein, putative; protein id: supported by cDNA: 19175., supported by cDNA: gi_19912154 thaliana] >gi|19912155|dbj|BAB88389.1| autophagy 8c [Arabidopsis
  misc_feature (1)..(117): Homolog of NCBI NO: 33146967 NR Description: putative microtubule associated protein [Oryza
  misc_feature (1)..(118): Homolog of NCBI NO: 21592920 NR Description: putative microtubule-associated protein
  misc_feature (1)..(119): Homolog of NCBI NO: 38344173 NR Description: OSJNBa0053K19.12 [Oryza sativa (japonica
  misc_feature (1)..(119): Homolog of NCBI NO: 15220686 NR Description: symbiosis-related protein, putative; protein id: supported by cDNA: 19175., supported by cDNA: gi_19912154 thaliana] >gi|19912155|dbj|BAB88389.1| autophagy 8c [Arabidopsis
  misc_feature (1)..(118): Homolog of NCBI NO: 7446944 NR Description: hypothetical protein F8K4.23 - Arabidopsis
  misc_feature (1)..(118): Homolog of NCBI NO: 15224577 NR Description: putative microtubule-associated protein; protein At2g05630.1, supported by cDNA: 3416., supported by cDNA:
  misc_feature (1)..(119): Homolog of NCBI NO: 21553487 NR Description: symbiosis-related like protein [Arabidopsis
  misc_feature (1)..(119): Homolog of NCBI NO: 18415813 NR Description: symbiosis-related like protein; protein id: supported by cDNA: 14759., supported by cDNA: gi_19912150 thaliana] >gi|19912151|dbj|BAB88387.1| autophagy 8a [Arabidopsis
  misc_feature (1)..(118): Homolog of NCBI NO: 21592920 NR Description: putative microtubule-associated protein
  misc_feature (1)..(117): Homolog of NCBI NO: 33146967 NR Description: putative microtubule associated protein [Oryza
  misc_feature (1)..(117): Homolog of NCBI NO: 34595981 NR Description: microtubule-associated protein 1 light chain 3
  misc_feature (1)..(118): Homolog of NCBI NO: 40253647 NR Description: putative microtubial binding protein [Oryza
  misc_feature (1)..(118): Homolog of NCBI NO: 40253647 NR Description: putative microtubial binding protein [Oryza
  misc_feature (1)..(119): Homolog of NCBI NO: 18415813 NR Description: symbiosis-related like protein; protein id: supported by cDNA: 14759., supported by cDNA: gi_19912150 thaliana] >gi|19912151|dbj|BAB88387.1| autophagy 8a [Arabidopsis
  misc_feature (1)..(119): Homolog of NCBI NO: 21553487 NR Description: symbiosis-related like protein [Arabidopsis
  misc_feature (1)..(118): Homolog of NCBI NO: 15224577 NR Description: putative microtubule-associated protein; protein At2g05630.1, supported by cDNA: 3416., supported by cDNA:
  misc_feature (1)..(118): Homolog of NCBI NO: 7446944 NR Description: hypothetical protein F8K4.23 - Arabidopsis
MARSSFKLEHPFERRQAEANRIREKYPDRIPVIVEKAERSDIPDIDKKKYLVPADLTVGQFVYVVRKRIKLSAEKAIFIFVKNTLPPTAALMSAIYEENKDEDGFLYMTYSGENTFGLL

SEQ ID NO: 6255 - protein, 107 aa, Zea mays subsp. mays
  peptide (1)..(107): Ceres Seq. ID no. 12361814
PIQRSLLLSTSFPIRPRGKRGKATYATLCVRVAFNQATPNPHSSPTISSLSPSPPPAIPRPISRRSSLPSIHPVAALYYASDRETKRSRSDGEELVQAGAPLRKEAS

SEQ ID NO: 6256 - DNA, 725 bp, Zea mays subsp. mays
  misc_feature (1)..(725): Ceres Seq. ID no. 13580161
  misc_feature: MA Experiment ID: 108504 Result: Up-regulated in Transcription
  misc_feature: MA Experiment 108504 PARAMETER Experiment Name: Zm_Drought_P Parameter: Age (day) Value: 8
  misc_feature: MA Experiment 108504 PARAMETER Experiment Name: Zm_Drought_P Parameter: Organism Value: Zea mays
  misc_feature: MA Experiment 108504 PARAMETER Experiment Name: Zm_Drought_P Parameter: Plant Line Value: 35A19
  misc_feature: MA Experiment 108504 PARAMETER Experiment Name: Zm_Drought_P Parameter: Timepoint (hr) Value: 12
  misc_feature: MA Experiment 108504 PARAMETER Experiment Name: Zm_Drought_P Parameter: Tissue Value: Aerial
  misc_feature: MA Experiment 108504 PARAMETER Experiment Name: Zm_Drought_P Parameter: Treatment Value: Drought vs. No Drought
  misc_feature: MA Experiment ID: 108522 Result: Up-regulated in Transcription
  misc_feature: MA Experiment 108522 PARAMETER Experiment Name: Zm_42deg_Heat_P Parameter: Age (day) Value: 8
  misc_feature: MA Experiment 108522 PARAMETER Experiment Name: Zm_42deg_Heat_P Parameter: Organism Value: Zea mays
  misc_feature: MA Experiment 108522 PARAMETER Experiment Name: Zm_42deg_Heat_P Parameter: Plant Line Value: 35A19
  misc_feature: MA Experiment 108522 PARAMETER Experiment Name: Zm_42deg_Heat_P Parameter: Temperature (deg C) Value: 42 vs. 22
  misc_feature: MA Experiment 108522 PARAMETER Experiment Name: Zm_42deg_Heat_P Parameter: Timepoint (hr) Value: 1
  misc_feature: MA Experiment 108522 PARAMETER Experiment Name: Zm_42deg_Heat_P Parameter: Tissue Value: Aerial
  misc_feature: MA Experiment ID: 108523 Result: Up-regulated in Transcription
  misc_feature: MA Experiment 108523 PARAMETER Experiment Name: Zm_42deg_Heat_P Parameter: Age (day) Value: 8
  misc_feature: MA Experiment 108523 PARAMETER Experiment Name: Zm_42deg_Heat_P Parameter: Organism Value: Zea mays
  misc_feature: MA Experiment 108523 PARAMETER Experiment Name: Zm_42deg_Heat_P Parameter: Plant Line Value: 35A19
  misc_feature: MA Experiment 108523 PARAMETER Experiment Name: Zm_42deg_Heat_P Parameter: Temperature (deg C) Value: 42 vs. 22
  misc_feature: MA Experiment 108523 PARAMETER Experiment Name: Zm_42deg_Heat_P Parameter: Timepoint (hr) Value: 6
  misc_feature: MA Experiment 108523 PARAMETER Experiment Name: Zm_42deg_Heat_P Parameter: Tissue Value: Aerial
  misc_feature: MA Experiment ID: 108527 Result: Up-regulated in Transcription
  misc_feature: MA Experiment 108527 PARAMETER Experiment Name: Zm_5mM_NO_P Parameter: Age (day) Value: 8
  misc_feature: MA Experiment 108527 PARAMETER Experiment Name: Zm_5mM_NO_P Parameter: Organism Value: Zea mays
  misc_feature: MA Experiment 108527 PARAMETER Experiment Name: Zm_5mM_NO_P Parameter: Plant Line Value: 35A19
  misc_feature: MA Experiment 108527 PARAMETER Experiment Name: Zm_5mM_NO_P Parameter: Timepoint (hr) Value: 6
  misc_feature: MA Experiment 108527 PARAMETER Experiment Name: Zm_5mM_NO_P Parameter: Tissue Value: Aerial
  misc_feature: MA Experiment 108527 PARAMETER Experiment Name: Zm_5mM_NO_P Parameter: Treatment Value: 5mM NO vs. No Treatment
  misc_feature: MA Experiment ID: 108528 Result: Down-regulated in Transcription
  misc_feature: MA Experiment 108528 PARAMETER Experiment Name: Zm_Imbibed_Seeds_P Parameter: Age (day) Value: 5 vs. 2
  misc_feature: MA Experiment 108528 PARAMETER Experiment Name: Zm_Imbibed_Seeds_P Parameter: Organism Value: Zea mays
  misc_feature: MA Experiment 108528 PARAMETER Experiment Name: Zm_Imbibed_Seeds_P Parameter: Plant Line Value: 35A19
  misc_feature: MA Experiment 108528 PARAMETER Experiment Name: Zm_Imbibed_Seeds_P Parameter: Tissue Value: Aerial vs. Embryo
  misc_feature: MA Experiment ID: 108529 Result: Down-regulated in Transcription
  misc_feature: MA Experiment 108529 PARAMETER Experiment Name: Zm_Imbibed_Seeds_P Parameter: Age (day) Value: 5 vs. 2
  misc_feature: MA Experiment 108529 PARAMETER Experiment Name: Zm_Imbibed_Seeds_P Parameter: Organism Value: Zea mays
  misc_feature: MA Experiment 108529 PARAMETER Experiment Name: Zm_Imbibed_Seeds_P Parameter: Plant Line Value: 35A19
  misc_feature: MA Experiment 108529 PARAMETER Experiment Name: Zm_Imbibed_Seeds_P Parameter: Tissue Value: Roots vs. Embryo
  misc_feature: MA Experiment ID: 108530 Result: Down-regulated in Transcription
  misc_feature: MA Experiment 108530 PARAMETER Experiment Name: Zm_Imbibed_Seeds_P Parameter: Age (day) Value: 6 vs. 2
  misc_feature: MA Experiment 108530 PARAMETER Experiment Name: Zm_Imbibed_Seeds_P Parameter: Organism Value: Zea mays
  misc_feature: MA Experiment 108530 PARAMETER Experiment Name: Zm_Imbibed_Seeds_P Parameter: Plant Line Value: 35A19
  misc_feature: MA Experiment 108530 PARAMETER Experiment Name: Zm_Imbibed_Seeds_P Parameter: Tissue Value: Aerial vs. Embryo
  misc_feature: MA Experiment ID: 108532 Result: Down-regulated in Transcription
  misc_feature: MA Experiment 108532 PARAMETER Experiment Name: Zm_20uM_KNO3_H-to-L_P Parameter: Age (day) Value: 11
  misc_feature: MA Experiment 108532 PARAMETER Experiment Name: Zm_20uM_KNO3_H-to-L_P Parameter: Organism Value: Zea mays
  misc_feature: MA Experiment 108532 PARAMETER Experiment Name: Zm_20uM_KNO3_H-to-L_P Parameter: Plant Line Value: 35A19
  misc_feature: MA Experiment 108532 PARAMETER Experiment Name: Zm_20uM_KNO3_H-to-L_P Parameter: Timepoint (hr) Value: 16
  misc_feature: MA Experiment 108532 PARAMETER Experiment Name: Zm_20uM_KNO3_H-to-L_P Parameter: Tissue Value: Roots
  misc_feature: MA Experiment 108532 PARAMETER Experiment Name: Zm_20uM_KNO3_H-to-L_P Parameter: Treatment Value: 20uM KNO3 vs. 60mM KNO3
  misc_feature: MA Experiment ID: 108543 Result: Down-regulated in Transcription
  misc_feature: MA Experiment ID: 108547 Result: Down-regulated in Transcription
  misc_feature: MA Experiment 108547 PARAMETER Experiment Name: Zm_Imbibed_Seeds_P Parameter: Age (day) Value: 4 vs. 2
  misc_feature: MA Experiment 108547 PARAMETER Experiment Name: Zm_Imbibed_Seeds_P Parameter: Organism Value: Zea mays
  misc_feature: MA Experiment 108547 PARAMETER Experiment Name: Zm_Imbibed_Seeds_P Parameter: Plant Line Value: 35A19
  misc_feature: MA Experiment 108547 PARAMETER Experiment Name: Zm_Imbibed_Seeds_P Parameter: Tissue Value: Aerial vs. Embryo
  misc_feature: MA Experiment ID: 108556 Result: Up-regulated in Transcription
  misc_feature: MA Experiment 108556 PARAMETER Experiment Name: Zm_Drought_P Parameter: Age (day) Value: 9
  misc_feature: MA Experiment 108556 PARAMETER Experiment Name: Zm_Drought_P Parameter: Organism Value: Zea mays
  misc_feature: MA Experiment 108556 PARAMETER Experiment Name: Zm_Drought_P Parameter: Plant Line Value: 35A19
  misc_feature: MA Experiment 108556 PARAMETER Experiment Name: Zm_Drought_P Parameter: Timepoint (hr) Value: 24
  misc_feature: MA Experiment 108556 PARAMETER Experiment Name: Zm_Drought_P Parameter: Tissue Value: Aerial
  misc_feature: MA Experiment 108556 PARAMETER Experiment Name: Zm_Drought_P Parameter: Treatment Value: Drought vs. No Drought
  misc_feature: MA Experiment ID: 108597 Result: Up-regulated in Transcription
  misc_feature: MA Experiment 108597 PARAMETER Experiment Name: Zm_100uM_ABA_P Parameter: Age (day) Value: 9
  misc_feature: MA Experiment 108597 PARAMETER Experiment Name: Zm_100uM_ABA_P Parameter: Organism Value: Zea mays
  misc_feature: MA Experiment 108597 PARAMETER Experiment Name: Zm_100uM_ABA_P Parameter: Plant Line Value: 35A19
  misc_feature: MA Experiment 108597 PARAMETER Experiment Name: Zm_100uM_ABA_P Parameter: Timepoint (hr) Value: 24
  misc_feature: MA Experiment 108597 PARAMETER Experiment Name: Zm_100uM_ABA_P Parameter: Tissue Value: Aerial
  misc_feature: MA Experiment 108597 PARAMETER Experiment Name: Zm_100uM_ABA_P Parameter: Treatment Value: 100uM ABA vs. No Treatment
  misc_feature: MA Experiment ID: 108687 Result: Up-regulated in Transcription
  misc_feature: MA Experiment 108687 PARAMETER Experiment Name: Zm_Embryos-Flowers__P Parameter: Tissue Value: Embryo vs. Aerial+
  misc_feature: MA Experiment ID: 108689 Result: Up-regulated in Transcription
  misc_feature: MA Experiment 108689 PARAMETER Experiment Name: Zm_Drought_Roots_P Parameter: Age (day) Value: 9
  misc_feature: MA Experiment 108689 PARAMETER Experiment Name: Zm_Drought_Roots_P Parameter: Organism Value: Zea mays
  misc_feature: MA Experiment 108689 PARAMETER Experiment Name: Zm_Drought_Roots_P Parameter: Plant Line Value: 35A19
  misc_feature: MA Experiment 108689 PARAMETER Experiment Name: Zm_Drought_Roots_P Parameter: Timepoint (hr) Value: 24
  misc_feature: MA Experiment 108689 PARAMETER Experiment Name: Zm_Drought_Roots_P Parameter: Tissue Value: Roots
  misc_feature: MA Experiment 108689 PARAMETER Experiment Name: Zm_Drought_Roots_P Parameter: Treatment Value: Drought vs. No Drought
  misc_feature: MA Experiment ID: 20000477 Result: Up-regulated in Transcription
  misc_feature: MA Experiment 20000477 PARAMETER Experiment Name: Zm_5mM_SA_P Parameter: Age (day) Value: 10
  misc_feature: MA Experiment 20000477 PARAMETER Experiment Name: Zm_5mM_SA_P Parameter: Organism Value: Zea mays
  misc_feature: MA Experiment 20000477 PARAMETER Experiment Name: Zm_5mM_SA_P Parameter: Plant Line Value: 35A19
  misc_feature: MA Experiment 20000477 PARAMETER Experiment Name: Zm_5mM_SA_P Parameter: Timepoint (hr) Value: 48
  misc_feature: MA Experiment 20000477 PARAMETER Experiment Name: Zm_5mM_SA_P Parameter: Tissue Value: Aerial
  misc_feature: MA Experiment 20000477 PARAMETER Experiment Name: Zm_5mM_SA_P Parameter: Treatment Value: 5mM SA vs. No Treatment
  misc_feature: MA Experiment ID: 20000478 Result: Up-regulated in Transcription
  misc_feature: MA Experiment 20000478 PARAMETER Experiment Name: Zm_5mM_SA_P Parameter: Age (day) Value: 11
  misc_feature: MA Experiment 20000478 PARAMETER Experiment Name: Zm_5mM_SA_P Parameter: Organism Value: Zea mays
  misc_feature: MA Experiment 20000478 PARAMETER Experiment Name: Zm_5mM_SA_P Parameter: Plant Line Value: 35A19
  misc_feature: MA Experiment 20000478 PARAMETER Experiment Name: Zm_5mM_SA_P Parameter: Timepoint (hr) Value: 72
  misc_feature: MA Experiment 20000478 PARAMETER Experiment Name: Zm_5mM_SA_P Parameter: Tissue Value: Aerial
  misc_feature: MA Experiment 20000478 PARAMETER Experiment Name: Zm_5mM_SA_P Parameter: Treatment Value: 5mM SA vs. No Treatment
  misc_feature: MA Experiment ID: 20000480 Result: Up-regulated in Transcription
  misc_feature: MA Experiment 20000480 PARAMETER Experiment Name: Zm_Drought_P Parameter: Age (day) Value: 11
  misc_feature: MA Experiment 20000480 PARAMETER Experiment Name: Zm_Drought_P Parameter: Organism Value: Zea mays
  misc_feature: MA Experiment 20000480 PARAMETER Experiment Name: Zm_Drought_P Parameter: Plant Line Value: 35A19
  misc_feature: MA Experiment 20000480 PARAMETER Experiment Name: Zm_Drought_P Parameter: Timepoint (hr) Value: 72
  misc_feature: MA Experiment 20000480 PARAMETER Experiment Name: Zm_Drought_P Parameter: Tissue Value: Aerial
  misc_feature: MA Experiment 20000480 PARAMETER Experiment Name: Zm_Drought_P Parameter: Treatment Value: Drought vs. No Drought
  misc_feature: MA Experiment ID: 20000492 Result: Down-regulated in Transcription
  misc_feature: MA Experiment 20000492 PARAMETER Experiment Name: Zm_Hybrid_Seed_Dev_P Parameter: DAP Value: 12
  misc_feature: MA Experiment 20000492 PARAMETER Experiment Name: Zm_Hybrid_Seed_Dev_P Parameter: Organism Value: Zea mays
  misc_feature: MA Experiment 20000492 PARAMETER Experiment Name: Zm_Hybrid_Seed_Dev_P Parameter: Plant Line Value: 35A19
  misc_feature: MA Experiment 20000492 PARAMETER Experiment Name: Zm_Hybrid_Seed_Dev_P Parameter: Tissue Value: Fert Kernel vs. Unfert Floret
  misc_feature: MA Experiment ID: 20000535 Result: Up-regulated in Transcription
  misc_feature: MA Experiment 20000535 PARAMETER Experiment Name: Zm_Hybrid_Seed_Dev_P Parameter: DAP Value: 30 vs. 12
  misc_feature: MA Experiment 20000535 PARAMETER Experiment Name: Zm_Hybrid_Seed_Dev_P Parameter: Organism Value: Zea mays
  misc_feature: MA Experiment 20000535 PARAMETER Experiment Name: Zm_Hybrid_Seed_Dev_P Parameter: Plant Line Value: 35A19
  misc_feature: MA Experiment 20000535 PARAMETER Experiment Name: Zm_Hybrid_Seed_Dev_P Parameter: Tissue Value: Embryo vs. Unfert Floret
acaagctcgacggaactgtgactagaactagtagatccaatccaacactcgggacgaaattaaaggagacgacgcatcatccggccggcagnatccgcacggtcaccaccatgncggcgcaggagggcggcatgaggctggtgtcgcacccgatcgcngcgcacgacgggcggctgccgcggcagtacacggcggaggggcagggcgccaagaaggacatgtcgccgccgctggagtggtacggcgtgcccgagggcgngcggntgctagcgctgctggtgcaggacatcgacgccgaccccgtcgtgccgtggacgcactgggtggtggccaacatcccgcccgccaccaggggcctccccgaggggttctccggcgccgcgggaccggggccggggcgcgagctcggcggcctgcaggagggggtcaacgactggaagcagcccggctggcgcgggcccgtgccgccctcccacggccaccgcatccagttcaagctctacgcgctcgacgacgaggtgcacctcggcaacaaggtgaccagggataagctcatggaggcgatcgacgggcacgtgctggaagaagccgagctgatcgccgtgttccagggagtcgtcgccaacaactaacacactcggagatatctttgttggcgtgctttgtatttgcttgtgtggctaccatgtaattctgatcgaataaaagggaacttcacatgtgcc

SEQ ID NO: 6257 - protein, 209 aa, Zea mays subsp. mays
  peptide (1)..(209): Ceres Seq. ID no. 13580162
  misc_feature (39)..(202): Homolog of NCBI NO: 10799810 NR Description: cold-regulated protein [Hordeum vulgare subsp.
  misc_feature (39)..(202): Homolog of NCBI NO: 26017213 NR Description: cold regulated protein [Triticum aestivum]
  misc_feature (37)..(198): Homolog of NCBI NO: 15240946 NR Description: expressed protein [Arabidopsis thaliana]
  misc_feature (44)..(203): Homolog of NCBI NO: 15678301 NR Description: conserved protein [Methanothermobacter
  misc_feature (47)..(203): Homolog of NCBI NO: 17548245 NR Description: CONSERVED HYPOTHETICAL PROTEIN [Ralstonia >gi|17430491|emb|CAD17175.1| CONSERVED HYPOTHETICAL PROTEIN
  misc_feature (71)..(202): Homolog of NCBI NO: 30248206 NR Description: conserved hypothetical protein [Nitrosomonas ATCC 19718] >gi|30180091|emb|CAD84093.1| conserved hypothetical
  misc_feature (47)..(203): Homolog of NCBI NO: 23054005 NR Description: hypothetical protein [Geobacter metallireducens]
  misc_feature (56)..(203): Homolog of NCBI NO: 21673435 NR Description: conserved hypothetical protein [Chlorobium TLS] >gi|21646536|gb|AAM71842.1| conserved hypothetical protein
  misc_feature (42)..(203): Homolog of NCBI NO: 14521358 NR Description: hypothetical protein [Pyrococcus abyssi]
  misc_feature (56)..(202): Homolog of NCBI NO: 11499288 NR Description: conserved hypothetical protein [Archaeoglobus DSM 4304] >gi|6686189|sp|O28575|YG98_ARCFU Hypothetical protein
  misc_feature (30)..(30): Xaa is any aa, unknown or other
  misc_feature (38)..(38): Xaa is any aa, unknown or other
  misc_feature (52)..(52): Xaa is any aa, unknown or other
  misc_feature (86)..(86): Xaa is any aa, unknown or other
  misc_feature (88)..(88): Xaa is any aa, unknown or other
KLDGTVTRTSRSNPTLGTKLKETTHHPAGXIRTVTTMXAQEGGMRLVSHPIXAHDGRLPRQYTAEGQGAKKDMSPPLEWYGVPEGXRXLALLVQDIDADPVVPWTHWVVANIPPATRGLPEGFSGAAGPGPGRELGGLQEGVNDWKQPGWRGPVPPSHGHRIQFKLYALDDEVHLGNKVTRDKLMEAIDGHVLEEAELIAVFQGVVANN

SEQ ID NO: 6258 - protein, 173 aa, Zea mays subsp. mays
  peptide (1)..(173): Ceres Seq. ID no. 13580163
  misc_feature (3)..(166): Homolog of NCBI NO: 26017213 NR Description: cold regulated protein [Triticum aestivum]
  misc_feature (1)..(162): Homolog of NCBI NO: 15240946 NR Description: expressed protein [Arabidopsis thaliana]
  misc_feature (8)..(167): Homolog of NCBI NO: 15678301 NR Description: conserved protein [Methanothermobacter
  misc_feature (11)..(167): Homolog of NCBI NO: 17548245 NR Description: CONSERVED HYPOTHETICAL PROTEIN [Ralstonia >gi|17430491|emb|CAD17175.1| CONSERVED HYPOTHETICAL PROTEIN
  misc_feature (35)..(166): Homolog of NCBI NO: 30248206 NR Description: conserved hypothetical protein [Nitrosomonas ATCC 19718] >gi|30180091|emb|CAD84093.1| conserved hypothetical
  misc_feature (11)..(167): Homolog of NCBI NO: 23054005 NR Description: hypothetical protein [Geobacter metallireducens]
  misc_feature (20)..(167): Homolog of NCBI NO: 21673435 NR Description: conserved hypothetical protein [Chlorobium TLS] >gi|21646536|gb|AAM71842.1| conserved hypothetical protein
  misc_feature (6)..(167): Homolog of NCBI NO: 14521358 NR Description: hypothetical protein [Pyrococcus abyssi]
  misc_feature (20)..(166): Homolog of NCBI NO: 11499288 NR Description: conserved hypothetical protein [Archaeoglobus DSM 4304] >gi|6686189|sp|O28575|YG98_ARCFU Hypothetical protein
  misc_feature (3)..(166): Homolog of NCBI NO: 10799810 NR Description: cold-regulated protein [Hordeum vulgare subsp.
  misc_feature (2)..(2): Xaa is any aa, unknown or other
  misc_feature (16)..(16): Xaa is any aa, unknown or other
  misc_feature (50)..(50): Xaa is any aa, unknown or other
  misc_feature (52)..(52): Xaa is any aa, unknown or other
MXAQEGGMRLVSHPIXAHDGRLPRQYTAEGQGAKKDMSPPLEWYGVPEGXRXLALLVQDIDADPVVPWTHWVVANIPPATRGLPEGFSGAAGPGPGRELGGLQEGVNDWKQPGWRGPVPPSHGHRIQFKLYALDDEVHLGNKVTRDKLMEAIDGHVLEEAELIAVFQGVVANN

SEQ ID NO: 6259 - protein, 166 aa, Zea mays subsp. mays
  peptide (1)..(166): Ceres Seq. ID no. 13580164
  misc_feature (1)..(159): Homolog of NCBI NO: 10799810 NR Description: cold-regulated protein [Hordeum vulgare subsp.
  misc_feature (1)..(159): Homolog of NCBI NO: 26017213 NR Description: cold regulated protein [Triticum aestivum]
  misc_feature (1)..(155): Homolog of NCBI NO: 15240946 NR Description: expressed protein [Arabidopsis thaliana]
  misc_feature (1)..(160): Homolog of NCBI NO: 15678301 NR Description: conserved protein [Methanothermobacter
  misc_feature (4)..(160): Homolog of NCBI NO: 17548245 NR Description: CONSERVED HYPOTHETICAL PROTEIN [Ralstonia >gi|17430491|emb|CAD17175.1| CONSERVED HYPOTHETICAL PROTEIN
  misc_feature (28)..(159): Homolog of NCBI NO: 30248206 NR Description: conserved hypothetical protein [Nitrosomonas ATCC 19718] >gi|30180091|emb|CAD84093.1| conserved hypothetical
  misc_feature (4)..(160): Homolog of NCBI NO: 23054005 NR Description: hypothetical protein [Geobacter metallireducens]
  misc_feature (13)..(160): Homolog of NCBI NO: 21673435 NR Description: conserved hypothetical protein [Chlorobium TLS] >gi|21646536|gb|AAM71842.1| conserved hypothetical protein
  misc_feature (1)..(160): Homolog of NCBI NO: 14521358 NR Description: hypothetical protein [Pyrococcus abyssi]
  misc_feature (13)..(159): Homolog of NCBI NO: 11499288 NR Description: conserved hypothetical protein [Archaeoglobus DSM 4304] >gi|6686189|sp|O28575|YG98_ARCFU Hypothetical protein
  misc_feature (9)..(9): Xaa is any aa, unknown or other
  misc_feature (43)..(43): Xaa is any aa, unknown or other
  misc_feature (45)..(45): Xaa is any aa, unknown or other
MRLVSHPIXAHDGRLPRQYTAEGQGAKKDMSPPLEWYGVPEGXRXLALLVQDIDADPVVPWTHWVVANIPPATRGLPEGFSGAAGPGPGRELGGLQEGVNDWKQPGWRGPVPPSHGHRIQFKLYALDDEVHLGNKVTRDKLMEAIDGHVLEEAELIAVFQGVVANN

SEQ ID NO: 6260 - DNA, 653 bp, Zea mays subsp. mays
  misc_feature (1)..(653): Ceres Seq. ID no. 12401344
  misc_feature: MA Experiment ID: 108535 Result: Up-regulated in Transcription
  misc_feature: MA Experiment 108535 PARAMETER Experiment Name: Zm_Meristem_P Parameter: Age (day) Value: 8
  misc_feature: MA Experiment 108535 PARAMETER Experiment Name: Zm_Meristem_P Parameter: Organism Value: Zea mays
  misc_feature: MA Experiment 108535 PARAMETER Experiment Name: Zm_Meristem_P Parameter: Plant Line Value: 35A19
  misc_feature: MA Experiment 108535 PARAMETER Experiment Name: Zm_Meristem_P Parameter: Tissue Value: Root Meristem vs. Above Root Meristem
  misc_feature: MA Experiment ID: 108689 Result: Down-regulated in Transcription
  misc_feature: MA Experiment 108689 PARAMETER Experiment Name: Zm_Drought_Roots_P Parameter: Age (day) Value: 9
  misc_feature: MA Experiment 108689 PARAMETER Experiment Name: Zm_Drought_Roots_P Parameter: Organism Value: Zea mays
  misc_feature: MA Experiment 108689 PARAMETER Experiment Name: Zm_Drought_Roots_P Parameter: Plant Line Value: 35A19
  misc_feature: MA Experiment 108689 PARAMETER Experiment Name: Zm_Drought_Roots_P Parameter: Timepoint (hr) Value: 24
  misc_feature: MA Experiment 108689 PARAMETER Experiment Name: Zm_Drought_Roots_P Parameter: Tissue Value: Roots
  misc_feature: MA Experiment 108689 PARAMETER Experiment Name: Zm_Drought_Roots_P Parameter: Treatment Value: Drought vs. No Drought
  misc_feature: MA Experiment ID: 20000535 Result: Down-regulated in Transcription
  misc_feature: MA Experiment 20000535 PARAMETER Experiment Name: Zm_Hybrid_Seed_Dev_P Parameter: DAP Value: 30 vs. 12
  misc_feature: MA Experiment 20000535 PARAMETER Experiment Name: Zm_Hybrid_Seed_Dev_P Parameter: Organism Value: Zea mays
  misc_feature: MA Experiment 20000535 PARAMETER Experiment Name: Zm_Hybrid_Seed_Dev_P Parameter: Plant Line Value: 35A19
  misc_feature: MA Experiment 20000535 PARAMETER Experiment Name: Zm_Hybrid_Seed_Dev_P Parameter: Tissue Value: Embryo vs. Unfert Floret
ttatgctgatacagttggagacttgggatatgcatcagagcttggaaactatgcagagtatagtggtgctcctaatgaggaggaggttctgaattattctagagttgttcttgattgtgcaactgctgatcctgatggccgcaagagagcccttctcattggaggtggcatagctaacttcactgatgttgctaccacattcaatggcatcatccgagccttaagggagaaggaatccaagttgaaggcttcaagaatgcacatttatgtccgccgaggtggtccaaattaccaatctggactggctaaaatgcgtaagcttggtgcagaactcggcgttccaattgaggtgtatgggccagaagcgactatgactggaatctgcaaacaagcaattgaatgcatcatggctgcagcgtaatcagagcgtagctctgggtagtttgggatctgcaaacacgcaattgaatgtgtcatggactcagcataaatgagagatggatagtagttgcattatatagttcacacatggtgtttctgttttttgtttcagatatgttgtagcgtgttgtttgaacgaaaccttcacagatcattactgcaaagaaattgctgtgtgttaaaataaattcaaagtctagttttgtgccttt

SEQ ID NO: 6261 - protein, 139 aa, Zea mays subsp. mays
  peptide (1)..(139): Ceres Seq. ID no. 12401345
  misc_feature (1)..(136): Homolog of NCBI NO: 15217510 NR Description: unknown protein; protein id: At1g09430.1
  misc_feature (1)..(139): Homolog of NCBI NO: 15919089 NR Description: ATP citrate lyase b-subunit [Lupinus albus]
  misc_feature (1)..(139): Homolog of NCBI NO: 15219818 NR Description: ATP citrate-lyase, putative; protein id: supported by cDNA: gi_19698852 [Arabidopsis thaliana]
  misc_feature (1)..(139): Homolog of NCBI NO: 19698853 NR Description: similar to ATP-citrate-lyase [Arabidopsis
  misc_feature (1)..(139): Homolog of NCBI NO: 15220186 NR Description: ATP citrate-lyase, putative; protein id: supported by cDNA: 36439., supported by cDNA: gi_15810348, by cDNA: gi_16648641, supported by cDNA: gi_20453213, supported
  misc_feature (1)..(139): Homolog of NCBI NO: 21593129 NR Description: ATP citrate-lyase, putative [Arabidopsis thaliana]
  misc_feature (1)..(132): Homolog of NCBI NO: 9229902 NR Description: ATP citrate-lyase [Ciona intestinalis]
  misc_feature (1)..(132): Homolog of NCBI NO: 24653988 NR Description: ATP citrate lyase CG8322-PA
  misc_feature (1)..(132): Homolog of NCBI NO: 28372804 NR Description: LD21334p [Drosophila melanogaster]
  misc_feature (1)..(133): Homolog of NCBI NO: 40744985 NR Description: conserved hypothetical protein [Aspergillus
YADTVGDLGYASELGNYAEYSGAPNEEEVLNYSRVVLDCATADPDGRKRALLIGGGIANFTDVATTFNGIIRALREKESKLKASRMHIYVRRGGPNYQSGLAKMRKLGAELGVPIEVYGPEATMTGICKQAIECIMAAA

SEQ ID NO: 6262 - DNA, 818 bp, Zea mays subsp. mays
  misc_feature (1)..(818): Ceres Seq. ID no. 12359956
  misc_feature: MA Experiment ID: 108544 Result: Down-regulated in Transcription
ctgaccacaaatccgatccgtagccgcggtgcctcgctttcgagtacgagcggctactcccagcggctgcggcggcggcggcgatgagcgcggtgaacatcaccaacgtggcggtgctggataaccccaccgccttcctcaatcccttccagtttgagatctcctacgagtgcctcgtgcccctcgacgacgatctggagtggaagcttatatatgttggatcagctgaagatgaaaactacgatcaacagcttgagagcgtgcttgttggccctgtcaatgttgggacctaccgttttgtccttcaggctgacccaccggatccctcaaagatccgtgaggaagacataattggtgtgactgtgctgctattgacatgctcttacatgggccaggagttcatgagagtaggctactacgtgaacaatgattatgacgatgaacaattgagagaagagcctccagcaaaggtgctaattgaccgggtgcaaagaaatatcttggccgacaagccccgagtcaccaagttccctatcaacttccatcctgaacccagtacaggcccggggcagcagcagcagcagcaggaaccccagacgacctcgccagaaaaccacacaggcaatggcgaggccaatggtagcaagcctgaggctgaccaatgaacacagttggcttcagatattttgatgcgtgccccttacaggttgtgctgtaatattacaaacgggattagtggttgtgcattgccctgggatcctgaactctgttctgtaacttgagatgcaaatgctgggtacctggatgttttcttaggc

SEQ ID NO: 6263 - protein, 193 aa, Zea mays subsp. mays
  peptide (1)..(193): Ceres Seq. ID no. 12359957
  misc_feature (1)..(155): Pfam Name: Anti-silencing protein, ASF1-like Pfam Description: Anti-silencing protein, ASF1-like
  misc_feature (1)..(184): Homolog of NCBI NO: 15240842 NR Description: anti-silencing factor 1-like protein; protein id:
  misc_feature (1)..(190): Homolog of NCBI NO: 15219729 NR Description: hypothetical protein; protein id: At1g66740.1, by cDNA: gi_17644152, supported by cDNA: gi_20465460 [Arabidopsis
  misc_feature (12)..(177): Homolog of NCBI NO: 6069498 NR Description: S-locus protein 7 [Brassica rapa]
  misc_feature (25)..(193): Homolog of NCBI NO: 34911252 NR Description: putative anti-silencing factor 1-like protein
  misc_feature (1)..(192): Homolog of NCBI NO: 17737649 NR Description: anti-silencing factor 1 CG9383-PA
  misc_feature (1)..(162): Homolog of NCBI NO: 31215032 NR Description: ENSANGP00000013594 [Anopheles gambiae]
  misc_feature (1)..(174): Homolog of NCBI NO: 6841514 NR Description: HSPC146 [Homo sapiens]
  misc_feature (1)..(174): Homolog of NCBI NO: 7661592 NR Description: anti-silencing function 1A; DKFZP547E2110 protein
  misc_feature (1)..(159): Homolog of NCBI NO: 21313226 NR Description: RIKEN cDNA 1700003K02 [Mus musculus] unnamed protein product [Mus musculus] RIKEN cDNA 1700003K02 gene [Mus musculus]
  misc_feature (1)..(153): Homolog of NCBI NO: 33416731 NR Description: Unknown (protein for MGC:69151) [Xenopus laevis]
MSAVNITNVAVLDNPTAFLNPFQFEISYECLVPLDDDLEWKLIYVGSAEDENYDQQLESVLVGPVNVGTYRFVLQADPPDPSKIREEDIIGVTVLLLTCSYMGQEFMRVGYYVNNDYDDEQLREEPPAKVLIDRVQRNILADKPRVTKFPINFHPEPSTGPGQQQQQQEPQTTSPENHTGNGEANGSKPEADQ

SEQ ID NO: 6264 - DNA, 1206 bp, Zea mays subsp. mays
  misc_feature (1)..(1206): Ceres Seq. ID no. 12340792
  misc_feature: MA Experiment ID: 108522 Result: Up-regulated in Transcription
  misc_feature: MA Experiment 108522 PARAMETER Experiment Name: Zm_42deg_Heat_P Parameter: Age (day) Value: 8
  misc_feature: MA Experiment 108522 PARAMETER Experiment Name: Zm_42deg_Heat_P Parameter: Organism Value: Zea mays
  misc_feature: MA Experiment 108522 PARAMETER Experiment Name: Zm_42deg_Heat_P Parameter: Plant Line Value: 35A19
  misc_feature: MA Experiment 108522 PARAMETER Experiment Name: Zm_42deg_Heat_P Parameter: Temperature (deg C) Value: 42 vs. 22
  misc_feature: MA Experiment 108522 PARAMETER Experiment Name: Zm_42deg_Heat_P Parameter: Timepoint (hr) Value: 1
  misc_feature: MA Experiment 108522 PARAMETER Experiment Name: Zm_42deg_Heat_P Parameter: Tissue Value: Aerial
ctcgccggccttctcagaccacaaacattgcgcttgcggcttgccgcccagctatataagtactctcgggaataggcggtcactcatccatcccatctccatctcggagcaaaggcaatccagcaagagtcgctcctttcccttttcgggatacagccagcagaagcaatccggctaacaagtttcttcttcttcttcttctttcctgtcgcagggctcaccgaagtgacgatggcgtttgcggtctccgacgagctgctgggcaccttcgtgccgattgcggtgtactggctctactcggggctctacgtcgtcctggacgggctggggatggacgactacaggctccatcccaagggggaggaggccaggaacatcgtttccaggtggacggtcgtcaggggcgtccttgttcagcaggcgtttcaaatcgctgtctcccttcttctcttcacggttcttggtgatgataatgggactgtgaggaagcagcctctagctttggtaatggcattgcaatttatcattgcaatgtttgtcatggacacatggcagtacttcatgcacagatacatgcatatcaacagattcttgtacaagcacgtccactctaagcaccacactcttgtcgtcccctacgcctttggagctctttacaaccaccccctggaggggctcatcctggacaccgtcggcggcgcgctctcgttcctcatctctggcatgaccccaaggactggcattttcttcttctcgtttgcgaccatcaagaccgtcgatgaccactgtggtctgtggcttcctggaaacatcctccatgtattcttcagcaacaacagcgcttaccatgacatccaccatcagctctacgggaacaagtacaacttctcgcagcccttctttgtcatgtgggacaagatcctcggaacatacatgccttacactctggagacacgcaagggaggtgggtttgaggcacgcccggttaagctcgaccgagcacagcagatcaaggctgattaagcagcgtggtttctcctgtttgtctactacttcccctggtttttttttccttctgactgcatttgtactgtagaggtattttcctgtccatatagtaaaatcctttaggcagatgacatgttgtacccaaaagatgtagcaaatgaaacatcttgctaatgaagatccattggggtttgtttt

SEQ ID NO: 6265 - protein, 263 aa, Zea mays subsp. mays
  peptide (1)..(263): Ceres Seq. ID no. 12340793
  misc_feature (1)..(253): Homolog of NCBI NO: 22330531 NR Description: acid phosphatase, putative; protein id: supported by cDNA: gi_17979534 [Arabidopsis thaliana] At1g69640/F24J1.22 [Arabidopsis thaliana]
  misc_feature (1)..(253): Homolog of NCBI NO: 25404823 NR Description: probable sterol desaturase T6C23.16 [imported] -
  misc_feature (1)..(256): Homolog of NCBI NO: 18394095 NR Description: acid phosphatase, putative; protein id: supported by cDNA: gi_13605749 [Arabidopsis thaliana] At1g14290/F14L17_4 [Arabidopsis thaliana]
  misc_feature (1)..(256): Homolog of NCBI NO: 25511716 NR Description: F14L17.5 protein - Arabidopsis thaliana Contains similarity to acid phosphatase from Lupinus albus and contains a Sterol desaturase PF|01598 domain. EST gb|AI995340
  misc_feature (10)..(253): Homolog of NCBI NO: 34913184 NR Description: similar to acid phosphatase [Oryza sativa
  misc_feature (91)..(256): Homolog of NCBI NO: 34911990 NR Description: P0694A04.28 [Oryza sativa (japonica
  misc_feature (1)..(82): Homolog of NCBI NO: 34911990 NR Description: P0694A04.28 [Oryza sativa (japonica
  misc_feature (31)..(198): Homolog of NCBI NO: 5360721 NR Description: acid phosphatase [Lupinus albus]
  misc_feature (91)..(241): Homolog of NCBI NO: 19113281 NR Description: hypothetical integral membrane protein, putative in lipid metabolism [Schizosaccharomyces pombe]
  misc_feature (92)..(254): Homolog of NCBI NO: 40746027 NR Description: hypothetical protein AN0640.2 [Aspergillus
MAFAVSDELLGTFVPIAVYWLYSGLYVVLDGLGMDDYRLHPKGEEARNIVSRWTVVRGVLVQQAFQIAVSLLLFTVLGDDNGTVRKQPLALVMALQFIIAMFVMDTWQYFMHRYMHINRFLYKHVHSKHHTLVVPYAFGALYNHPLEGLILDTVGGALSFLISGMTPRTGIFFFSFATIKTVDDHCGLWLPGNILHVFFSNNSAYHDIHHQLYGNKYNFSQPFFVMWDKILGTYMPYTLETRKGGGFEARPVKLDRAQQIKAD

SEQ ID NO: 6266 - protein, 230 aa, Zea mays subsp. mays
  peptide (1)..(230): Ceres Seq. ID no. 12340794
  misc_feature (1)..(220): Homolog of NCBI NO: 22330531 NR Description: acid phosphatase, putative; protein id: supported by cDNA: gi_17979534 [Arabidopsis thaliana] At1g69640/F24J1.22 [Arabidopsis thaliana]
  misc_feature (1)..(220): Homolog of NCBI NO: 25404823 NR Description: probable sterol desaturase T6C23.16 [imported] -
  misc_feature (1)..(223): Homolog of NCBI NO: 18394095 NR Description: acid phosphatase, putative; protein id: supported by cDNA: gi_13605749 [Arabidopsis thaliana] At1g14290/F14L17_4 [Arabidopsis thaliana]
  misc_feature (1)..(223): Homolog of NCBI NO: 25511716 NR Description: F14L17.5 protein - Arabidopsis thaliana Contains similarity to acid phosphatase from Lupinus albus and contains a Sterol desaturase PF|01598 domain. EST gb|AI995340
  misc_feature (1)..(220): Homolog of NCBI NO: 34913184 NR Description: similar to acid phosphatase [Oryza sativa
  misc_feature (58)..(223): Homolog of NCBI NO: 34911990 NR Description: P0694A04.28 [Oryza sativa (japonica
  misc_feature (1)..(49): Homolog of NCBI NO: 34911990 NR Description: P0694A04.28 [Oryza sativa (japonica
  misc_feature (1)..(165): Homolog of NCBI NO: 5360721 NR Description: acid phosphatase [Lupinus albus]
  misc_feature (58)..(208): Homolog of NCBI NO: 19113281 NR Description: hypothetical integral membrane protein, putative in lipid metabolism [Schizosaccharomyces pombe]
  misc_feature (59)..(221): Homolog of NCBI NO: 40746027 NR Description: hypothetical protein AN0640.2 [Aspergillus
MDDYRLHPKGEEARNIVSRWTVVRGVLVQQAFQIAVSLLLFTVLGDDNGTVRKQPLALVMALQFIIAMFVMDTWQYFMHRYMHINRFLYKHVHSKHHTLVVPYAFGALYNHPLEGLILDTVGGALSFLISGMTPRTGIFFFSFATIKTVDDHCGLWLPGNILHVFFSNNSAYHDIHHQLYGNKYNFSQPFFVMWDKILGTYMPYTLETRKGGGFEARPVKLDRAQQIKAD

SEQ ID NO: 6267 - protein, 171 aa, Zea mays subsp. mays
  peptide (1)..(171): Ceres Seq. ID no. 12340795
  misc_feature (1)..(161): Homolog of NCBI NO: 22330531 NR Description: acid phosphatase, putative; protein id: supported by cDNA: gi_17979534 [Arabidopsis thaliana] At1g69640/F24J1.22 [Arabidopsis thaliana]
  misc_feature (1)..(161): Homolog of NCBI NO: 25404823 NR Description: probable sterol desaturase T6C23.16 [imported] -
  misc_feature (1)..(164): Homolog of NCBI NO: 18394095 NR Description: acid phosphatase, putative; protein id: supported by cDNA: gi_13605749 [Arabidopsis thaliana] At1g14290/F14L17_4 [Arabidopsis thaliana]
  misc_feature (1)..(164): Homolog of NCBI NO: 25511716 NR Description: F14L17.5 protein - Arabidopsis thaliana Contains similarity to acid phosphatase from Lupinus albus and contains a Sterol desaturase PF|01598 domain. EST gb|AI995340
  misc_feature (1)..(161): Homolog of NCBI NO: 34913184 NR Description: similar to acid phosphatase [Oryza sativa
  misc_feature (1)..(164): Homolog of NCBI NO: 34911990 NR Description: P0694A04.28 [Oryza sativa (japonica
  misc_feature (1)..(106): Homolog of NCBI NO: 5360721 NR Description: acid phosphatase [Lupinus albus]
  misc_feature (1)..(149): Homolog of NCBI NO: 19113281 NR Description: hypothetical integral membrane protein, putative in lipid metabolism [Schizosaccharomyces pombe]
  misc_feature (1)..(162): Homolog of NCBI NO: 40746027 NR Description: hypothetical protein AN0640.2 [Aspergillus
  misc_feature (1)..(141): Homolog of NCBI NO: 32411679 NR Description: hypothetical protein [Neurospora crassa]
MALQFIIAMFVMDTWQYFMHRYMHINRFLYKHVHSKHHTLVVPYAFGALYNHPLEGLILDTVGGALSFLISGMTPRTGIFFFSFATIKTVDDHCGLWLPGNILHVFFSNNSAYHDIHHQLYGNKYNFSQPFFVMWDKILGTYMPYTLETRKGGGFEARPVKLDRAQQIKAD

SEQ ID NO: 6268 - DNA, 1358 bp, Zea mays subsp. mays
  misc_feature (1)..(1358): Ceres Seq. ID no. 12352397
  misc_feature: MA Experiment ID: 108547 Result: Down-regulated in Transcription
  misc_feature: MA Experiment 108547 PARAMETER Experiment Name: Zm_Imbibed_Seeds_P Parameter: Age (day) Value: 4 vs. 2
  misc_feature: MA Experiment 108547 PARAMETER Experiment Name: Zm_Imbibed_Seeds_P Parameter: Organism Value: Zea mays
  misc_feature: MA Experiment 108547 PARAMETER Experiment Name: Zm_Imbibed_Seeds_P Parameter: Plant Line Value: 35A19
  misc_feature: MA Experiment 108547 PARAMETER Experiment Name: Zm_Imbibed_Seeds_P Parameter: Tissue Value: Aerial vs. Embryo
agtattctctgtcttttgtcttgagattaagaagtacagaaagcagtccttcgttgttcgtcaggaaaaagaacaatgcagcacgtaatcctttgcctgcaaatctctctgctactctccagcttctcctatttgatgcaagcccagtacacctcgatctttagcttcggcgactcctacaccgacaccggcaacaaggtcatcctctacggcccggcggcggcggatctgtggatcaacaagccgccgttcgggatgaccttcttcggccatccggccgggcgcctctccgacggcagactggtcatagatttcatcgcccaggcactagggctacctctccttccgccctcgctggcgaaggaccagagcttcaagcaaggcgcgaacttcgccgtggctggcgccacggcgctgaagacgagcactacaagcccagcgctctacccgcagctggccgtcgccggcgatgccgtgcctcctccgaacaacatctccctcgctgacgagctgggctggttcgacgccatgaaacccgcgctctgcggctcaccccaagcatgcaaggactacttcgcgaaggcgctgttcgtcgtgggcgagctgggctggaacgactacggggtcatggtggtcggcggcaaaagcgtcgccgaagcgcaatcctacgtgcctcagatcgtcgcaacaatcgtcgctgccacggagaagctgatcaacgacggcgccacgacggtcgtggtgtcggggatctcgccgatgggctgcgcgccggggaatctggtgctgctggcgagccaggacccggccgactatgagcccgacacggggtgcctcaagggaatgaacgagctatccagggaccacaacgcgcagctgagccaggcgctgacgacgctgggcggcaggtaccccggcgcgcgcgtcacctacgccgacctgtacggccccgtcatcgccttcgcggccgcgccggcgcgcttcggcttcgactccgcgctgagggactgctgcggcagtggcggcggcaagtacaacttcaacctgagcgccgcgtgcgggatgcccggcgtggccgcctgcccgaacccgtcggtgtacgtcaactgggacggcgtccacctcaccgaggcggcgtaccaccgcgtcgccgatggctggctcaggggaccctacgccaacccgcccattctcgccacggcgtagcgaactaggcgacgtggatgcgtgtattaattcaatttcttgcggccgggaatcacgtaaataatttgctgagttttctgtctgatcgtctgattcatgaaccacgtacaatttctctatataatacgtataattatattctgtgttcgtgc

SEQ ID NO: 6269 - protein, 376 aa, Zea mays subsp. mays
  peptide (1)..(376): Ceres Seq. ID no. 12352398
  misc_feature (28)..(362): Pfam Name: GDSL-like Lipase/Acylhydrolase Pfam Description: GDSL-like Lipase/Acylhydrolase
  misc_feature (6)..(376): Homolog of NCBI NO: 34903970 NR Description: OSJNBa0038J17.30 [Oryza sativa (japonica >gi|7523504|dbj|BAA94232.1| unnamed protein product [Oryza sativa
  misc_feature (27)..(374): Homolog of NCBI NO: 34903994 NR Description: unnamed protein product [Oryza sativa (japonica group)] >gi|7523492|dbj|BAA94220.1| unnamed protein product
  misc_feature (27)..(376): Homolog of NCBI NO: 34903986 NR Description: unnamed protein product [Oryza sativa (japonica group)] >gi|7523496|dbj|BAA94224.1| unnamed protein product
  misc_feature (3)..(371): Homolog of NCBI NO: 15225872 NR Description: putative lipase; protein id: At2g27360.1
  misc_feature (1)..(370): Homolog of NCBI NO: 15218756 NR Description: lipase; protein id: At1g28670.1, supported by
  misc_feature (1)..(370): Homolog of NCBI NO: 10764854 NR Description: F1K23.13 [Arabidopsis thaliana]
  misc_feature (1)..(370): Homolog of NCBI NO: 10764854 NR Description: F1K23.13 [Arabidopsis thaliana]
  misc_feature (24)..(363): Homolog of NCBI NO: 10764854 NR Description: F1K23.13 [Arabidopsis thaliana]
  misc_feature (217)..(370): Homolog of NCBI NO: 10764854 NR Description: F1K23.13 [Arabidopsis thaliana]
  misc_feature (58)..(189): Homolog of NCBI NO: 10764854 NR Description: F1K23.13 [Arabidopsis thaliana]
MQHVILCLQISLLLSSFSYLMQAQYTSIFSFGDSYTDTGNKVILYGPAAADLWINKPPFGMTFFGHPAGRLSDGRLVIDFIAQALGLPLLPPSLAKDQSFKQGANFAVAGATALKTSTTSPALYPQLAVAGDAVPPPNNISLADELGWFDAMKPALCGSPQACKDYFAKALFVVGELGWNDYGVMVVGGKSVAEAQSYVPQIVATIVAATEKLINDGATTVVVSGISPMGCAPGNLVLLASQDPADYEPDTGCLKGMNELSRDHNAQLSQALTTLGGRYPGARVTYADLYGPVIAFAAAPARFGFDSALRDCCGSGGGKYNFNLSAACGMPGVAACPNPSVYVNWDGVHLTEAAYHRVADGWLRGPYANPPILATA

SEQ ID NO: 6270 - protein, 356 aa, Zea mays subsp. mays
  peptide (1)..(356): Ceres Seq. ID no. 12352399
  misc_feature (8)..(342): Pfam Name: GDSL-like Lipase/Acylhydrolase Pfam Description: GDSL-like Lipase/Acylhydrolase
  misc_feature (1)..(356): Homolog of NCBI NO: 34903970 NR Description: OSJNBa0038J17.30 [Oryza sativa (japonica >gi|7523504|dbj|BAA94232.1| unnamed protein product [Oryza sativa
  misc_feature (7)..(354): Homolog of NCBI NO: 34903994 NR Description: unnamed protein product [Oryza sativa (japonica group)] >gi|7523492|dbj|BAA94220.1| unnamed protein product
  misc_feature (7)..(356): Homolog of NCBI NO: 34903986 NR Description: unnamed protein product [Oryza sativa (japonica group)] >gi|7523496|dbj|BAA94224.1| unnamed protein product
  misc_feature (1)..(351): Homolog of NCBI NO: 15225872 NR Description: putative lipase; protein id: At2g27360.1
  misc_feature (1)..(350): Homolog of NCBI NO: 15218756 NR Description: lipase; protein id: At1g28670.1, supported by
  misc_feature (1)..(350): Homolog of NCBI NO: 10764854 NR Description: F1K23.13 [Arabidopsis thaliana]
  misc_feature (1)..(350): Homolog of NCBI NO: 10764854 NR Description: F1K23.13 [Arabidopsis thaliana]
  misc_feature (4)..(343): Homolog of NCBI NO: 10764854 NR Description: F1K23.13 [Arabidopsis thaliana]
  misc_feature (197)..(350): Homolog of NCBI NO: 10764854 NR Description: F1K23.13 [Arabidopsis thaliana]
  misc_feature (38)..(169): Homolog of NCBI NO: 10764854 NR Description: F1K23.13 [Arabidopsis thaliana]
MQAQYTSIFSFGDSYTDTGNKVILYGPAAADLWINKPPFGMTFFGHPAGRLSDGRLVIDFIAQALGLPLLPPSLAKDQSFKQGANFAVAGATALKTSTTSPALYPQLAVAGDAVPPPNNISLADELGWFDAMKPALCGSPQACKDYFAKALFVVGELGWNDYGVMVVGGKSVAEAQSYVPQIVATIVAATEKLINDGATTVVVSGISPMGCAPGNLVLLASQDPADYEPDTGCLKGMNELSRDHNAQLSQALTTLGGRYPGARVTYADLYGPVIAFAAAPARFGFDSALRDCCGSGGGKYNFNLSAACGMPGVAACPNPSVYVNWDGVHLTEAAYHRVADGWLRGPYANPPILATA

SEQ ID NO: 6271 - protein, 316 aa, Zea mays subsp. mays
  peptide (1)..(316): Ceres Seq. ID no. 12352400
  misc_feature (1)..(302): Pfam Name: GDSL-like Lipase/Acylhydrolase Pfam Description: GDSL-like Lipase/Acylhydrolase
  misc_feature (1)..(316): Homolog of NCBI NO: 34903970 NR Description: OSJNBa0038J17.30 [Oryza sativa (japonica >gi|7523504|dbj|BAA94232.1| unnamed protein product [Oryza sativa
  misc_feature (1)..(314): Homolog of NCBI NO: 34903994 NR Description: unnamed protein product [Oryza sativa (japonica group)] >gi|7523492|dbj|BAA94220.1| unnamed protein product
  misc_feature (1)..(316): Homolog of NCBI NO: 34903986 NR Description: unnamed protein product [Oryza sativa (japonica group)] >gi|7523496|dbj|BAA94224.1| unnamed protein product
  misc_feature (1)..(311): Homolog of NCBI NO: 15225872 NR Description: putative lipase; protein id: At2g27360.1
  misc_feature (1)..(310): Homolog of NCBI NO: 15218756 NR Description: lipase; protein id: At1g28670.1, supported by
  misc_feature (1)..(310): Homolog of NCBI NO: 10764854 NR Description: F1K23.13 [Arabidopsis thaliana]
  misc_feature (1)..(310): Homolog of NCBI NO: 10764854 NR Description: F1K23.13 [Arabidopsis thaliana]
  misc_feature (1)..(303): Homolog of NCBI NO: 10764854 NR Description: F1K23.13 [Arabidopsis thaliana]
  misc_feature (157)..(310): Homolog of NCBI NO: 10764854 NR Description: F1K23.13 [Arabidopsis thaliana]
  misc_feature (1)..(129): Homolog of NCBI NO: 10764854 NR Description: F1K23.13 [Arabidopsis thaliana]
MTFFGHPAGRLSDGRLVIDFIAQALGLPLLPPSLAKDQSFKQGANFAVAGATALKTSTTSPALYPQLAVAGDAVPPPNNISLADELGWFDAMKPALCGSPQACKDYFAKALFVVGELGWNDYGVMVVGGKSVAEAQSYVPQIVATIVAATEKLINDGATTVVVSGISPMGCAPGNLVLLASQDPADYEPDTGCLKGMNELSRDHNAQLSQALTTLGGRYPGARVTYADLYGPVIAFAAAPARFGFDSALRDCCGSGGGKYNFNLSAACGMPGVAACPNPSVYVNWDGVHLTEAAYHRVADGWLRGPYANPPILATA

SEQ ID NO: 6272 - DNA, 984 bp, Zea mays subsp. mays
  misc_feature (1)..(984): Ceres Seq. ID no. 12362327
  misc_feature: MA Experiment ID: 108529 Result: Down-regulated in Transcription
  misc_feature: MA Experiment 108529 PARAMETER Experiment Name: Zm_Imbibed_Seeds_P Parameter: Age (day) Value: 5 vs. 2
  misc_feature: MA Experiment 108529 PARAMETER Experiment Name: Zm_Imbibed_Seeds_P Parameter: Organism Value: Zea mays
  misc_feature: MA Experiment 108529 PARAMETER Experiment Name: Zm_Imbibed_Seeds_P Parameter: Plant Line Value: 35A19
  misc_feature: MA Experiment 108529 PARAMETER Experiment Name: Zm_Imbibed_Seeds_P Parameter: Tissue Value: Roots vs. Embryo
  misc_feature: MA Experiment ID: 108545 Result: Up-regulated in Transcription
  misc_feature: MA Experiment 108545 PARAMETER Experiment Name: Zm_Imbibed_Seeds_P Parameter: Age (day) Value: 3 vs. 2
  misc_feature: MA Experiment 108545 PARAMETER Experiment Name: Zm_Imbibed_Seeds_P Parameter: Organism Value: Zea mays
  misc_feature: MA Experiment 108545 PARAMETER Experiment Name: Zm_Imbibed_Seeds_P Parameter: Plant Line Value: 35A19
  misc_feature: MA Experiment 108545 PARAMETER Experiment Name: Zm_Imbibed_Seeds_P Parameter: Tissue Value: Aerial vs. Embryo
  misc_feature: MA Experiment ID: 108546 Result: Down-regulated in Transcription
  misc_feature: MA Experiment 108546 PARAMETER Experiment Name: Zm_Imbibed_Seeds_P Parameter: Age (day) Value: 3 vs. 2
  misc_feature: MA Experiment 108546 PARAMETER Experiment Name: Zm_Imbibed_Seeds_P Parameter: Organism Value: Zea mays
  misc_feature: MA Experiment 108546 PARAMETER Experiment Name: Zm_Imbibed_Seeds_P Parameter: Plant Line Value: 35A19
  misc_feature: MA Experiment 108546 PARAMETER Experiment Name: Zm_Imbibed_Seeds_P Parameter: Tissue Value: Roots vs. Embryo
  misc_feature: MA Experiment ID: 20000477 Result: Down-regulated in Transcription
  misc_feature: MA Experiment 20000477 PARAMETER Experiment Name: Zm_5mM_SA_P Parameter: Age (day) Value: 10
  misc_feature: MA Experiment 20000477 PARAMETER Experiment Name: Zm_5mM_SA_P Parameter: Organism Value: Zea mays
  misc_feature: MA Experiment 20000477 PARAMETER Experiment Name: Zm_5mM_SA_P Parameter: Plant Line Value: 35A19
  misc_feature: MA Experiment 20000477 PARAMETER Experiment Name: Zm_5mM_SA_P Parameter: Timepoint (hr) Value: 48
  misc_feature: MA Experiment 20000477 PARAMETER Experiment Name: Zm_5mM_SA_P Parameter: Tissue Value: Aerial
  misc_feature: MA Experiment 20000477 PARAMETER Experiment Name: Zm_5mM_SA_P Parameter: Treatment Value: 5mM SA vs. No Treatment
  misc_feature: MA Experiment ID: 20000479 Result: Down-regulated in Transcription
  misc_feature: MA Experiment 20000479 PARAMETER Experiment Name: Zm_Drought_P Parameter: Age (day) Value: 10
  misc_feature: MA Experiment 20000479 PARAMETER Experiment Name: Zm_Drought_P Parameter: Organism Value: Zea mays
  misc_feature: MA Experiment 20000479 PARAMETER Experiment Name: Zm_Drought_P Parameter: Plant Line Value: 35A19
  misc_feature: MA Experiment 20000479 PARAMETER Experiment Name: Zm_Drought_P Parameter: Timepoint (hr) Value: 48
  misc_feature: MA Experiment 20000479 PARAMETER Experiment Name: Zm_Drought_P Parameter: Tissue Value: Aerial
  misc_feature: MA Experiment 20000479 PARAMETER Experiment Name: Zm_Drought_P Parameter: Treatment Value: Drought vs. No Drought
  misc_feature: MA Experiment ID: 20000632 Result: Down-regulated in Transcription
  misc_feature: MA Experiment 20000632 PARAMETER Experiment Name: Zm_Herbicide-Treatments_P Parameter: Timepoint (hr) Value: 4
  misc_feature: MA Experiment 20000632 PARAMETER Experiment Name: Zm_Herbicide-Treatments_P Parameter: Tissue Value: Aerial
  misc_feature: MA Experiment 20000632 PARAMETER Experiment Name: Zm_Herbicide-Treatments_P Parameter: Treatment Value: Glean vs. No Treatment
acggatgctataataactgcccctcaccaaacctcccagccagctctcactcactcacaagtcacacagccacacttgaaccgctgcccgcagcggagggagcttgcacgggccaacgcacacataacacaagctcgtcgtcgatggcgcggtgggctgcggtgctagcgctggccgcggccacggccatcgccgtggcgtccgtggcgggcggcgacatgaacgcggacaagacggagtgcgcggaccagctggtgggcctggcgccgtgcctgcagtacgtgcaggggcaggcccgcgcgccgccgcccgactgctgcggcggcctgcgccaggtgctggggaagagccccaagtgcctgtgcgtgctcgtcaaggacaaggacgaccccaacctgggcatcaagatcaacgccaccctcgcgctcgcgctccccaacgcctgcggcgccacccgcgccaacgtctcccactgcgctcagctcctgcatattcccccgggctccaaagacgccgccgtcttcagtcccggcagcgacaagggctccactgccgctccagccaaggacaactcgacggcgacgaccgactcccgcgcgctgcaggcgaccaccggacgcggcgtgtcctcctcggcggcgaccgccggtgctgcactcacggtgctgctcgccggctacctcctcctgctcgtgccagagctgtcgcctagctcgttctagaccctctgtcaagttgtgccaccagtaggatttgatatgttgttgttctttctagtacgtgacgtgacagacaatttgctgctggtgtccttgttgttgtagtagttgcactgcgtgttcctgttatgctatgggtacgagatgttagggcatgggttaagctaagctaaggcgatgggggatcagtaccttacctctcatctctggctgctgatcctttttgttcttggcactgctgttttatctgaacatttgatcagcc

SEQ ID NO: 6273 - protein, 239 aa, Zea mays subsp. mays
  peptide (1)..(239): Ceres Seq. ID no. 12362328
  misc_feature (80)..(158): Pfam Name: Protease inhibitor/seed storage/LTP family Pfam Description: Protease inhibitor/seed storage/LTP family
  misc_feature (50)..(234): Homolog of NCBI NO: 34394084 NR Description: lipid transfer protein-like [Oryza sativa
  misc_feature (54)..(186): Homolog of NCBI NO: 15224863 NR Description: unknown protein; protein id: At2g44300.1
  misc_feature (56)..(216): Homolog of NCBI NO: 15224862 NR Description: unknown protein; protein id: At2g44290.1
  misc_feature (72)..(229): Homolog of NCBI NO: 18405294 NR Description: expressed protein; protein id: At1g55260.1, by cDNA: 13599., supported by cDNA: gi_15724271, supported by gi_19699113 [Arabidopsis thaliana] >gi|25354706|pir||E96594
  misc_feature (72)..(229): Homolog of NCBI NO: 21537387 NR Description: unknown [Arabidopsis thaliana]
  misc_feature (54)..(195): Homolog of NCBI NO: 15231070 NR Description: putative protein; protein id: At3g58550.1, by cDNA: 27380. [Arabidopsis thaliana] >gi|11357439|pir||T45675
  misc_feature (54)..(195): Homolog of NCBI NO: 21555220 NR Description: unknown [Arabidopsis thaliana]
  misc_feature (48)..(224): Homolog of NCBI NO: 25553595 NR Description: OJ1656_E11.26 [Oryza sativa (japonica
  misc_feature (47)..(224): Homolog of NCBI NO: 25553588 NR Description: OJ1656_E11.14 [Oryza sativa (japonica
  misc_feature (58)..(219): Homolog of NCBI NO: 25553602 NR Description: OJ1656_E11.34 [Oryza sativa (japonica
GCYNNCPSPNLPASSHSLTSHTATLEPLPAAEGACTGQRTHNTSSSSMARWAAVLALAAATAIAVASVAGGDMNADKTECADQLVGLAPCLQYVQGQARAPPPDCCGGLRQVLGKSPKCLCVLVKDKDDPNLGIKINATLALALPNACGATRANVSHCAQLLHIPPGSKDAAVFSPGSDKGSTAAPAKDNSTATTDSRALQATTGRGVSSSAATAGAALTVLLAGYLLLLVPELSPSSF

SEQ ID NO: 6274 - protein, 192 aa, Zea mays subsp. mays
  peptide (1)..(192): Ceres Seq. ID no. 12362329
  misc_feature (33)..(111): Pfam Name: Protease inhibitor/seed storage/LTP family Pfam Description: Protease inhibitor/seed storage/LTP family
  misc_feature (7)..(139): Homolog of NCBI NO: 15224863 NR Description: unknown protein; protein id: At2g44300.1
  misc_feature (9)..(169): Homolog of NCBI NO: 15224862 NR Description: unknown protein; protein id: At2g44290.1
  misc_feature (25)..(182): Homolog of NCBI NO: 18405294 NR Description: expressed protein; protein id: At1g55260.1, by cDNA: 13599., supported by cDNA: gi_15724271, supported by gi_19699113 [Arabidopsis thaliana] >gi|25354706|pir||E96594
  misc_feature (25)..(182): Homolog of NCBI NO: 21537387 NR Description: unknown [Arabidopsis thaliana]
  misc_feature (7)..(148): Homolog of NCBI NO: 15231070 NR Description: putative protein; protein id: At3g58550.1, by cDNA: 27380. [Arabidopsis thaliana] >gi|11357439|pir||T45675
  misc_feature (3)..(187): Homolog of NCBI NO: 34394084 NR Description: lipid transfer protein-like [Oryza sativa
  misc_feature (7)..(148): Homolog of NCBI NO: 21555220 NR Description: unknown [Arabidopsis thaliana]
  misc_feature (1)..(177): Homolog of NCBI NO: 25553595 NR Description: OJ1656_E11.26 [Oryza sativa (japonica
  misc_feature (1)..(177): Homolog of NCBI NO: 25553588 NR Description: OJ1656_E11.14 [Oryza sativa (japonica
  misc_feature (11)..(172): Homolog of NCBI NO: 25553602 NR Description: OJ1656_E11.34 [Oryza sativa (japonica
MARWAAVLALAAATAIAVASVAGGDMNADKTECADQLVGLAPCLQYVQGQARAPPPDCCGGLRQVLGKSPKCLCVLVKDKDDPNLGIKINATLALALPNACGATRANVSHCAQLLHIPPGSKDAAVFSPGSDKGSTAAPAKDNSTATTDSRALQATTGRGVSSSAATAGAALTVLLAGYLLLLVPELSPSSF

SEQ ID NO: 6275 - protein, 167 aa, Zea mays subsp. mays
  peptide (1)..(167): Ceres Seq. ID no. 12362330
  misc_feature (8)..(86): Pfam Name: Protease inhibitor/seed storage/LTP family Pfam Description: Protease inhibitor/seed storage/LTP family
  misc_feature (1)..(162): Homolog of NCBI NO: 34394084 NR Description: lipid transfer protein-like [Oryza sativa
  misc_feature (1)..(114): Homolog of NCBI NO: 15224863 NR Description: unknown protein; protein id: At2g44300.1
  misc_feature (1)..(144): Homolog of NCBI NO: 15224862 NR Description: unknown protein; protein id: At2g44290.1
  misc_feature (1)..(157): Homolog of NCBI NO: 18405294 NR Description: expressed protein; protein id: At1g55260.1, by cDNA: 13599., supported by cDNA: gi_15724271, supported by gi_19699113 [Arabidopsis thaliana] >gi|25354706|pir||E96594
  misc_feature (1)..(157): Homolog of NCBI NO: 21537387 NR Description: unknown [Arabidopsis thaliana]
  misc_feature (1)..(123): Homolog of NCBI NO: 15231070 NR Description: putative protein; protein id: At3g58550.1, by cDNA: 27380. [Arabidopsis thaliana] >gi|11357439|pir||T45675
  misc_feature (1)..(123): Homolog of NCBI NO: 21555220 NR Description: unknown [Arabidopsis thaliana]
  misc_feature (1)..(152): Homolog of NCBI NO: 25553595 NR Description: OJ1656_E11.26 [Oryza sativa (japonica
  misc_feature (1)..(152): Homolog of NCBI NO: 25553588 NR Description: OJ1656_E11.14 [Oryza sativa (japonica
  misc_feature (1)..(147): Homolog of NCBI NO: 25553602 NR Description: OJ1656_E11.34 [Oryza sativa (japonica
MNADKTECADQLVGLAPCLQYVQGQARAPPPDCCGGLRQVLGKSPKCLCVLVKDKDDPNLGIKINATLALALPNACGATRANVSHCAQLLHIPPGSKDAAVFSPGSDKGSTAAPAKDNSTATTDSRALQATTGRGVSSSAATAGAALTVLLAGYLLLLVPELSPSSF

SEQ ID NO: 6276 - DNA, 784 bp, Zea mays subsp. mays
  misc_feature (1)..(784): Ceres Seq. ID no. 12405529
  misc_feature: MA Experiment ID: 108527 Result: Down-regulated in Transcription
  misc_feature: MA Experiment 108527 PARAMETER Experiment Name: Zm_5mM_NO_P Parameter: Age (day) Value: 8
  misc_feature: MA Experiment 108527 PARAMETER Experiment Name: Zm_5mM_NO_P Parameter: Organism Value: Zea mays
  misc_feature: MA Experiment 108527 PARAMETER Experiment Name: Zm_5mM_NO_P Parameter: Plant Line Value: 35A19
  misc_feature: MA Experiment 108527 PARAMETER Experiment Name: Zm_5mM_NO_P Parameter: Timepoint (hr) Value: 6
  misc_feature: MA Experiment 108527 PARAMETER Experiment Name: Zm_5mM_NO_P Parameter: Tissue Value: Aerial
  misc_feature: MA Experiment 108527 PARAMETER Experiment Name: Zm_5mM_NO_P Parameter: Treatment Value: 5mM NO vs. No Treatment
  misc_feature: MA Experiment ID: 108529 Result: Up-regulated in Transcription
  misc_feature: MA Experiment 108529 PARAMETER Experiment Name: Zm_Imbibed_Seeds_P Parameter: Age (day) Value: 5 vs. 2
  misc_feature: MA Experiment 108529 PARAMETER Experiment Name: Zm_Imbibed_Seeds_P Parameter: Organism Value: Zea mays
  misc_feature: MA Experiment 108529 PARAMETER Experiment Name: Zm_Imbibed_Seeds_P Parameter: Plant Line Value: 35A19
  misc_feature: MA Experiment 108529 PARAMETER Experiment Name: Zm_Imbibed_Seeds_P Parameter: Tissue Value: Roots vs. Embryo
  misc_feature: MA Experiment ID: 108535 Result: Down-regulated in Transcription
  misc_feature: MA Experiment 108535 PARAMETER Experiment Name: Zm_Meristem_P Parameter: Age (day) Value: 8
  misc_feature: MA Experiment 108535 PARAMETER Experiment Name: Zm_Meristem_P Parameter: Organism Value: Zea mays
  misc_feature: MA Experiment 108535 PARAMETER Experiment Name: Zm_Meristem_P Parameter: Plant Line Value: 35A19
  misc_feature: MA Experiment 108535 PARAMETER Experiment Name: Zm_Meristem_P Parameter: Tissue Value: Root Meristem vs. Above Root Meristem
  misc_feature: MA Experiment ID: 108536 Result: Down-regulated in Transcription
  misc_feature: MA Experiment 108536 PARAMETER Experiment Name: Zm_Meristem_P Parameter: Age (day) Value: 8
  misc_feature: MA Experiment 108536 PARAMETER Experiment Name: Zm_Meristem_P Parameter: Organism Value: Zea mays
  misc_feature: MA Experiment 108536 PARAMETER Experiment Name: Zm_Meristem_P Parameter: Plant Line Value: 35A19
  misc_feature: MA Experiment 108536 PARAMETER Experiment Name: Zm_Meristem_P Parameter: Tissue Value: Shoot Meristem vs. Above Shoot Meristem
  misc_feature: MA Experiment ID: 108556 Result: Down-regulated in Transcription
  misc_feature: MA Experiment 108556 PARAMETER Experiment Name: Zm_Drought_P Parameter: Age (day) Value: 9
  misc_feature: MA Experiment 108556 PARAMETER Experiment Name: Zm_Drought_P Parameter: Organism Value: Zea mays
  misc_feature: MA Experiment 108556 PARAMETER Experiment Name: Zm_Drought_P Parameter: Plant Line Value: 35A19
  misc_feature: MA Experiment 108556 PARAMETER Experiment Name: Zm_Drought_P Parameter: Timepoint (hr) Value: 24
  misc_feature: MA Experiment 108556 PARAMETER Experiment Name: Zm_Drought_P Parameter: Tissue Value: Aerial
  misc_feature: MA Experiment 108556 PARAMETER Experiment Name: Zm_Drought_P Parameter: Treatment Value: Drought vs. No Drought
  misc_feature: MA Experiment ID: 108687 Result: Down-regulated in Transcription
  misc_feature: MA Experiment 108687 PARAMETER Experiment Name: Zm_Embryos-Flowers__P Parameter: Tissue Value: Embryo vs. Aerial+
  misc_feature: MA Experiment ID: 20000108 Result: Down-regulated in Transcription
  misc_feature: MA Experiment 20000108 PARAMETER Experiment Name: Zm_Root-Tips_P Parameter: Age (day) Value: 12
  misc_feature: MA Experiment 20000108 PARAMETER Experiment Name: Zm_Root-Tips_P Parameter: Organism Value: Zea mays
  misc_feature: MA Experiment 20000108 PARAMETER Experiment Name: Zm_Root-Tips_P Parameter: Tissue Value: Root tips vs. Root mid region    35
  misc_feature: MA Experiment 20000108 PARAMETER Experiment Name: Zm_Root-Tips_P Parameter: Tissue Value: Root tips vs. Root mid region   Sequence Listing-Misc Features (4)
  misc_feature: MA Experiment ID: 20000478 Result: Down-regulated in Transcription
  misc_feature: MA Experiment 20000478 PARAMETER Experiment Name: Zm_5mM_SA_P Parameter: Age (day) Value: 11
  misc_feature: MA Experiment 20000478 PARAMETER Experiment Name: Zm_5mM_SA_P Parameter: Organism Value: Zea mays
  misc_feature: MA Experiment 20000478 PARAMETER Experiment Name: Zm_5mM_SA_P Parameter: Plant Line Value: 35A19
  misc_feature: MA Experiment 20000478 PARAMETER Experiment Name: Zm_5mM_SA_P Parameter: Timepoint (hr) Value: 72
  misc_feature: MA Experiment 20000478 PARAMETER Experiment Name: Zm_5mM_SA_P Parameter: Tissue Value: Aerial
  misc_feature: MA Experiment 20000478 PARAMETER Experiment Name: Zm_5mM_SA_P Parameter: Treatment Value: 5mM SA vs. No Treatment
  misc_feature: MA Experiment ID: 20000480 Result: Down-regulated in Transcription
  misc_feature: MA Experiment 20000480 PARAMETER Experiment Name: Zm_Drought_P Parameter: Age (day) Value: 11
  misc_feature: MA Experiment 20000480 PARAMETER Experiment Name: Zm_Drought_P Parameter: Organism Value: Zea mays
  misc_feature: MA Experiment 20000480 PARAMETER Experiment Name: Zm_Drought_P Parameter: Plant Line Value: 35A19
  misc_feature: MA Experiment 20000480 PARAMETER Experiment Name: Zm_Drought_P Parameter: Timepoint (hr) Value: 72
  misc_feature: MA Experiment 20000480 PARAMETER Experiment Name: Zm_Drought_P Parameter: Tissue Value: Aerial
  misc_feature: MA Experiment 20000480 PARAMETER Experiment Name: Zm_Drought_P Parameter: Treatment Value: Drought vs. No Drought
  misc_feature: MA Experiment ID: 20000535 Result: Down-regulated in Transcription
  misc_feature: MA Experiment 20000535 PARAMETER Experiment Name: Zm_Hybrid_Seed_Dev_P Parameter: DAP Value: 30 vs. 12
  misc_feature: MA Experiment 20000535 PARAMETER Experiment Name: Zm_Hybrid_Seed_Dev_P Parameter: Organism Value: Zea mays
  misc_feature: MA Experiment 20000535 PARAMETER Experiment Name: Zm_Hybrid_Seed_Dev_P Parameter: Plant Line Value: 35A19
  misc_feature: MA Experiment 20000535 PARAMETER Experiment Name: Zm_Hybrid_Seed_Dev_P Parameter: Tissue Value: Embryo vs. Unfert Floret
accaaccactcccaccaccctctcaccgttgtccgttacatatccagcggccacccgttcctcttcctcgtccgcctccacgaccaccatccatcgccatggctggccccaccaccacgctcctcctcctgctgctgtgctccgctgggctcgcgtccggcgccacggcggctgacgacagcgggttcactaccttcaaggtatacttccacgacatcgtggcggggacgagcccgacggccatccgcatcgcgcagggggcggcgtccaacacctcgtccaccagcttcggcgcgatggtggccatcgacgacccgctgacgacgggccccacgcgcgccgcgggcaccgaggtgggccgcgcccagggcacctacacgttcgcggaccagcagacgttcggcctcctcatggtgatggacttcgtgttcacggccggggagcacaagggcagcacgctctccatcctcggccgcaacgaggtgctcagcgacgtccgcgagatgagcatcgtcggcggcagcggaaagttccgcatggcgcgtgggtacgtccaggcgcacaccatcgactccggcttcaaatccggcgagaccgtcgtccagtacaccgtcaacgtcagggcctagctacccgctcgatctaccttgcttgctcctccggcccatggccgactgcccgcccggcttcttgtgcgtcgatccatctccggatgctttgtacacaccttgtcgttcttcgatgttactacatgacatgtatttagtagactgcgatttcagac

SEQ ID NO: 6277 - protein, 208 aa, Zea mays subsp. mays
  peptide (1)..(208): Ceres Seq. ID no. 12405530
  misc_feature (63)..(206): Pfam Name: Dirigent-like protein Pfam Description: Dirigent-like protein
  misc_feature (63)..(206): Homolog of NCBI NO: 15218836 NR Description: disease resistance response protein-related/
  misc_feature (62)..(204): Homolog of NCBI NO: 15238980 NR Description: disease resistance response protein-related; id: At5g42500.1, supported by cDNA: gi_20260391 [Arabidopsis
  misc_feature (63)..(204): Homolog of NCBI NO: 15219966 NR Description: disease resistance response protein-related; id: At1g22900.1 [Arabidopsis thaliana] >gi|25347090|pir||A86363
  misc_feature (39)..(202): Homolog of NCBI NO: 15217886 NR Description: disease resistance response protein-related/
  misc_feature (63)..(206): Homolog of NCBI NO: 15222673 NR Description: disease resistance response protein-related/
  misc_feature (63)..(206): Homolog of NCBI NO: 22135914 NR Description: unknown protein [Arabidopsis thaliana]
  misc_feature (63)..(201): Homolog of NCBI NO: 15239779 NR Description: disease resistance response protein-related/
  misc_feature (36)..(204): Homolog of NCBI NO: 15238982 NR Description: disease resistance response protein-related; id: At5g42510.1 [Arabidopsis thaliana] contains similarity to disease resistance response
  misc_feature (40)..(206): Homolog of NCBI NO: 30681257 NR Description: disease resistance response protein-related/
  misc_feature (40)..(202): Homolog of NCBI NO: 25412014 NR Description: probable disease resistance response protein - Arabidopsis thaliana >gi|4803933|gb|AAD29806.1| putative
QPLPPPSHRCPLHIQRPPVPLPRPPPRPPSIAMAGPTTTLLLLLLCSAGLASGATAADDSGFTTFKVYFHDIVAGTSPTAIRIAQGAASNTSSTSFGAMVAIDDPLTTGPTRAAGTEVGRAQGTYTFADQQTFGLLMVMDFVFTAGEHKGSTLSILGRNEVLSDVREMSIVGGSGKFRMARGYVQAHTIDSGFKSGETVVQYTVNVRA

SEQ ID NO: 6278 - protein, 176 aa, Zea mays subsp. mays
  peptide (1)..(176): Ceres Seq. ID no. 12405531
  misc_feature (31)..(174): Pfam Name: Dirigent-like protein Pfam Description: Dirigent-like protein
  misc_feature (31)..(174): Homolog of NCBI NO: 15218836 NR Description: disease resistance response protein-related/
  misc_feature (30)..(172): Homolog of NCBI NO: 15238980 NR Description: disease resistance response protein-related; id: At5g42500.1, supported by cDNA: gi_20260391 [Arabidopsis
  misc_feature (31)..(172): Homolog of NCBI NO: 15219966 NR Description: disease resistance response protein-related; id: At1g22900.1 [Arabidopsis thaliana] >gi|25347090|pir||A86363
  misc_feature (7)..(170): Homolog of NCBI NO: 15217886 NR Description: disease resistance response protein-related/
  misc_feature (31)..(174): Homolog of NCBI NO: 15222673 NR Description: disease resistance response protein-related/
  misc_feature (31)..(174): Homolog of NCBI NO: 22135914 NR Description: unknown protein [Arabidopsis thaliana]
  misc_feature (31)..(169): Homolog of NCBI NO: 15239779 NR Description: disease resistance response protein-related/
  misc_feature (4)..(172): Homolog of NCBI NO: 15238982 NR Description: disease resistance response protein-related; id: At5g42510.1 [Arabidopsis thaliana] contains similarity to disease resistance response
  misc_feature (8)..(174): Homolog of NCBI NO: 30681257 NR Description: disease resistance response protein-related/
  misc_feature (8)..(170): Homolog of NCBI NO: 25412014 NR Description: probable disease resistance response protein - Arabidopsis thaliana >gi|4803933|gb|AAD29806.1| putative
MAGPTTTLLLLLLCSAGLASGATAADDSGFTTFKVYFHDIVAGTSPTAIRIAQGAASNTSSTSFGAMVAIDDPLTTGPTRAAGTEVGRAQGTYTFADQQTFGLLMVMDFVFTAGEHKGSTLSILGRNEVLSDVREMSIVGGSGKFRMARGYVQAHTIDSGFKSGETVVQYTVNVRA

SEQ ID NO: 6279 - protein, 110 aa, Zea mays subsp. mays
  peptide (1)..(110): Ceres Seq. ID no. 12405532
  misc_feature (1)..(108): Pfam Name: Dirigent-like protein Pfam Description: Dirigent-like protein
  misc_feature (1)..(108): Homolog of NCBI NO: 15218836 NR Description: disease resistance response protein-related/
  misc_feature (1)..(106): Homolog of NCBI NO: 15238980 NR Description: disease resistance response protein-related; id: At5g42500.1, supported by cDNA: gi_20260391 [Arabidopsis
  misc_feature (1)..(106): Homolog of NCBI NO: 15219966 NR Description: disease resistance response protein-related; id: At1g22900.1 [Arabidopsis thaliana] >gi|25347090|pir||A86363
  misc_feature (1)..(104): Homolog of NCBI NO: 15217886 NR Description: disease resistance response protein-related/
  misc_feature (1)..(108): Homolog of NCBI NO: 15222673 NR Description: disease resistance response protein-related/
  misc_feature (1)..(108): Homolog of NCBI NO: 22135914 NR Description: unknown protein [Arabidopsis thaliana]
  misc_feature (1)..(103): Homolog of NCBI NO: 15239779 NR Description: disease resistance response protein-related/
  misc_feature (1)..(106): Homolog of NCBI NO: 15238982 NR Description: disease resistance response protein-related; id: At5g42510.1 [Arabidopsis thaliana] contains similarity to disease resistance response
  misc_feature (1)..(108): Homolog of NCBI NO: 30681257 NR Description: disease resistance response protein-related/
  misc_feature (1)..(104): Homolog of NCBI NO: 25412014 NR Description: probable disease resistance response protein - Arabidopsis thaliana >gi|4803933|gb|AAD29806.1| putative
MVAIDDPLTTGPTRAAGTEVGRAQGTYTFADQQTFGLLMVMDFVFTAGEHKGSTLSILGRNEVLSDVREMSIVGGSGKFRMARGYVQAHTIDSGFKSGETVVQYTVNVRA

SEQ ID NO: 6280 - DNA, 1336 bp, Zea mays subsp. mays
  misc_feature (1)..(1336): Ceres Seq. ID no. 12409154
  misc_feature: MA Experiment ID: 108523 Result: Down-regulated in Transcription
  misc_feature: MA Experiment 108523 PARAMETER Experiment Name: Zm_42deg_Heat_P Parameter: Age (day) Value: 8
  misc_feature: MA Experiment 108523 PARAMETER Experiment Name: Zm_42deg_Heat_P Parameter: Organism Value: Zea mays
  misc_feature: MA Experiment 108523 PARAMETER Experiment Name: Zm_42deg_Heat_P Parameter: Plant Line Value: 35A19
  misc_feature: MA Experiment 108523 PARAMETER Experiment Name: Zm_42deg_Heat_P Parameter: Temperature (deg C) Value: 42 vs. 22
  misc_feature: MA Experiment 108523 PARAMETER Experiment Name: Zm_42deg_Heat_P Parameter: Timepoint (hr) Value: 6
  misc_feature: MA Experiment 108523 PARAMETER Experiment Name: Zm_42deg_Heat_P Parameter: Tissue Value: Aerial
  misc_feature: MA Experiment ID: 108528 Result: Up-regulated in Transcription
  misc_feature: MA Experiment 108528 PARAMETER Experiment Name: Zm_Imbibed_Seeds_P Parameter: Age (day) Value: 5 vs. 2
  misc_feature: MA Experiment 108528 PARAMETER Experiment Name: Zm_Imbibed_Seeds_P Parameter: Organism Value: Zea mays
  misc_feature: MA Experiment 108528 PARAMETER Experiment Name: Zm_Imbibed_Seeds_P Parameter: Plant Line Value: 35A19
  misc_feature: MA Experiment 108528 PARAMETER Experiment Name: Zm_Imbibed_Seeds_P Parameter: Tissue Value: Aerial vs. Embryo
  misc_feature: MA Experiment ID: 108530 Result: Up-regulated in Transcription
  misc_feature: MA Experiment 108530 PARAMETER Experiment Name: Zm_Imbibed_Seeds_P Parameter: Age (day) Value: 6 vs. 2
  misc_feature: MA Experiment 108530 PARAMETER Experiment Name: Zm_Imbibed_Seeds_P Parameter: Organism Value: Zea mays
  misc_feature: MA Experiment 108530 PARAMETER Experiment Name: Zm_Imbibed_Seeds_P Parameter: Plant Line Value: 35A19
  misc_feature: MA Experiment 108530 PARAMETER Experiment Name: Zm_Imbibed_Seeds_P Parameter: Tissue Value: Aerial vs. Embryo
  misc_feature: MA Experiment ID: 108536 Result: Down-regulated in Transcription
  misc_feature: MA Experiment 108536 PARAMETER Experiment Name: Zm_Meristem_P Parameter: Age (day) Value: 8
  misc_feature: MA Experiment 108536 PARAMETER Experiment Name: Zm_Meristem_P Parameter: Organism Value: Zea mays
  misc_feature: MA Experiment 108536 PARAMETER Experiment Name: Zm_Meristem_P Parameter: Plant Line Value: 35A19
  misc_feature: MA Experiment 108536 PARAMETER Experiment Name: Zm_Meristem_P Parameter: Tissue Value: Shoot Meristem vs. Above Shoot Meristem
  misc_feature: MA Experiment ID: 108545 Result: Up-regulated in Transcription
  misc_feature: MA Experiment 108545 PARAMETER Experiment Name: Zm_Imbibed_Seeds_P Parameter: Age (day) Value: 3 vs. 2
  misc_feature: MA Experiment 108545 PARAMETER Experiment Name: Zm_Imbibed_Seeds_P Parameter: Organism Value: Zea mays
  misc_feature: MA Experiment 108545 PARAMETER Experiment Name: Zm_Imbibed_Seeds_P Parameter: Plant Line Value: 35A19
  misc_feature: MA Experiment 108545 PARAMETER Experiment Name: Zm_Imbibed_Seeds_P Parameter: Tissue Value: Aerial vs. Embryo
  misc_feature: MA Experiment ID: 108547 Result: Up-regulated in Transcription
  misc_feature: MA Experiment 108547 PARAMETER Experiment Name: Zm_Imbibed_Seeds_P Parameter: Age (day) Value: 4 vs. 2
  misc_feature: MA Experiment 108547 PARAMETER Experiment Name: Zm_Imbibed_Seeds_P Parameter: Organism Value: Zea mays
  misc_feature: MA Experiment 108547 PARAMETER Experiment Name: Zm_Imbibed_Seeds_P Parameter: Plant Line Value: 35A19
  misc_feature: MA Experiment 108547 PARAMETER Experiment Name: Zm_Imbibed_Seeds_P Parameter: Tissue Value: Aerial vs. Embryo
  misc_feature: MA Experiment ID: 108556 Result: Down-regulated in Transcription
  misc_feature: MA Experiment 108556 PARAMETER Experiment Name: Zm_Drought_P Parameter: Age (day) Value: 9
  misc_feature: MA Experiment 108556 PARAMETER Experiment Name: Zm_Drought_P Parameter: Organism Value: Zea mays
  misc_feature: MA Experiment 108556 PARAMETER Experiment Name: Zm_Drought_P Parameter: Plant Line Value: 35A19
  misc_feature: MA Experiment 108556 PARAMETER Experiment Name: Zm_Drought_P Parameter: Timepoint (hr) Value: 24
  misc_feature: MA Experiment 108556 PARAMETER Experiment Name: Zm_Drought_P Parameter: Tissue Value: Aerial
  misc_feature: MA Experiment 108556 PARAMETER Experiment Name: Zm_Drought_P Parameter: Treatment Value: Drought vs. No Drought
  misc_feature: MA Experiment ID: 108597 Result: Down-regulated in Transcription
  misc_feature: MA Experiment 108597 PARAMETER Experiment Name: Zm_100uM_ABA_P Parameter: Age (day) Value: 9
  misc_feature: MA Experiment 108597 PARAMETER Experiment Name: Zm_100uM_ABA_P Parameter: Organism Value: Zea mays
  misc_feature: MA Experiment 108597 PARAMETER Experiment Name: Zm_100uM_ABA_P Parameter: Plant Line Value: 35A19
  misc_feature: MA Experiment 108597 PARAMETER Experiment Name: Zm_100uM_ABA_P Parameter: Timepoint (hr) Value: 24
  misc_feature: MA Experiment 108597 PARAMETER Experiment Name: Zm_100uM_ABA_P Parameter: Tissue Value: Aerial
  misc_feature: MA Experiment 108597 PARAMETER Experiment Name: Zm_100uM_ABA_P Parameter: Treatment Value: 100uM ABA vs. No Treatment
  misc_feature: MA Experiment ID: 108688 Result: Down-regulated in Transcription
  misc_feature: MA Experiment 108688 PARAMETER Experiment Name: Zm_Embryos-Flowers__P Parameter: Tissue Value: Immature Flowers vs. Aerial+
  misc_feature: MA Experiment ID: 20000477 Result: Down-regulated in Transcription
  misc_feature: MA Experiment 20000477 PARAMETER Experiment Name: Zm_5mM_SA_P Parameter: Age (day) Value: 10
  misc_feature: MA Experiment 20000477 PARAMETER Experiment Name: Zm_5mM_SA_P Parameter: Organism Value: Zea mays
  misc_feature: MA Experiment 20000477 PARAMETER Experiment Name: Zm_5mM_SA_P Parameter: Plant Line Value: 35A19
  misc_feature: MA Experiment 20000477 PARAMETER Experiment Name: Zm_5mM_SA_P Parameter: Timepoint (hr) Value: 48
  misc_feature: MA Experiment 20000477 PARAMETER Experiment Name: Zm_5mM_SA_P Parameter: Tissue Value: Aerial
  misc_feature: MA Experiment 20000477 PARAMETER Experiment Name: Zm_5mM_SA_P Parameter: Treatment Value: 5mM SA vs. No Treatment
  misc_feature: MA Experiment ID: 20000478 Result: Down-regulated in Transcription
  misc_feature: MA Experiment 20000478 PARAMETER Experiment Name: Zm_5mM_SA_P Parameter: Age (day) Value: 11
  misc_feature: MA Experiment 20000478 PARAMETER Experiment Name: Zm_5mM_SA_P Parameter: Organism Value: Zea mays
  misc_feature: MA Experiment 20000478 PARAMETER Experiment Name: Zm_5mM_SA_P Parameter: Plant Line Value: 35A19
  misc_feature: MA Experiment 20000478 PARAMETER Experiment Name: Zm_5mM_SA_P Parameter: Timepoint (hr) Value: 72
  misc_feature: MA Experiment 20000478 PARAMETER Experiment Name: Zm_5mM_SA_P Parameter: Tissue Value: Aerial
  misc_feature: MA Experiment 20000478 PARAMETER Experiment Name: Zm_5mM_SA_P Parameter: Treatment Value: 5mM SA vs. No Treatment
  misc_feature: MA Experiment ID: 20000479 Result: Down-regulated in Transcription
  misc_feature: MA Experiment 20000479 PARAMETER Experiment Name: Zm_Drought_P Parameter: Age (day) Value: 10
  misc_feature: MA Experiment 20000479 PARAMETER Experiment Name: Zm_Drought_P Parameter: Organism Value: Zea mays
  misc_feature: MA Experiment 20000479 PARAMETER Experiment Name: Zm_Drought_P Parameter: Plant Line Value: 35A19
  misc_feature: MA Experiment 20000479 PARAMETER Experiment Name: Zm_Drought_P Parameter: Timepoint (hr) Value: 48
  misc_feature: MA Experiment 20000479 PARAMETER Experiment Name: Zm_Drought_P Parameter: Tissue Value: Aerial
  misc_feature: MA Experiment 20000479 PARAMETER Experiment Name: Zm_Drought_P Parameter: Treatment Value: Drought vs. No Drought
  misc_feature: MA Experiment ID: 20000480 Result: Down-regulated in Transcription
  misc_feature: MA Experiment 20000480 PARAMETER Experiment Name: Zm_Drought_P Parameter: Age (day) Value: 11
  misc_feature: MA Experiment 20000480 PARAMETER Experiment Name: Zm_Drought_P Parameter: Organism Value: Zea mays
  misc_feature: MA Experiment 20000480 PARAMETER Experiment Name: Zm_Drought_P Parameter: Plant Line Value: 35A19
  misc_feature: MA Experiment 20000480 PARAMETER Experiment Name: Zm_Drought_P Parameter: Timepoint (hr) Value: 72
  misc_feature: MA Experiment 20000480 PARAMETER Experiment Name: Zm_Drought_P Parameter: Tissue Value: Aerial
  misc_feature: MA Experiment 20000480 PARAMETER Experiment Name: Zm_Drought_P Parameter: Treatment Value: Drought vs. No Drought
  misc_feature: MA Experiment ID: 20000488 Result: Down-regulated in Transcription
  misc_feature: MA Experiment 20000488 PARAMETER Experiment Name: Zm_50mM_NH4NO3_L_to_H_P Parameter: Organism Value: Zea mays
  misc_feature: MA Experiment 20000488 PARAMETER Experiment Name: Zm_50mM_NH4NO3_L_to_H_P Parameter: Timepoint (hr) Value: 8
  misc_feature: MA Experiment 20000488 PARAMETER Experiment Name: Zm_50mM_NH4NO3_L_to_H_P Parameter: Tissue Value: Leaves
  misc_feature: MA Experiment 20000488 PARAMETER Experiment Name: Zm_50mM_NH4NO3_L_to_H_P Parameter: Treatment Value: 50mM NH4NO3 vs. 100mM Mannitol
  misc_feature: MA Experiment ID: 20000626 Result: Down-regulated in Transcription
  misc_feature: MA Experiment 20000626 PARAMETER Experiment Name: Zm_Herbicide-Treatments_P Parameter: Timepoint (hr) Value: 12
  misc_feature: MA Experiment 20000626 PARAMETER Experiment Name: Zm_Herbicide-Treatments_P Parameter: Tissue Value: Aerial
  misc_feature: MA Experiment 20000626 PARAMETER Experiment Name: Zm_Herbicide-Treatments_P Parameter: Treatment Value: Roundup vs. No Treatment
  misc_feature: MA Experiment ID: 20000630 Result: Down-regulated in Transcription
  misc_feature: MA Experiment 20000630 PARAMETER Experiment Name: Zm_Herbicide-Treatments_P Parameter: Timepoint (hr) Value: 4
  misc_feature: MA Experiment 20000630 PARAMETER Experiment Name: Zm_Herbicide-Treatments_P Parameter: Tissue Value: Aerial
  misc_feature: MA Experiment 20000630 PARAMETER Experiment Name: Zm_Herbicide-Treatments_P Parameter: Treatment Value: Roundup vs. No Treatment
acattaattgtctcgtcctactgctagcaccagaccgctgtcttcttgagcacattgaggtcttcggatttctccgggggtggccgcgcgcagcaccggcaatgtcgtcatgcaagcggtacttgccgtgcttgatattgttgttgctgcacggaggacgaggtgcggtggccgggaaggtgtcggcaatcgtcgtgttcggcgactcttccgtggacacggggaacaacaatttcatcccgaccatcgcgcggagcaacttctggccgtacggccgcgactacgacgatggcctccccacgggccggttctccaatgggcgcctcgccaccgacttcatctccgaggccttcggcctgccgccgtccatccccgcctacctggacaacaactgcaccatcgaccagctcgccacaggagtctccttcgcctccgctgcgacaggcctcgataacgcgacggccggcgtcttgtccgtgatcacgctggacgagcagctcgcttacttcaaggagtacacggaccgcctcaagatcgccaagggcgaggcggcggcggaggagatcatcagcgaagcgctctacatctggagcatcggcaccaatgacttcatcgagaactactacaacttgccggagcggcggatgcagtatactgtgggcgagtacgaggcctacctgctgggactcgccgaggccgccatacgccgcgtgcacaccctcggcggccgcaaaatggacttcaccgggctcacgcccatgggctgcctccccgccgagcggatcggcaaccgcgacaaccccggggagtgcaacgagcagtacaacgctgttgccaggaccttcaacgccaagctgcaggagctcgtcctcaagcttaacaaggaactgctgggactgcagctcgtcttcgccgacacgtaccagctcctcgccaacgtcgtaaacaggccggccgactacggatttgacaatgctgtgcaaggttgttgtgggacggggcttttcgaggcaggttacttttgtagcttcagcacatcaatgctatgcgaaaatgccaacaagtatgtattctttgatgcgatccatcccacggagaagatgtacaaattgctcgccaataccgtcatcaacaccaccttgcatgtattcatgtgaaattatttgatcttcctaatagaaatgcggcatggacaggtctatacggccatgcctgtgtacaatctataatgcacatagacacacctaccgctcctccacatacaactttgattgttgaaaccatatcatatacaattataaattatagcacgtgtactataaattttatcttatag

SEQ ID NO: 6281 - protein, 384 aa, Zea mays subsp. mays
  peptide (1)..(384): Ceres Seq. ID no. 12409155
  misc_feature (63)..(375): Pfam Name: GDSL-like Lipase/Acylhydrolase Pfam Description: GDSL-like Lipase/Acylhydrolase
  misc_feature (44)..(384): Homolog of NCBI NO: 21593518 NR Description: putative GDSL-motif lipase/hydrolase [Arabidopsis
  misc_feature (44)..(384): Homolog of NCBI NO: 15228157 NR Description: putative GDSL-motif lipase/hydrolase; protein id:
  misc_feature (59)..(383): Homolog of NCBI NO: 18416824 NR Description: putative APG protein; protein id: At4g26790.1, by cDNA: 2574., supported by cDNA: gi_18252232 [Arabidopsis >gi|18252233|gb|AAL61949.1| putative APG protein [Arabidopsis
  misc_feature (59)..(383): Homolog of NCBI NO: 7485330 NR Description: hypothetical protein F10M23.130 - Arabidopsis >gi|4455202|emb|CAB36525.1| putative APG protein [Arabidopsis >gi|7269531|emb|CAB79534.1| putative APG protein [Arabidopsis
  misc_feature (82)..(373): Homolog of NCBI NO: 15224201 NR Description: putative APG isolog protein; protein id:
  misc_feature (59)..(383): Homolog of NCBI NO: 34907922 NR Description: putative GDSL-motif lipase/hydrolase [Oryza
  misc_feature (62)..(384): Homolog of NCBI NO: 18394825 NR Description: anter-specific proline-rich protein APG putative; protein id: At1g20120.1, supported by cDNA: 22980.
  misc_feature (44)..(373): Homolog of NCBI NO: 4587999 NR Description: hypothetical APG protein [Arabidopsis thaliana]
  misc_feature (44)..(373): Homolog of NCBI NO: 15225668 NR Description: putative GDSL-motif lipase hydrolase; protein id:
  misc_feature (62)..(384): Homolog of NCBI NO: 21592372 NR Description: anter-specific proline-rich protein APG
INCLVLLLAPDRCLLEHIEVFGFLRGWPRAAPAMSSCKRYLPCLILLLLHGGRGAVAGKVSAIVVFGDSSVDTGNNNFIPTIARSNFWPYGRDYDDGLPTGRFSNGRLATDFISEAFGLPPSIPAYLDNNCTIDQLATGVSFASAATGLDNATAGVLSVITLDEQLAYFKEYTDRLKIAKGEAAAEEIISEALYIWSIGTNDFIENYYNLPERRMQYTVGEYEAYLLGLAEAAIRRVHTLGGRKMDFTGLTPMGCLPAERIGNRDNPGECNEQYNAVARTFNAKLQELVLKLNKELLGLQLVFADTYQLLANVVNRPADYGFDNAVQGCCGTGLFEAGYFCSFSTSMLCENANKYVFFDAIHPTEKMYKLLANTVINTTLHVFM

SEQ ID NO: 6282 - protein, 351 aa, Zea mays subsp. mays
  peptide (1)..(351): Ceres Seq. ID no. 12409156
  misc_feature (30)..(342): Pfam Name: GDSL-like Lipase/Acylhydrolase Pfam Description: GDSL-like Lipase/Acylhydrolase
  misc_feature (11)..(351): Homolog of NCBI NO: 21593518 NR Description: putative GDSL-motif lipase/hydrolase [Arabidopsis
  misc_feature (11)..(351): Homolog of NCBI NO: 15228157 NR Description: putative GDSL-motif lipase/hydrolase; protein id:
  misc_feature (26)..(350): Homolog of NCBI NO: 18416824 NR Description: putative APG protein; protein id: At4g26790.1, by cDNA: 2574., supported by cDNA: gi_18252232 [Arabidopsis >gi|18252233|gb|AAL61949.1| putative APG protein [Arabidopsis
  misc_feature (26)..(350): Homolog of NCBI NO: 7485330 NR Description: hypothetical protein F10M23.130 - Arabidopsis >gi|4455202|emb|CAB36525.1| putative APG protein [Arabidopsis >gi|7269531|emb|CAB79534.1| putative APG protein [Arabidopsis
  misc_feature (49)..(340): Homolog of NCBI NO: 15224201 NR Description: putative APG isolog protein; protein id:
  misc_feature (26)..(350): Homolog of NCBI NO: 34907922 NR Description: putative GDSL-motif lipase/hydrolase [Oryza
  misc_feature (29)..(351): Homolog of NCBI NO: 18394825 NR Description: anter-specific proline-rich protein APG putative; protein id: At1g20120.1, supported by cDNA: 22980.
  misc_feature (11)..(340): Homolog of NCBI NO: 4587999 NR Description: hypothetical APG protein [Arabidopsis thaliana]
  misc_feature (11)..(340): Homolog of NCBI NO: 15225668 NR Description: putative GDSL-motif lipase hydrolase; protein id:
  misc_feature (29)..(351): Homolog of NCBI NO: 21592372 NR Description: anter-specific proline-rich protein APG
MSSCKRYLPCLILLLLHGGRGAVAGKVSAIVVFGDSSVDTGNNNFIPTIARSNFWPYGRDYDDGLPTGRFSNGRLATDFISEAFGLPPSIPAYLDNNCTIDQLATGVSFASAATGLDNATAGVLSVITLDEQLAYFKEYTDRLKIAKGEAAAEEIISEALYIWSIGTNDFIENYYNLPERRMQYTVGEYEAYLLGLAEAAIRRVHTLGGRKMDFTGLTPMGCLPAERIGNRDNPGECNEQYNAVARTFNAKLQELVLKLNKELLGLQLVFADTYQLLANVVNRPADYGFDNAVQGCCGTGLFEAGYFCSFSTSMLCENANKYVFFDAIHPTEKMYKLLANTVINTTLHVFM

SEQ ID NO: 6283 - DNA, 1325 bp, Zea mays subsp. mays
  misc_feature (1)..(1325): Ceres Seq. ID no. 12402203
  misc_feature: MA Experiment ID: 108522 Result: Down-regulated in Transcription
  misc_feature: MA Experiment 108522 PARAMETER Experiment Name: Zm_42deg_Heat_P Parameter: Age (day) Value: 8
  misc_feature: MA Experiment 108522 PARAMETER Experiment Name: Zm_42deg_Heat_P Parameter: Organism Value: Zea mays
  misc_feature: MA Experiment 108522 PARAMETER Experiment Name: Zm_42deg_Heat_P Parameter: Plant Line Value: 35A19
  misc_feature: MA Experiment 108522 PARAMETER Experiment Name: Zm_42deg_Heat_P Parameter: Temperature (deg C) Value: 42 vs. 22
  misc_feature: MA Experiment 108522 PARAMETER Experiment Name: Zm_42deg_Heat_P Parameter: Timepoint (hr) Value: 1
  misc_feature: MA Experiment 108522 PARAMETER Experiment Name: Zm_42deg_Heat_P Parameter: Tissue Value: Aerial
  misc_feature: MA Experiment ID: 108535 Result: Down-regulated in Transcription
  misc_feature: MA Experiment 108535 PARAMETER Experiment Name: Zm_Meristem_P Parameter: Age (day) Value: 8
  misc_feature: MA Experiment 108535 PARAMETER Experiment Name: Zm_Meristem_P Parameter: Organism Value: Zea mays
  misc_feature: MA Experiment 108535 PARAMETER Experiment Name: Zm_Meristem_P Parameter: Plant Line Value: 35A19
  misc_feature: MA Experiment 108535 PARAMETER Experiment Name: Zm_Meristem_P Parameter: Tissue Value: Root Meristem vs. Above Root Meristem
  misc_feature: MA Experiment ID: 108556 Result: Down-regulated in Transcription
  misc_feature: MA Experiment 108556 PARAMETER Experiment Name: Zm_Drought_P Parameter: Age (day) Value: 9
  misc_feature: MA Experiment 108556 PARAMETER Experiment Name: Zm_Drought_P Parameter: Organism Value: Zea mays
  misc_feature: MA Experiment 108556 PARAMETER Experiment Name: Zm_Drought_P Parameter: Plant Line Value: 35A19
  misc_feature: MA Experiment 108556 PARAMETER Experiment Name: Zm_Drought_P Parameter: Timepoint (hr) Value: 24
  misc_feature: MA Experiment 108556 PARAMETER Experiment Name: Zm_Drought_P Parameter: Tissue Value: Aerial
  misc_feature: MA Experiment 108556 PARAMETER Experiment Name: Zm_Drought_P Parameter: Treatment Value: Drought vs. No Drought
  misc_feature: MA Experiment ID: 108559 Result: Down-regulated in Transcription
  misc_feature: MA Experiment 108559 PARAMETER Experiment Name: Zm_5mM_NO_P Parameter: Age (day) Value: 8
  misc_feature: MA Experiment 108559 PARAMETER Experiment Name: Zm_5mM_NO_P Parameter: Organism Value: Zea mays
  misc_feature: MA Experiment 108559 PARAMETER Experiment Name: Zm_5mM_NO_P Parameter: Plant Line Value: 35A19
  misc_feature: MA Experiment 108559 PARAMETER Experiment Name: Zm_5mM_NO_P Parameter: Timepoint (hr) Value: 12
  misc_feature: MA Experiment 108559 PARAMETER Experiment Name: Zm_5mM_NO_P Parameter: Tissue Value: Aerial
  misc_feature: MA Experiment 108559 PARAMETER Experiment Name: Zm_5mM_NO_P Parameter: Treatment Value: 5mM NO vs. No Treatment
  misc_feature: MA Experiment ID: 108687 Result: Down-regulated in Transcription
  misc_feature: MA Experiment 108687 PARAMETER Experiment Name: Zm_Embryos-Flowers__P Parameter: Tissue Value: Embryo vs. Aerial+
gcacgagaccattacctagaacatcctaatcgaaaagacctgtgtacactcgtactcgtctcttcttcgccacacacacacacggctgctagtgtacacagaggcacagcagcaggaggatggccgtagtgccggcggcgccggtggttcttggagtggccatggtgctcgtcgtcctggccgccagcgccggcgcggccgggcagctcaggatggggttctacgccgagagctgcccgggcgtggagcgcgtggtgggcgacttcgtccggcagcacgtccgccgcgtgcccaccgtcgccgccgcgttgctccggctgcacttccacgactgcttcgtcaggggctgcgacgcctccgtcctgctcaactccaccgccggcagcgtggccgagaaggacgcgccgccgaacctgacgctgcgcggcttcgacctcgtcgaccgcgtcaaggcgctcgtcgaggatgcctgccccggcgtcgtctcctgcgccgacgtcctcgcgctcgccgcccgggacgcggtcgtcgccatcggcgggccgtcgtggcgcgtggcgacggggaggagggacggcacggtgtccgccatgcaggaggcgctcgacgacatccccaagcacaccatgaccttcccgcagctggccagcctgttcgccagcaaaggcctcggcgttcgtgacctcgtctggctctcaggcgcgcacacgatcggcatcgcgcactgctcctccttcgcggaccgcctgtacggctaccccggcggcggcgttggcgcggccggcaacgacacggccgacccggccctggacgcgacctacgcggccaacctgcggaggcgcaagtgccgggcggcgggcggcgggtacgcggaggacggcgtggtggagatggacccaggcagccacctgacgttcgacctgggctactaccgcgcgctgctcaagcgcaggggcctgctccgctccgacgccgcgctgctcaccgacgcggcggcgcgcgccgacgtcgagggcgtcgcggccgggcccgaggaggtcttcttccagctgttcgcgcggtccatggccaggctggcggcgctgcaggtcaagaccggcgccgagggggaggtcaggaggaactgcgctgtcgtcaacggcggctaatgcatgtagcttcttgcctttcttcttctttcccttcatggccattactgctagcgaatactgtgattttgctcttgcattttgggtgcttcacgctcgggtgcaattatcatgtcaaagaaattgttaccctcttgctccttttgttagagacttaatagaattgtttggactggc

SEQ ID NO: 6284 - protein, 342 aa, Zea mays subsp. mays
  peptide (1)..(342): Ceres Seq. ID no. 12402204
  misc_feature (49)..(297): Pfam Name: Peroxidase Pfam Description: Peroxidase
MAVVPAAPVVLGVAMVLVVLAASAGAAGQLRMGFYAESCPGVERVVGDFVRQHVRRVPTVAAALLRLHFHDCFVRGCDASVLLNSTAGSVAEKDAPPNLTLRGFDLVDRVKALVEDACPGVVSCADVLALAARDAVVAIGGPSWRVATGRRDGTVSAMQEALDDIPKHTMTFPQLASLFASKGLGVRDLVWLSGAHTIGIAHCSSFADRLYGYPGGGVGAAGNDTADPALDATYAANLRRRKCRAAGGGYAEDGVVEMDPGSHLTFDLGYYRALLKRRGLLRSDAALLTDAAARADVEGVAAGPEEVFFQLFARSMARLAALQVKTGAEGEVRRNCAVVNGG

SEQ ID NO: 6285 - protein, 328 aa, Zea mays subsp. mays
  peptide (1)..(328): Ceres Seq. ID no. 12402205
  misc_feature (35)..(283): Pfam Name: Peroxidase Pfam Description: Peroxidase
MVLVVLAASAGAAGQLRMGFYAESCPGVERVVGDFVRQHVRRVPTVAAALLRLHFHDCFVRGCDASVLLNSTAGSVAEKDAPPNLTLRGFDLVDRVKALVEDACPGVVSCADVLALAARDAVVAIGGPSWRVATGRRDGTVSAMQEALDDIPKHTMTFPQLASLFASKGLGVRDLVWLSGAHTIGIAHCSSFADRLYGYPGGGVGAAGNDTADPALDATYAANLRRRKCRAAGGGYAEDGVVEMDPGSHLTFDLGYYRALLKRRGLLRSDAALLTDAAARADVEGVAAGPEEVFFQLFARSMARLAALQVKTGAEGEVRRNCAVVNGG

SEQ ID NO: 6286 - protein, 311 aa, Zea mays subsp. mays
  peptide (1)..(311): Ceres Seq. ID no. 12402206
  misc_feature (18)..(266): Pfam Name: Peroxidase Pfam Description: Peroxidase
MGFYAESCPGVERVVGDFVRQHVRRVPTVAAALLRLHFHDCFVRGCDASVLLNSTAGSVAEKDAPPNLTLRGFDLVDRVKALVEDACPGVVSCADVLALAARDAVVAIGGPSWRVATGRRDGTVSAMQEALDDIPKHTMTFPQLASLFASKGLGVRDLVWLSGAHTIGIAHCSSFADRLYGYPGGGVGAAGNDTADPALDATYAANLRRRKCRAAGGGYAEDGVVEMDPGSHLTFDLGYYRALLKRRGLLRSDAALLTDAAARADVEGVAAGPEEVFFQLFARSMARLAALQVKTGAEGEVRRNCAVVNGG

SEQ ID NO: 6287 - DNA, 939 bp, Zea mays subsp. mays
  misc_feature (1)..(939): Ceres Seq. ID no. 12402805
  misc_feature: MA Experiment ID: 108504 Result: Up-regulated in Transcription
  misc_feature: MA Experiment 108504 PARAMETER Experiment Name: Zm_Drought_P Parameter: Age (day) Value: 8
  misc_feature: MA Experiment 108504 PARAMETER Experiment Name: Zm_Drought_P Parameter: Organism Value: Zea mays
  misc_feature: MA Experiment 108504 PARAMETER Experiment Name: Zm_Drought_P Parameter: Plant Line Value: 35A19
  misc_feature: MA Experiment 108504 PARAMETER Experiment Name: Zm_Drought_P Parameter: Timepoint (hr) Value: 12
  misc_feature: MA Experiment 108504 PARAMETER Experiment Name: Zm_Drought_P Parameter: Tissue Value: Aerial
  misc_feature: MA Experiment 108504 PARAMETER Experiment Name: Zm_Drought_P Parameter: Treatment Value: Drought vs. No Drought
  misc_feature: MA Experiment ID: 108523 Result: Up-regulated in Transcription
  misc_feature: MA Experiment 108523 PARAMETER Experiment Name: Zm_42deg_Heat_P Parameter: Age (day) Value: 8
  misc_feature: MA Experiment 108523 PARAMETER Experiment Name: Zm_42deg_Heat_P Parameter: Organism Value: Zea mays
  misc_feature: MA Experiment 108523 PARAMETER Experiment Name: Zm_42deg_Heat_P Parameter: Plant Line Value: 35A19
  misc_feature: MA Experiment 108523 PARAMETER Experiment Name: Zm_42deg_Heat_P Parameter: Temperature (deg C) Value: 42 vs. 22
  misc_feature: MA Experiment 108523 PARAMETER Experiment Name: Zm_42deg_Heat_P Parameter: Timepoint (hr) Value: 6
  misc_feature: MA Experiment 108523 PARAMETER Experiment Name: Zm_42deg_Heat_P Parameter: Tissue Value: Aerial
  misc_feature: MA Experiment ID: 108527 Result: Up-regulated in Transcription
  misc_feature: MA Experiment 108527 PARAMETER Experiment Name: Zm_5mM_NO_P Parameter: Age (day) Value: 8
  misc_feature: MA Experiment 108527 PARAMETER Experiment Name: Zm_5mM_NO_P Parameter: Organism Value: Zea mays
  misc_feature: MA Experiment 108527 PARAMETER Experiment Name: Zm_5mM_NO_P Parameter: Plant Line Value: 35A19
  misc_feature: MA Experiment 108527 PARAMETER Experiment Name: Zm_5mM_NO_P Parameter: Timepoint (hr) Value: 6
  misc_feature: MA Experiment 108527 PARAMETER Experiment Name: Zm_5mM_NO_P Parameter: Tissue Value: Aerial
  misc_feature: MA Experiment 108527 PARAMETER Experiment Name: Zm_5mM_NO_P Parameter: Treatment Value: 5mM NO vs. No Treatment
  misc_feature: MA Experiment ID: 108529 Result: Up-regulated in Transcription
  misc_feature: MA Experiment 108529 PARAMETER Experiment Name: Zm_Imbibed_Seeds_P Parameter: Age (day) Value: 5 vs. 2
  misc_feature: MA Experiment 108529 PARAMETER Experiment Name: Zm_Imbibed_Seeds_P Parameter: Organism Value: Zea mays
  misc_feature: MA Experiment 108529 PARAMETER Experiment Name: Zm_Imbibed_Seeds_P Parameter: Plant Line Value: 35A19
  misc_feature: MA Experiment 108529 PARAMETER Experiment Name: Zm_Imbibed_Seeds_P Parameter: Tissue Value: Roots vs. Embryo
  misc_feature: MA Experiment ID: 108533 Result: Up-regulated in Transcription
  misc_feature: MA Experiment 108533 PARAMETER Experiment Name: Zm_4deg_Cold_P Parameter: Age (hr) Value: 8
  misc_feature: MA Experiment 108533 PARAMETER Experiment Name: Zm_4deg_Cold_P Parameter: Organism Value: Zea mays
  misc_feature: MA Experiment 108533 PARAMETER Experiment Name: Zm_4deg_Cold_P Parameter: Plant Line Value: 35A19
  misc_feature: MA Experiment 108533 PARAMETER Experiment Name: Zm_4deg_Cold_P Parameter: Temperature (deg C) Value: 4 vs. 22
  misc_feature: MA Experiment 108533 PARAMETER Experiment Name: Zm_4deg_Cold_P Parameter: Timepoint (hr) Value: 1
  misc_feature: MA Experiment 108533 PARAMETER Experiment Name: Zm_4deg_Cold_P Parameter: Tissue Value: Aerial
  misc_feature: MA Experiment ID: 108534 Result: Up-regulated in Transcription
  misc_feature: MA Experiment 108534 PARAMETER Experiment Name: Zm_4deg_Cold_P Parameter: Age (hr) Value: 8
  misc_feature: MA Experiment 108534 PARAMETER Experiment Name: Zm_4deg_Cold_P Parameter: Organism Value: Zea mays
  misc_feature: MA Experiment 108534 PARAMETER Experiment Name: Zm_4deg_Cold_P Parameter: Plant Line Value: 35A19
  misc_feature: MA Experiment 108534 PARAMETER Experiment Name: Zm_4deg_Cold_P Parameter: Temperature (deg C) Value: 4 vs. 22
  misc_feature: MA Experiment 108534 PARAMETER Experiment Name: Zm_4deg_Cold_P Parameter: Timepoint (hr) Value: 6
  misc_feature: MA Experiment 108534 PARAMETER Experiment Name: Zm_4deg_Cold_P Parameter: Tissue Value: Aerial
  misc_feature: MA Experiment ID: 108556 Result: Up-regulated in Transcription
  misc_feature: MA Experiment 108556 PARAMETER Experiment Name: Zm_Drought_P Parameter: Age (day) Value: 9
  misc_feature: MA Experiment 108556 PARAMETER Experiment Name: Zm_Drought_P Parameter: Organism Value: Zea mays
  misc_feature: MA Experiment 108556 PARAMETER Experiment Name: Zm_Drought_P Parameter: Plant Line Value: 35A19
  misc_feature: MA Experiment 108556 PARAMETER Experiment Name: Zm_Drought_P Parameter: Timepoint (hr) Value: 24
  misc_feature: MA Experiment 108556 PARAMETER Experiment Name: Zm_Drought_P Parameter: Tissue Value: Aerial
  misc_feature: MA Experiment 108556 PARAMETER Experiment Name: Zm_Drought_P Parameter: Treatment Value: Drought vs. No Drought
  misc_feature: MA Experiment ID: 108559 Result: Up-regulated in Transcription
  misc_feature: MA Experiment 108559 PARAMETER Experiment Name: Zm_5mM_NO_P Parameter: Age (day) Value: 8
  misc_feature: MA Experiment 108559 PARAMETER Experiment Name: Zm_5mM_NO_P Parameter: Organism Value: Zea mays
  misc_feature: MA Experiment 108559 PARAMETER Experiment Name: Zm_5mM_NO_P Parameter: Plant Line Value: 35A19
  misc_feature: MA Experiment 108559 PARAMETER Experiment Name: Zm_5mM_NO_P Parameter: Timepoint (hr) Value: 12
  misc_feature: MA Experiment 108559 PARAMETER Experiment Name: Zm_5mM_NO_P Parameter: Tissue Value: Aerial
  misc_feature: MA Experiment 108559 PARAMETER Experiment Name: Zm_5mM_NO_P Parameter: Treatment Value: 5mM NO vs. No Treatment
  misc_feature: MA Experiment ID: 108687 Result: Up-regulated in Transcription
  misc_feature: MA Experiment 108687 PARAMETER Experiment Name: Zm_Embryos-Flowers__P Parameter: Tissue Value: Embryo vs. Aerial+
  misc_feature: MA Experiment ID: 108688 Result: Down-regulated in Transcription
  misc_feature: MA Experiment 108688 PARAMETER Experiment Name: Zm_Embryos-Flowers__P Parameter: Tissue Value: Immature Flowers vs. Aerial+
  misc_feature: MA Experiment ID: 20000626 Result: Up-regulated in Transcription
  misc_feature: MA Experiment 20000626 PARAMETER Experiment Name: Zm_Herbicide-Treatments_P Parameter: Timepoint (hr) Value: 12
  misc_feature: MA Experiment 20000626 PARAMETER Experiment Name: Zm_Herbicide-Treatments_P Parameter: Tissue Value: Aerial
  misc_feature: MA Experiment 20000626 PARAMETER Experiment Name: Zm_Herbicide-Treatments_P Parameter: Treatment Value: Roundup vs. No Treatment
  misc_feature: MA Experiment ID: 20000633 Result: Up-regulated in Transcription
  misc_feature: MA Experiment 20000633 PARAMETER Experiment Name: Zm_Herbicide-Treatments_P Parameter: Timepoint (hr) Value: 4
  misc_feature: MA Experiment 20000633 PARAMETER Experiment Name: Zm_Herbicide-Treatments_P Parameter: Tissue Value: Aerial
  misc_feature: MA Experiment 20000633 PARAMETER Experiment Name: Zm_Herbicide-Treatments_P Parameter: Treatment Value: Trimec vs. No Treatment
agtcttccttccacctgaaaacccaacccacacgctcgcgcctccgcgaagaaaaacaccgaggcccatggcgccgagaacgtcagagagagcgatgacatcggcggccgcggggctcgcgcgtggcgccggcccgcactacagaggcgtcaggaagcggccgtggggccggtacgccgcggagatccgcgacccggccaagaagagccgcgtgtggctcggcacgttcgacacgcccgaggacgccgcgcgggcctacgacgccgccgcgcgcgagtaccgcggcgccaaggccaagaccaacttctccttcccttcgtgcctgccgctcgccgccgcggacgtggccggcggctgccggagcggcaacagcagcagcaccactaccaccaccaccgtcgactccttcggcggcgacgtgcaggcgccgcccatgcaggccatgccgctcccaccgtccttcagcgccagcgccgccgtacgcttccctttcagcggctaccccgtgacgcacccgtactacttcttcgggcaggcggcagcagggtgccatatgctgaagctgccaccgacgacggtgactgtggctcagagcgactctgactcctcgtccgtcgaggatctgtcgccgtcgccgccggccgccgtgtcagcgacgagagccgccgcgtttgatctcgacctaaactgcccaccgccggccgaggcggaggcatagtcgccggagttttgctgaatgactgcctgtagtttctttcgtcttttacccgtagagagaaaatcggtaggcttagggcccctttgtattcacacggtgtcacgggcacacccacctccgaactctggtactctgatctttagagtgaaactacgaacatgtggtttaaatagttcaaagttaactctataatttatggttcaaagttaactctatgattt

SEQ ID NO: 6288 - protein, 238 aa, Zea mays subsp. mays
  peptide (1)..(238): Ceres Seq. ID no. 12402806
  misc_feature (44)..(106): Pfam Name: AP2 domain Pfam Description: AP2 domain
  misc_feature (23)..(235): Homolog of NCBI NO: 34908900 NR Description: ethylene-responsive element binding factor 3
  misc_feature (47)..(235): Homolog of NCBI NO: 15232526 NR Description: ethylene responsive element binding factor 4 protein id: At3g15210.1, supported by cDNA: 22775., supported by gi_2281634, supported by cDNA: gi_3434972 [Arabidopsis thaliana]
  misc_feature (46)..(233): Homolog of NCBI NO: 30526297 NR Description: ethylene response factor 2 [Lycopersicon
  misc_feature (23)..(233): Homolog of NCBI NO: 28274832 NR Description: ethylene response factor 3 [Lycopersicon
  misc_feature (23)..(235): Homolog of NCBI NO: 38345793 NR Description: OSJNBa0085I10.10 [Oryza sativa (japonica
  misc_feature (47)..(207): Homolog of NCBI NO: 20340233 NR Description: ethylene responsive element binding factor 4-like
  misc_feature (23)..(164): Homolog of NCBI NO: 4099921 NR Description: EREBP-3 homolog [Stylosanthes hamata]
  misc_feature (47)..(207): Homolog of NCBI NO: 2281635 NR Description: AP2 domain containing protein RAP2.5 [Arabidopsis
  misc_feature (45)..(232): Homolog of NCBI NO: 15231110 NR Description: ethylene responsive element binding factor 7; id: At3g20310.1, supported by cDNA: 124720., supported by cDNA:
  misc_feature (23)..(181): Homolog of NCBI NO: 4099914 NR Description: ethylene-responsive element binding protein
VFLPPENPTHTLAPPRRKTPRPMAPRTSERAMTSAAAGLARGAGPHYRGVRKRPWGRYAAEIRDPAKKSRVWLGTFDTPEDAARAYDAAAREYRGAKAKTNFSFPSCLPLAAADVAGGCRSGNSSSTTTTTTVDSFGGDVQAPPMQAMPLPPSFSASAAVRFPFSGYPVTHPYYFFGQAAAGCHMLKLPPTTVTVAQSDSDSSSVEDLSPSPPAAVSATRAAAFDLDLNCPPPAEAEA

SEQ ID NO: 6289 - protein, 216 aa, Zea mays subsp. mays
  peptide (1)..(216): Ceres Seq. ID no. 12402807
  misc_feature (22)..(84): Pfam Name: AP2 domain Pfam Description: AP2 domain
  misc_feature (1)..(213): Homolog of NCBI NO: 34908900 NR Description: ethylene-responsive element binding factor 3
  misc_feature (25)..(213): Homolog of NCBI NO: 15232526 NR Description: ethylene responsive element binding factor 4 protein id: At3g15210.1, supported by cDNA: 22775., supported by gi_2281634, supported by cDNA: gi_3434972 [Arabidopsis thaliana]
  misc_feature (24)..(211): Homolog of NCBI NO: 30526297 NR Description: ethylene response factor 2 [Lycopersicon
  misc_feature (1)..(211): Homolog of NCBI NO: 28274832 NR Description: ethylene response factor 3 [Lycopersicon
  misc_feature (1)..(213): Homolog of NCBI NO: 38345793 NR Description: OSJNBa0085I10.10 [Oryza sativa (japonica
  misc_feature (25)..(185): Homolog of NCBI NO: 20340233 NR Description: ethylene responsive element binding factor 4-like
  misc_feature (1)..(142): Homolog of NCBI NO: 4099921 NR Description: EREBP-3 homolog [Stylosanthes hamata]
  misc_feature (25)..(185): Homolog of NCBI NO: 2281635 NR Description: AP2 domain containing protein RAP2.5 [Arabidopsis
  misc_feature (23)..(210): Homolog of NCBI NO: 15231110 NR Description: ethylene responsive element binding factor 7; id: At3g20310.1, supported by cDNA: 124720., supported by cDNA:
  misc_feature (1)..(159): Homolog of NCBI NO: 4099914 NR Description: ethylene-responsive element binding protein
MAPRTSERAMTSAAAGLARGAGPHYRGVRKRPWGRYAAEIRDPAKKSRVWLGTFDTPEDAARAYDAAAREYRGAKAKTNFSFPSCLPLAAADVAGGCRSGNSSSTTTTTTVDSFGGDVQAPPMQAMPLPPSFSASAAVRFPFSGYPVTHPYYFFGQAAAGCHMLKLPPTTVTVAQSDSDSSSVEDLSPSPPAAVSATRAAAFDLDLNCPPPAEAEA

SEQ ID NO: 6290 - protein, 207 aa, Zea mays subsp. mays
  peptide (1)..(207): Ceres Seq. ID no. 12402808
  misc_feature (13)..(75): Pfam Name: AP2 domain Pfam Description: AP2 domain
  misc_feature (1)..(204): Homolog of NCBI NO: 34908900 NR Description: ethylene-responsive element binding factor 3
  misc_feature (16)..(204): Homolog of NCBI NO: 15232526 NR Description: ethylene responsive element binding factor 4 protein id: At3g15210.1, supported by cDNA: 22775., supported by gi_2281634, supported by cDNA: gi_3434972 [Arabidopsis thaliana]
  misc_feature (15)..(202): Homolog of NCBI NO: 30526297 NR Description: ethylene response factor 2 [Lycopersicon
  misc_feature (1)..(202): Homolog of NCBI NO: 28274832 NR Description: ethylene response factor 3 [Lycopersicon
  misc_feature (1)..(204): Homolog of NCBI NO: 38345793 NR Description: OSJNBa0085I10.10 [Oryza sativa (japonica
  misc_feature (16)..(176): Homolog of NCBI NO: 20340233 NR Description: ethylene responsive element binding factor 4-like
  misc_feature (1)..(133): Homolog of NCBI NO: 4099921 NR Description: EREBP-3 homolog [Stylosanthes hamata]
  misc_feature (16)..(176): Homolog of NCBI NO: 2281635 NR Description: AP2 domain containing protein RAP2.5 [Arabidopsis
  misc_feature (14)..(201): Homolog of NCBI NO: 15231110 NR Description: ethylene responsive element binding factor 7; id: At3g20310.1, supported by cDNA: 124720., supported by cDNA:
  misc_feature (1)..(150): Homolog of NCBI NO: 4099914 NR Description: ethylene-responsive element binding protein
MTSAAAGLARGAGPHYRGVRKRPWGRYAAEIRDPAKKSRVWLGTFDTPEDAARAYDAAAREYRGAKAKTNFSFPSCLPLAAADVAGGCRSGNSSSTTTTTTVDSFGGDVQAPPMQAMPLPPSFSASAAVRFPFSGYPVTHPYYFFGQAAAGCHMLKLPPTTVTVAQSDSDSSSVEDLSPSPPAAVSATRAAAFDLDLNCPPPAEAEA

SEQ ID NO: 6291 - DNA, 1069 bp, Zea mays subsp. mays
  misc_feature (1)..(1069): Ceres Seq. ID no. 12341753
  misc_feature: MA Experiment ID: 108504 Result: Down-regulated in Transcription
  misc_feature: MA Experiment 108504 PARAMETER Experiment Name: Zm_Drought_P Parameter: Age (day) Value: 8
  misc_feature: MA Experiment 108504 PARAMETER Experiment Name: Zm_Drought_P Parameter: Organism Value: Zea mays
  misc_feature: MA Experiment 108504 PARAMETER Experiment Name: Zm_Drought_P Parameter: Plant Line Value: 35A19
  misc_feature: MA Experiment 108504 PARAMETER Experiment Name: Zm_Drought_P Parameter: Timepoint (hr) Value: 12
  misc_feature: MA Experiment 108504 PARAMETER Experiment Name: Zm_Drought_P Parameter: Tissue Value: Aerial
  misc_feature: MA Experiment 108504 PARAMETER Experiment Name: Zm_Drought_P Parameter: Treatment Value: Drought vs. No Drought
  misc_feature: MA Experiment ID: 108535 Result: Up-regulated in Transcription
  misc_feature: MA Experiment 108535 PARAMETER Experiment Name: Zm_Meristem_P Parameter: Age (day) Value: 8
  misc_feature: MA Experiment 108535 PARAMETER Experiment Name: Zm_Meristem_P Parameter: Organism Value: Zea mays
  misc_feature: MA Experiment 108535 PARAMETER Experiment Name: Zm_Meristem_P Parameter: Plant Line Value: 35A19
  misc_feature: MA Experiment 108535 PARAMETER Experiment Name: Zm_Meristem_P Parameter: Tissue Value: Root Meristem vs. Above Root Meristem
  misc_feature: MA Experiment ID: 108556 Result: Down-regulated in Transcription
  misc_feature: MA Experiment 108556 PARAMETER Experiment Name: Zm_Drought_P Parameter: Age (day) Value: 9
  misc_feature: MA Experiment 108556 PARAMETER Experiment Name: Zm_Drought_P Parameter: Organism Value: Zea mays
  misc_feature: MA Experiment 108556 PARAMETER Experiment Name: Zm_Drought_P Parameter: Plant Line Value: 35A19
  misc_feature: MA Experiment 108556 PARAMETER Experiment Name: Zm_Drought_P Parameter: Timepoint (hr) Value: 24
  misc_feature: MA Experiment 108556 PARAMETER Experiment Name: Zm_Drought_P Parameter: Tissue Value: Aerial
  misc_feature: MA Experiment 108556 PARAMETER Experiment Name: Zm_Drought_P Parameter: Treatment Value: Drought vs. No Drought
  misc_feature: MA Experiment ID: 108597 Result: Down-regulated in Transcription
  misc_feature: MA Experiment 108597 PARAMETER Experiment Name: Zm_100uM_ABA_P Parameter: Age (day) Value: 9
  misc_feature: MA Experiment 108597 PARAMETER Experiment Name: Zm_100uM_ABA_P Parameter: Organism Value: Zea mays
  misc_feature: MA Experiment 108597 PARAMETER Experiment Name: Zm_100uM_ABA_P Parameter: Plant Line Value: 35A19
  misc_feature: MA Experiment 108597 PARAMETER Experiment Name: Zm_100uM_ABA_P Parameter: Timepoint (hr) Value: 24
  misc_feature: MA Experiment 108597 PARAMETER Experiment Name: Zm_100uM_ABA_P Parameter: Tissue Value: Aerial
  misc_feature: MA Experiment 108597 PARAMETER Experiment Name: Zm_100uM_ABA_P Parameter: Treatment Value: 100uM ABA vs. No Treatment
  misc_feature: MA Experiment ID: 108599 Result: Up-regulated in Transcription
  misc_feature: MA Experiment 108599 PARAMETER Experiment Name: Zm_RT1_P Parameter: Age (day) Value: 11
  misc_feature: MA Experiment 108599 PARAMETER Experiment Name: Zm_RT1_P Parameter: Organism Value: Zea mays
  misc_feature: MA Experiment 108599 PARAMETER Experiment Name: Zm_RT1_P Parameter: Plant Line Value: rt1 mut vs. rt1 wt
  misc_feature: MA Experiment 108599 PARAMETER Experiment Name: Zm_RT1_P Parameter: Tissue Value: Roots
  misc_feature: MA Experiment ID: 20000488 Result: Up-regulated in Transcription
  misc_feature: MA Experiment 20000488 PARAMETER Experiment Name: Zm_50mM_NH4NO3_L_to_H_P Parameter: Organism Value: Zea mays
  misc_feature: MA Experiment 20000488 PARAMETER Experiment Name: Zm_50mM_NH4NO3_L_to_H_P Parameter: Timepoint (hr) Value: 8
  misc_feature: MA Experiment 20000488 PARAMETER Experiment Name: Zm_50mM_NH4NO3_L_to_H_P Parameter: Tissue Value: Leaves
  misc_feature: MA Experiment 20000488 PARAMETER Experiment Name: Zm_50mM_NH4NO3_L_to_H_P Parameter: Treatment Value: 50mM NH4NO3 vs. 100mM Mannitol
  misc_feature: MA Experiment ID: 20000492 Result: Up-regulated in Transcription
  misc_feature: MA Experiment 20000492 PARAMETER Experiment Name: Zm_Hybrid_Seed_Dev_P Parameter: DAP Value: 12
  misc_feature: MA Experiment 20000492 PARAMETER Experiment Name: Zm_Hybrid_Seed_Dev_P Parameter: Organism Value: Zea mays
  misc_feature: MA Experiment 20000492 PARAMETER Experiment Name: Zm_Hybrid_Seed_Dev_P Parameter: Plant Line Value: 35A19
  misc_feature: MA Experiment 20000492 PARAMETER Experiment Name: Zm_Hybrid_Seed_Dev_P Parameter: Tissue Value: Fert Kernel vs. Unfert Floret
  misc_feature: MA Experiment ID: 20001606 Result: Up-regulated in Transcription
  misc_feature: MA Experiment 20001606 PARAMETER Experiment Name: Zm_50ppm_KNO3_L-to-H_P Parameter: Age (day) Value: 19
  misc_feature: MA Experiment 20001606 PARAMETER Experiment Name: Zm_50ppm_KNO3_L-to-H_P Parameter: Organism Value: Zea mays
  misc_feature: MA Experiment 20001606 PARAMETER Experiment Name: Zm_50ppm_KNO3_L-to-H_P Parameter: Plant Line Value: 35A19
  misc_feature: MA Experiment 20001606 PARAMETER Experiment Name: Zm_50ppm_KNO3_L-to-H_P Parameter: Timepoint (hr) Value: 8
  misc_feature: MA Experiment 20001606 PARAMETER Experiment Name: Zm_50ppm_KNO3_L-to-H_P Parameter: Tissue Value: Shoots
  misc_feature: MA Experiment 20001606 PARAMETER Experiment Name: Zm_50ppm_KNO3_L-to-H_P Parameter: Treatment Value: 50ppm KNO3 vs. 50ppm KCl
acttcgtttctgcctttgaccagctcttgcgctcggcttatctcgtgcggttgttgctagaaccgtccctaattccattcccgtgatctggtttagtcatttcatggttttatttgttgcatctgtggtgaatctgtggtcacttagatcaacataggaagatgtacgcccagttgagttttgagtcggctgttggtgtttccctaactagggactgagggtctgaagctctatacctgttgcaatcgcgtagttgtgcgtgctagatgtatcagagaatccctttgagtagaaagcacacgcacacagctgccacggtattggcattcgtaggtatctgtttcactgacgtgctacctgcacgaggatagcacctgatatttgtgcgctttttttggtgaagattttttgaagctgagaagatggtgctgaagacggaactctgccgcttcagtggccagaagatctatcctgggaaaggcatccggtttattcgtgctgattctcaggttttcctttttgccaactctaaatgcaagcgctacttccacaaccgcctgaagcctgcaaagcttacctggacagcaatgtacaggaagcagcacaagaaggacatccatgctgaagctgtcaagaagaggcgccgcgccaccaagaagccatactcgaggtccattgtgggtgcttccttggaagtgatccagaagaagagagctgagaagcctgaggtccgtgatgctgctagagaagctgctcttcgtgagatcaaggagcgcatcaagaagaccaaggacgagaagaaggcgaagaaggctgaggtgtccaagtcccagaaggcgcagacgaagggcgctgtccagaagggttccaagggccccaagttgggcggcggcggtggcaaacgctgaaaaggaacgaagtgtcatttcgagacctcaccaaagtcacctttgtagtacctgggttaattttgcattttcgttcagagttacttgtgactcttaactaccatgtcaagagaatggattcgttatttttatatattgggagaaatgatcgccgttccttc

SEQ ID NO: 6292 - protein, 161 aa, Zea mays subsp. mays
  peptide (1)..(161): Ceres Seq. ID no. 12341754
  misc_feature (3)..(73): Pfam Name: Ribosomal protein L24e Pfam Description: Ribosomal protein L24e
  misc_feature (3)..(150): Homolog of NCBI NO: 19075214 NR Description: 60s ribosomal protein L24 [Schizosaccharomyces
  misc_feature (3)..(150): Homolog of NCBI NO: 19115030 NR Description: 60S ribosomal protein L24 [Schizosaccharomyces
  misc_feature (4)..(161): Homolog of NCBI NO: 34900364 NR Description: putative 60S ribosomal protein L24 [Oryza sativa
  misc_feature (1)..(156): Homolog of NCBI NO: 10180025 NR Description: 60S ribosomal protein L24 [Prunus avium]
  misc_feature (1)..(161): Homolog of NCBI NO: 15231730 NR Description: 60S ribosomal protein - like; protein id: supported by cDNA: gi_16648705, supported by cDNA: gi_20260561 thaliana] >gi|26454659|sp|P38666|RL24_ARATH 60S ribosomal protein
  misc_feature (5)..(161): Homolog of NCBI NO: 25295112 NR Description: 60S ribosomal protein L24 [imported] -
  misc_feature (1)..(161): Homolog of NCBI NO: 18404176 NR Description: 60S ribosomal protein L24; protein id: supported by cDNA: 14564., supported by cDNA: gi_16604375, by cDNA: gi_18252830 [Arabidopsis thaliana]
  misc_feature (1)..(160): Homolog of NCBI NO: 6094040 NR Description: 60S ribosomal protein L24
  misc_feature (1)..(161): Homolog of NCBI NO: 1710521 NR Description: 60S RIBOSOMAL PROTEIN L24 >gi|7440778|pir||T06178
  misc_feature (10)..(154): Homolog of NCBI NO: 40741063 NR Description: conserved hypothetical protein [Aspergillus
MVLKTELCRFSGQKIYPGKGIRFIRADSQVFLFANSKCKRYFHNRLKPAKLTWTAMYRKQHKKDIHAEAVKKRRRATKKPYSRSIVGASLEVIQKKRAEKPEVRDAAREAALREIKERIKKTKDEKKAKKAEVSKSQKAQTKGAVQKGSKGPKLGGGGGKR

SEQ ID NO: 6293 - protein, 106 aa, Zea mays subsp. mays
  peptide (1)..(106): Ceres Seq. ID no. 12341755
  misc_feature (1)..(106): Homolog of NCBI NO: 1710521 NR Description: 60S RIBOSOMAL PROTEIN L24 >gi|7440778|pir||T06178
  misc_feature (1)..(106): Homolog of NCBI NO: 34900364 NR Description: putative 60S ribosomal protein L24 [Oryza sativa
  misc_feature (1)..(105): Homolog of NCBI NO: 6094040 NR Description: 60S ribosomal protein L24
  misc_feature (1)..(101): Homolog of NCBI NO: 10180025 NR Description: 60S ribosomal protein L24 [Prunus avium]
  misc_feature (1)..(106): Homolog of NCBI NO: 18404176 NR Description: 60S ribosomal protein L24; protein id: supported by cDNA: 14564., supported by cDNA: gi_16604375, by cDNA: gi_18252830 [Arabidopsis thaliana]
  misc_feature (1)..(106): Homolog of NCBI NO: 15231730 NR Description: 60S ribosomal protein - like; protein id: supported by cDNA: gi_16648705, supported by cDNA: gi_20260561 thaliana] >gi|26454659|sp|P38666|RL24_ARATH 60S ribosomal protein
  misc_feature (1)..(106): Homolog of NCBI NO: 25295112 NR Description: 60S ribosomal protein L24 [imported] -
  misc_feature (1)..(95): Homolog of NCBI NO: 19075214 NR Description: 60s ribosomal protein L24 [Schizosaccharomyces
  misc_feature (1)..(95): Homolog of NCBI NO: 19115030 NR Description: 60S ribosomal protein L24 [Schizosaccharomyces
  misc_feature (1)..(99): Homolog of NCBI NO: 40741063 NR Description: conserved hypothetical protein [Aspergillus
MYRKQHKKDIHAEAVKKRRRATKKPYSRSIVGASLEVIQKKRAEKPEVRDAAREAALREIKERIKKTKDEKKAKKAEVSKSQKAQTKGAVQKGSKGPKLGGGGGKR

SEQ ID NO: 6294 - protein, 89 aa, Zea mays subsp. mays
  peptide (1)..(89): Ceres Seq. ID no. 12341756
MLLEKLLFVRSRSASRRPRTRRRRRRLRCPSPRRRRRRALSRRVPRAPSWAAAVANAEKERSVISRPHQSHLCSTWVNFAFSFRVTCDS

SEQ ID NO: 6295 - DNA, 1099 bp, Zea mays subsp. mays; identical to SEQ ID NO: 3493
  misc_feature (1)..(1099): Ceres Seq. ID no. 13577617
  misc_feature: MA Experiment ID: 108527 Result: Down-regulated in Transcription
  misc_feature: MA Experiment 108527 PARAMETER Experiment Name: Zm_5mM_NO_P Parameter: Age (day) Value: 8
  misc_feature: MA Experiment 108527 PARAMETER Experiment Name: Zm_5mM_NO_P Parameter: Organism Value: Zea mays
  misc_feature: MA Experiment 108527 PARAMETER Experiment Name: Zm_5mM_NO_P Parameter: Plant Line Value: 35A19
  misc_feature: MA Experiment 108527 PARAMETER Experiment Name: Zm_5mM_NO_P Parameter: Timepoint (hr) Value: 6
  misc_feature: MA Experiment 108527 PARAMETER Experiment Name: Zm_5mM_NO_P Parameter: Tissue Value: Aerial
  misc_feature: MA Experiment 108527 PARAMETER Experiment Name: Zm_5mM_NO_P Parameter: Treatment Value: 5mM NO vs. No Treatment
  misc_feature: MA Experiment ID: 108528 Result: Down-regulated in Transcription
  misc_feature: MA Experiment 108528 PARAMETER Experiment Name: Zm_Imbibed_Seeds_P Parameter: Age (day) Value: 5 vs. 2
  misc_feature: MA Experiment 108528 PARAMETER Experiment Name: Zm_Imbibed_Seeds_P Parameter: Organism Value: Zea mays
  misc_feature: MA Experiment 108528 PARAMETER Experiment Name: Zm_Imbibed_Seeds_P Parameter: Plant Line Value: 35A19
  misc_feature: MA Experiment 108528 PARAMETER Experiment Name: Zm_Imbibed_Seeds_P Parameter: Tissue Value: Aerial vs. Embryo
  misc_feature: MA Experiment ID: 108529 Result: Down-regulated in Transcription
  misc_feature: MA Experiment 108529 PARAMETER Experiment Name: Zm_Imbibed_Seeds_P Parameter: Age (day) Value: 5 vs. 2
  misc_feature: MA Experiment 108529 PARAMETER Experiment Name: Zm_Imbibed_Seeds_P Parameter: Organism Value: Zea mays
  misc_feature: MA Experiment 108529 PARAMETER Experiment Name: Zm_Imbibed_Seeds_P Parameter: Plant Line Value: 35A19
  misc_feature: MA Experiment 108529 PARAMETER Experiment Name: Zm_Imbibed_Seeds_P Parameter: Tissue Value: Roots vs. Embryo
  misc_feature: MA Experiment ID: 108530 Result: Down-regulated in Transcription
  misc_feature: MA Experiment 108530 PARAMETER Experiment Name: Zm_Imbibed_Seeds_P Parameter: Age (day) Value: 6 vs. 2
  misc_feature: MA Experiment 108530 PARAMETER Experiment Name: Zm_Imbibed_Seeds_P Parameter: Organism Value: Zea mays
  misc_feature: MA Experiment 108530 PARAMETER Experiment Name: Zm_Imbibed_Seeds_P Parameter: Plant Line Value: 35A19
  misc_feature: MA Experiment 108530 PARAMETER Experiment Name: Zm_Imbibed_Seeds_P Parameter: Tissue Value: Aerial vs. Embryo
  misc_feature: MA Experiment ID: 108535 Result: Up-regulated in Transcription
  misc_feature: MA Experiment 108535 PARAMETER Experiment Name: Zm_Meristem_P Parameter: Age (day) Value: 8
  misc_feature: MA Experiment 108535 PARAMETER Experiment Name: Zm_Meristem_P Parameter: Organism Value: Zea mays
  misc_feature: MA Experiment 108535 PARAMETER Experiment Name: Zm_Meristem_P Parameter: Plant Line Value: 35A19
  misc_feature: MA Experiment 108535 PARAMETER Experiment Name: Zm_Meristem_P Parameter: Tissue Value: Root Meristem vs. Above Root Meristem
  misc_feature: MA Experiment ID: 108544 Result: Down-regulated in Transcription
  misc_feature: MA Experiment ID: 20000108 Result: Up-regulated in Transcription
  misc_feature: MA Experiment 20000108 PARAMETER Experiment Name: Zm_Root-Tips_P Parameter: Age (day) Value: 12
  misc_feature: MA Experiment 20000108 PARAMETER Experiment Name: Zm_Root-Tips_P Parameter: Organism Value: Zea mays
  misc_feature: MA Experiment 20000108 PARAMETER Experiment Name: Zm_Root-Tips_P Parameter: Tissue Value: Root tips vs. Root mid region    35
  misc_feature: MA Experiment 20000108 PARAMETER Experiment Name: Zm_Root-Tips_P Parameter: Tissue Value: Root tips vs. Root mid region   Sequence Listing-Misc Features (4)
  misc_feature: MA Experiment ID: 20000487 Result: Up-regulated in Transcription
  misc_feature: MA Experiment 20000487 PARAMETER Experiment Name: Zm_50mM_NH4NO3_L_to_H_P Parameter: Organism Value: Zea mays
  misc_feature: MA Experiment 20000487 PARAMETER Experiment Name: Zm_50mM_NH4NO3_L_to_H_P Parameter: Timepoint (hr) Value: 4
  misc_feature: MA Experiment 20000487 PARAMETER Experiment Name: Zm_50mM_NH4NO3_L_to_H_P Parameter: Tissue Value: Leaves
  misc_feature: MA Experiment 20000487 PARAMETER Experiment Name: Zm_50mM_NH4NO3_L_to_H_P Parameter: Treatment Value: 50mM NH4NO3 vs. 100mM Mannitol
  misc_feature: MA Experiment ID: 20000488 Result: Up-regulated in Transcription
  misc_feature: MA Experiment 20000488 PARAMETER Experiment Name: Zm_50mM_NH4NO3_L_to_H_P Parameter: Organism Value: Zea mays
  misc_feature: MA Experiment 20000488 PARAMETER Experiment Name: Zm_50mM_NH4NO3_L_to_H_P Parameter: Timepoint (hr) Value: 8
  misc_feature: MA Experiment 20000488 PARAMETER Experiment Name: Zm_50mM_NH4NO3_L_to_H_P Parameter: Tissue Value: Leaves
  misc_feature: MA Experiment 20000488 PARAMETER Experiment Name: Zm_50mM_NH4NO3_L_to_H_P Parameter: Treatment Value: 50mM NH4NO3 vs. 100mM Mannitol
  misc_feature: MA Experiment ID: 20000492 Result: Up-regulated in Transcription
  misc_feature: MA Experiment 20000492 PARAMETER Experiment Name: Zm_Hybrid_Seed_Dev_P Parameter: DAP Value: 12
  misc_feature: MA Experiment 20000492 PARAMETER Experiment Name: Zm_Hybrid_Seed_Dev_P Parameter: Organism Value: Zea mays
  misc_feature: MA Experiment 20000492 PARAMETER Experiment Name: Zm_Hybrid_Seed_Dev_P Parameter: Plant Line Value: 35A19
  misc_feature: MA Experiment 20000492 PARAMETER Experiment Name: Zm_Hybrid_Seed_Dev_P Parameter: Tissue Value: Fert Kernel vs. Unfert Floret
  misc_feature: MA Experiment ID: 20000535 Result: Up-regulated in Transcription
  misc_feature: MA Experiment 20000535 PARAMETER Experiment Name: Zm_Hybrid_Seed_Dev_P Parameter: DAP Value: 30 vs. 12
  misc_feature: MA Experiment 20000535 PARAMETER Experiment Name: Zm_Hybrid_Seed_Dev_P Parameter: Organism Value: Zea mays
  misc_feature: MA Experiment 20000535 PARAMETER Experiment Name: Zm_Hybrid_Seed_Dev_P Parameter: Plant Line Value: 35A19
  misc_feature: MA Experiment 20000535 PARAMETER Experiment Name: Zm_Hybrid_Seed_Dev_P Parameter: Tissue Value: Embryo vs. Unfert Floret
  misc_feature: MA Experiment ID: 20000632 Result: Down-regulated in Transcription
  misc_feature: MA Experiment 20000632 PARAMETER Experiment Name: Zm_Herbicide-Treatments_P Parameter: Timepoint (hr) Value: 4
  misc_feature: MA Experiment 20000632 PARAMETER Experiment Name: Zm_Herbicide-Treatments_P Parameter: Tissue Value: Aerial
  misc_feature: MA Experiment 20000632 PARAMETER Experiment Name: Zm_Herbicide-Treatments_P Parameter: Treatment Value: Glean vs. No Treatment
  misc_feature: MA Experiment ID: 20000633 Result: Down-regulated in Transcription
  misc_feature: MA Experiment 20000633 PARAMETER Experiment Name: Zm_Herbicide-Treatments_P Parameter: Timepoint (hr) Value: 4
  misc_feature: MA Experiment 20000633 PARAMETER Experiment Name: Zm_Herbicide-Treatments_P Parameter: Tissue Value: Aerial
  misc_feature: MA Experiment 20000633 PARAMETER Experiment Name: Zm_Herbicide-Treatments_P Parameter: Treatment Value: Trimec vs. No Treatment
  misc_feature: MA Experiment ID: 20001613 Result: Up-regulated in Transcription
  misc_feature: MA Experiment 20001613 PARAMETER Experiment Name: Zm_50ppm_KNO3_L-to-H_P Parameter: Age (day) Value: 20
  misc_feature: MA Experiment 20001613 PARAMETER Experiment Name: Zm_50ppm_KNO3_L-to-H_P Parameter: Organism Value: Zea mays
  misc_feature: MA Experiment 20001613 PARAMETER Experiment Name: Zm_50ppm_KNO3_L-to-H_P Parameter: Plant Line Value: 35A19
  misc_feature: MA Experiment 20001613 PARAMETER Experiment Name: Zm_50ppm_KNO3_L-to-H_P Parameter: Timepoint (hr) Value: 24
  misc_feature: MA Experiment 20001613 PARAMETER Experiment Name: Zm_50ppm_KNO3_L-to-H_P Parameter: Tissue Value: Roots
  misc_feature: MA Experiment 20001613 PARAMETER Experiment Name: Zm_50ppm_KNO3_L-to-H_P Parameter: Treatment Value: 50ppm KNO3 vs. 50ppm KCl

SEQ ID NO: 6296 - protein, 296 aa, Zea mays subsp. mays; identical to SEQ ID NO: 3494
  peptide (1)..(296): Ceres Seq. ID no. 13577618
  misc_feature (77)..(272): Pfam Name: Nucleosome assembly protein (NAP) Pfam Description: Nucleosome assembly protein (NAP)
  misc_feature (77)..(272): Pfam Name: Nucleosome assembly protein (NAP) Pfam Description: Nucleosome assembly protein (NAP)
  misc_feature (46)..(296): Homolog of NCBI NO: 14550110 NR Description: nucleosome/chromatin assembly factor A [Zea mays]
  misc_feature (46)..(293): Homolog of NCBI NO: 14550112 NR Description: nucleosome/chromatin assembly factor A [Zea mays]
  misc_feature (46)..(293): Homolog of NCBI NO: 21739223 NR Description: OSJNBa0072F16.2 [Oryza sativa (japonica
  misc_feature (51)..(296): Homolog of NCBI NO: 25354177 NR Description: hypothetical protein F6A14.10 [imported] - thaliana >gi|6730705|gb|AAF27100.1|AC011809_9 Putative phospatase
  misc_feature (51)..(296): Homolog of NCBI NO: 18394656 NR Description: expressed protein [Arabidopsis thaliana] putative SET protein, phospatase 2A inhibitor [Arabidopsis
  misc_feature (46)..(293): Homolog of NCBI NO: 14550112 NR Description: nucleosome/chromatin assembly factor A [Zea mays]
  misc_feature (51)..(296): Homolog of NCBI NO: 25354177 NR Description: hypothetical protein F6A14.10 [imported] - thaliana >gi|6730705|gb|AAF27100.1|AC011809_9 Putative phospatase
  misc_feature (46)..(295): Homolog of NCBI NO: 2144100 NR Description: Set beta isoform - rat >gi|545265|gb|AAC60682.1| beta isoform [Rattus sp.] >gi|12860381|dbj|BAB31936.1| unnamed
  misc_feature (46)..(293): Homolog of NCBI NO: 28279779 NR Description: Similar to SET translocation (myeloid
  misc_feature (46)..(293): Homolog of NCBI NO: 2253411 NR Description: PP2A inhibitor [Tetraodon fluviatilis]
  misc_feature (51)..(273): Homolog of NCBI NO: 26451105 NR Description: unknown protein [Arabidopsis thaliana]
  misc_feature (50)..(296): Homolog of NCBI NO: 15221298 NR Description: SET protein, phospatase 2A inhibitor -related
  misc_feature (51)..(296): Homolog of NCBI NO: 18394656 NR Description: expressed protein [Arabidopsis thaliana] putative SET protein, phospatase 2A inhibitor [Arabidopsis
  misc_feature (46)..(293): Homolog of NCBI NO: 21739223 NR Description: OSJNBa0072F16.2 [Oryza sativa (japonica
  misc_feature (46)..(296): Homolog of NCBI NO: 14550110 NR Description: nucleosome/chromatin assembly factor A [Zea mays]
  misc_feature (50)..(296): Homolog of NCBI NO: 15221298 NR Description: SET protein, phospatase 2A inhibitor -related
  misc_feature (51)..(273): Homolog of NCBI NO: 26451105 NR Description: unknown protein [Arabidopsis thaliana]
  misc_feature (46)..(293): Homolog of NCBI NO: 2253411 NR Description: PP2A inhibitor [Tetraodon fluviatilis]
  misc_feature (46)..(293): Homolog of NCBI NO: 28279779 NR Description: Similar to SET translocation (myeloid
  misc_feature (46)..(295): Homolog of NCBI NO: 2144100 NR Description: Set beta isoform - rat >gi|545265|gb|AAC60682.1| beta isoform [Rattus sp.] >gi|12860381|dbj|BAB31936.1| unnamed

SEQ ID NO: 6297 - protein, 251 aa, Zea mays subsp. mays; identical to SEQ ID NO: 3495
  peptide (1)..(251): Ceres Seq. ID no. 13577619
  misc_feature (32)..(227): Pfam Name: Nucleosome assembly protein (NAP) Pfam Description: Nucleosome assembly protein (NAP)
  misc_feature (32)..(227): Pfam Name: Nucleosome assembly protein (NAP) Pfam Description: Nucleosome assembly protein (NAP)
  misc_feature (1)..(251): Homolog of NCBI NO: 14550110 NR Description: nucleosome/chromatin assembly factor A [Zea mays]
  misc_feature (1)..(248): Homolog of NCBI NO: 14550112 NR Description: nucleosome/chromatin assembly factor A [Zea mays]
  misc_feature (1)..(248): Homolog of NCBI NO: 21739223 NR Description: OSJNBa0072F16.2 [Oryza sativa (japonica
  misc_feature (6)..(251): Homolog of NCBI NO: 25354177 NR Description: hypothetical protein F6A14.10 [imported] - thaliana >gi|6730705|gb|AAF27100.1|AC011809_9 Putative phospatase
  misc_feature (6)..(251): Homolog of NCBI NO: 18394656 NR Description: expressed protein [Arabidopsis thaliana] putative SET protein, phospatase 2A inhibitor [Arabidopsis
  misc_feature (1)..(248): Homolog of NCBI NO: 14550112 NR Description: nucleosome/chromatin assembly factor A [Zea mays]
  misc_feature (6)..(251): Homolog of NCBI NO: 25354177 NR Description: hypothetical protein F6A14.10 [imported] - thaliana >gi|6730705|gb|AAF27100.1|AC011809_9 Putative phospatase
  misc_feature (1)..(250): Homolog of NCBI NO: 2144100 NR Description: Set beta isoform - rat >gi|545265|gb|AAC60682.1| beta isoform [Rattus sp.] >gi|12860381|dbj|BAB31936.1| unnamed
  misc_feature (1)..(248): Homolog of NCBI NO: 28279779 NR Description: Similar to SET translocation (myeloid
  misc_feature (1)..(248): Homolog of NCBI NO: 2253411 NR Description: PP2A inhibitor [Tetraodon fluviatilis]
  misc_feature (6)..(228): Homolog of NCBI NO: 26451105 NR Description: unknown protein [Arabidopsis thaliana]
  misc_feature (5)..(251): Homolog of NCBI NO: 15221298 NR Description: SET protein, phospatase 2A inhibitor -related
  misc_feature (6)..(251): Homolog of NCBI NO: 18394656 NR Description: expressed protein [Arabidopsis thaliana] putative SET protein, phospatase 2A inhibitor [Arabidopsis
  misc_feature (1)..(248): Homolog of NCBI NO: 21739223 NR Description: OSJNBa0072F16.2 [Oryza sativa (japonica
  misc_feature (1)..(251): Homolog of NCBI NO: 14550110 NR Description: nucleosome/chromatin assembly factor A [Zea mays]
  misc_feature (5)..(251): Homolog of NCBI NO: 15221298 NR Description: SET protein, phospatase 2A inhibitor -related
  misc_feature (6)..(228): Homolog of NCBI NO: 26451105 NR Description: unknown protein [Arabidopsis thaliana]
  misc_feature (1)..(248): Homolog of NCBI NO: 2253411 NR Description: PP2A inhibitor [Tetraodon fluviatilis]
  misc_feature (1)..(248): Homolog of NCBI NO: 28279779 NR Description: Similar to SET translocation (myeloid
  misc_feature (1)..(250): Homolog of NCBI NO: 2144100 NR Description: Set beta isoform - rat >gi|545265|gb|AAC60682.1| beta isoform [Rattus sp.] >gi|12860381|dbj|BAB31936.1| unnamed

SEQ ID NO: 6298 - protein, 198 aa, Zea mays subsp. mays; identical to SEQ ID NO: 3496
  peptide (1)..(198): Ceres Seq. ID no. 13577620
  misc_feature (1)..(174): Pfam Name: Nucleosome assembly protein (NAP) Pfam Description: Nucleosome assembly protein (NAP)
  misc_feature (1)..(174): Pfam Name: Nucleosome assembly protein (NAP) Pfam Description: Nucleosome assembly protein (NAP)
  misc_feature (1)..(198): Homolog of NCBI NO: 14550110 NR Description: nucleosome/chromatin assembly factor A [Zea mays]
  misc_feature (1)..(195): Homolog of NCBI NO: 14550112 NR Description: nucleosome/chromatin assembly factor A [Zea mays]
  misc_feature (1)..(195): Homolog of NCBI NO: 21739223 NR Description: OSJNBa0072F16.2 [Oryza sativa (japonica
  misc_feature (1)..(198): Homolog of NCBI NO: 25354177 NR Description: hypothetical protein F6A14.10 [imported] - thaliana >gi|6730705|gb|AAF27100.1|AC011809_9 Putative phospatase
  misc_feature (1)..(198): Homolog of NCBI NO: 18394656 NR Description: expressed protein [Arabidopsis thaliana] putative SET protein, phospatase 2A inhibitor [Arabidopsis
  misc_feature (1)..(195): Homolog of NCBI NO: 14550112 NR Description: nucleosome/chromatin assembly factor A [Zea mays]
  misc_feature (1)..(198): Homolog of NCBI NO: 25354177 NR Description: hypothetical protein F6A14.10 [imported] - thaliana >gi|6730705|gb|AAF27100.1|AC011809_9 Putative phospatase
  misc_feature (1)..(197): Homolog of NCBI NO: 2144100 NR Description: Set beta isoform - rat >gi|545265|gb|AAC60682.1| beta isoform [Rattus sp.] >gi|12860381|dbj|BAB31936.1| unnamed
  misc_feature (1)..(195): Homolog of NCBI NO: 28279779 NR Description: Similar to SET translocation (myeloid
  misc_feature (1)..(195): Homolog of NCBI NO: 2253411 NR Description: PP2A inhibitor [Tetraodon fluviatilis]
  misc_feature (1)..(175): Homolog of NCBI NO: 26451105 NR Description: unknown protein [Arabidopsis thaliana]
  misc_feature (1)..(198): Homolog of NCBI NO: 15221298 NR Description: SET protein, phospatase 2A inhibitor -related
  misc_feature (1)..(198): Homolog of NCBI NO: 18394656 NR Description: expressed protein [Arabidopsis thaliana] putative SET protein, phospatase 2A inhibitor [Arabidopsis
  misc_feature (1)..(195): Homolog of NCBI NO: 21739223 NR Description: OSJNBa0072F16.2 [Oryza sativa (japonica
  misc_feature (1)..(198): Homolog of NCBI NO: 14550110 NR Description: nucleosome/chromatin assembly factor A [Zea mays]
  misc_feature (1)..(198): Homolog of NCBI NO: 15221298 NR Description: SET protein, phospatase 2A inhibitor -related
  misc_feature (1)..(175): Homolog of NCBI NO: 26451105 NR Description: unknown protein [Arabidopsis thaliana]
  misc_feature (1)..(195): Homolog of NCBI NO: 2253411 NR Description: PP2A inhibitor [Tetraodon fluviatilis]
  misc_feature (1)..(195): Homolog of NCBI NO: 28279779 NR Description: Similar to SET translocation (myeloid
  misc_feature (1)..(197): Homolog of NCBI NO: 2144100 NR Description: Set beta isoform - rat >gi|545265|gb|AAC60682.1| beta isoform [Rattus sp.] >gi|12860381|dbj|BAB31936.1| unnamed

SEQ ID NO: 6299 - DNA, 1073 bp, Zea mays subsp. mays
  misc_feature (1)..(1073): Ceres Seq. ID no. 12340796
  misc_feature: MA Experiment ID: 108528 Result: Up-regulated in Transcription
  misc_feature: MA Experiment 108528 PARAMETER Experiment Name: Zm_Imbibed_Seeds_P Parameter: Age (day) Value: 5 vs. 2
  misc_feature: MA Experiment 108528 PARAMETER Experiment Name: Zm_Imbibed_Seeds_P Parameter: Organism Value: Zea mays
  misc_feature: MA Experiment 108528 PARAMETER Experiment Name: Zm_Imbibed_Seeds_P Parameter: Plant Line Value: 35A19
  misc_feature: MA Experiment 108528 PARAMETER Experiment Name: Zm_Imbibed_Seeds_P Parameter: Tissue Value: Aerial vs. Embryo
  misc_feature: MA Experiment ID: 20000488 Result: Up-regulated in Transcription
  misc_feature: MA Experiment 20000488 PARAMETER Experiment Name: Zm_50mM_NH4NO3_L_to_H_P Parameter: Organism Value: Zea mays
  misc_feature: MA Experiment 20000488 PARAMETER Experiment Name: Zm_50mM_NH4NO3_L_to_H_P Parameter: Timepoint (hr) Value: 8
  misc_feature: MA Experiment 20000488 PARAMETER Experiment Name: Zm_50mM_NH4NO3_L_to_H_P Parameter: Tissue Value: Leaves
  misc_feature: MA Experiment 20000488 PARAMETER Experiment Name: Zm_50mM_NH4NO3_L_to_H_P Parameter: Treatment Value: 50mM NH4NO3 vs. 100mM Mannitol
attttcttaaaaaaaaatctcaatcgcaacaacacaaaaaaggcccgcaatatcgattagcgagagtcgttcctccaccaaccaattcgcttctccgtcaacatcacttcatcgtcgacgcctccggcccaccaaccatgccggcggccatggcggctgcggcggcgcagaggctcctcgcggcgagcacgaaaatcattggcgttgggcgcaactacatagcccacgccaaggagctcggcaatccggtccccaaggagcccgtcctgttcctgaagccgacctcgtcgtttctccacgctggtgtggccaccgccgccgtcgagatcccggagccgctcgagtcgctacaccacgaggtcgagctcgccgtcgtcatctcccggcgcgggcgcgacgttcccgaggcgtccgccatggactttgttggaggttatgcacttgctttggacatgacagcaagggaccttcagtctgttgctaagtctgcaggccttccatggactttggctaaaggacaagacaccttcaccccaattagtgcagtagttccaaaatcagctgtcactaatcccgatgatctcgagctctggctgaaggtagatgatgaactaaggcagaaaggaccgacaagcgacatgctattcaagattccttttctgataagctatatcagttccatcatgacattaatggagggtcatgtgatattaacaggtactcctgagggtgtgggtcctgtcagagtaggtcagaagattacagctggtataactgacctaattgatgttgagttcgatgttcagaggcgaaatcggtcattttccacatgatgcaataagcaagaaagtaatggtgaatacaaagtggcagtactcgtcctcgaccttgaatcgcattactggacctgcagccattgcagatagctcttgagcctttccttgatttaatttacctgggttttgagagactatctatgaatatgctaactcgttcgtgaagtatctttttgtcccaattttgattgatggagctttaagcttgcttttctgtatgcaataaaaaaacttatc

SEQ ID NO: 6300 - protein, 276 aa, Zea mays subsp. mays
  peptide (1)..(276): Ceres Seq. ID no. 12340797
  misc_feature (79)..(248): Pfam Name: Fumarylacetoacetate (FAA) hydrolase family Pfam Description: Fumarylacetoacetate (FAA) hydrolase family
  misc_feature (52)..(276): Homolog of NCBI NO: 34897304 NR Description: putative hydroxylase [Oryza sativa]
  misc_feature (52)..(239): Homolog of NCBI NO: 28372682 NR Description: putative isomerase [Oryza sativa (japonica
  misc_feature (50)..(275): Homolog of NCBI NO: 16209656 NR Description: AT4g15940/dl4011w [Arabidopsis thaliana]
  misc_feature (50)..(275): Homolog of NCBI NO: 15234757 NR Description: isomerase like protein; protein id: At4g15940.1, by cDNA: 40913., supported by cDNA: gi_16209655 [Arabidopsis
  misc_feature (50)..(270): Homolog of NCBI NO: 15228286 NR Description: putative decarboxilase; protein id: At3g16700.1,
  misc_feature (50)..(238): Homolog of NCBI NO: 7485073 NR Description: hypothetical protein - Arabidopsis thaliana
  misc_feature (64)..(273): Homolog of NCBI NO: 28829830 NR Description: similar to Arabidopsis thaliana (Mouse-ear AT4g15940/dl4011w (Isomerase like protein) [Dictyostelium
  misc_feature (45)..(269): Homolog of NCBI NO: 20072495 NR Description: RIKEN cDNA 1110025H10 gene [Mus musculus]
  misc_feature (50)..(269): Homolog of NCBI NO: 13654274 NR Description: hypothetical protein DKFZp566J2046 [Homo sapiens] hypothetical protein [Homo sapiens] >gi|21753214|dbj|BAC04308.1|
  misc_feature (50)..(269): Homolog of NCBI NO: 14336767 NR Description: similar to homoprotocatechuate catabolism
FLKKKSQSQQHKKGPQYRLARVVPPPTNSLLRQHHFIVDASGPPTMPAAMAAAAAQRLLAASTKIIGVGRNYIAHAKELGNPVPKEPVLFLKPTSSFLHAGVATAAVEIPEPLESLHHEVELAVVISRRGRDVPEASAMDFVGGYALALDMTARDLQSVAKSAGLPWTLAKGQDTFTPISAVVPKSAVTNPDDLELWLKVDDELRQKGPTSDMLFKIPFLISYISSIMTLMEGHVILTGTPEGVGPVRVGQKITAGITDLIDVEFDVQRRNRSFST

SEQ ID NO: 6301 - protein, 231 aa, Zea mays subsp. mays
  peptide (1)..(231): Ceres Seq. ID no. 12340798
  misc_feature (34)..(203): Pfam Name: Fumarylacetoacetate (FAA) hydrolase family Pfam Description: Fumarylacetoacetate (FAA) hydrolase family
  misc_feature (7)..(231): Homolog of NCBI NO: 34897304 NR Description: putative hydroxylase [Oryza sativa]
  misc_feature (7)..(194): Homolog of NCBI NO: 28372682 NR Description: putative isomerase [Oryza sativa (japonica
  misc_feature (5)..(230): Homolog of NCBI NO: 16209656 NR Description: AT4g15940/dl4011w [Arabidopsis thaliana]
  misc_feature (5)..(230): Homolog of NCBI NO: 15234757 NR Description: isomerase like protein; protein id: At4g15940.1, by cDNA: 40913., supported by cDNA: gi_16209655 [Arabidopsis
  misc_feature (5)..(225): Homolog of NCBI NO: 15228286 NR Description: putative decarboxilase; protein id: At3g16700.1,
  misc_feature (5)..(193): Homolog of NCBI NO: 7485073 NR Description: hypothetical protein - Arabidopsis thaliana
  misc_feature (19)..(228): Homolog of NCBI NO: 28829830 NR Description: similar to Arabidopsis thaliana (Mouse-ear AT4g15940/dl4011w (Isomerase like protein) [Dictyostelium
  misc_feature (1)..(224): Homolog of NCBI NO: 20072495 NR Description: RIKEN cDNA 1110025H10 gene [Mus musculus]
  misc_feature (5)..(224): Homolog of NCBI NO: 13654274 NR Description: hypothetical protein DKFZp566J2046 [Homo sapiens] hypothetical protein [Homo sapiens] >gi|21753214|dbj|BAC04308.1|
  misc_feature (5)..(224): Homolog of NCBI NO: 14336767 NR Description: similar to homoprotocatechuate catabolism
MPAAMAAAAAQRLLAASTKIIGVGRNYIAHAKELGNPVPKEPVLFLKPTSSFLHAGVATAAVEIPEPLESLHHEVELAVVISRRGRDVPEASAMDFVGGYALALDMTARDLQSVAKSAGLPWTLAKGQDTFTPISAVVPKSAVTNPDDLELWLKVDDELRQKGPTSDMLFKIPFLISYISSIMTLMEGHVILTGTPEGVGPVRVGQKITAGITDLIDVEFDVQRRNRSFST

SEQ ID NO: 6302 - protein, 227 aa, Zea mays subsp. mays
  peptide (1)..(227): Ceres Seq. ID no. 12340799
  misc_feature (30)..(199): Pfam Name: Fumarylacetoacetate (FAA) hydrolase family Pfam Description: Fumarylacetoacetate (FAA) hydrolase family
  misc_feature (3)..(227): Homolog of NCBI NO: 34897304 NR Description: putative hydroxylase [Oryza sativa]
  misc_feature (3)..(190): Homolog of NCBI NO: 28372682 NR Description: putative isomerase [Oryza sativa (japonica
  misc_feature (1)..(226): Homolog of NCBI NO: 16209656 NR Description: AT4g15940/dl4011w [Arabidopsis thaliana]
  misc_feature (1)..(226): Homolog of NCBI NO: 15234757 NR Description: isomerase like protein; protein id: At4g15940.1, by cDNA: 40913., supported by cDNA: gi_16209655 [Arabidopsis
  misc_feature (1)..(221): Homolog of NCBI NO: 15228286 NR Description: putative decarboxilase; protein id: At3g16700.1,
  misc_feature (1)..(189): Homolog of NCBI NO: 7485073 NR Description: hypothetical protein - Arabidopsis thaliana
  misc_feature (15)..(224): Homolog of NCBI NO: 28829830 NR Description: similar to Arabidopsis thaliana (Mouse-ear AT4g15940/dl4011w (Isomerase like protein) [Dictyostelium
  misc_feature (1)..(220): Homolog of NCBI NO: 20072495 NR Description: RIKEN cDNA 1110025H10 gene [Mus musculus]
  misc_feature (1)..(220): Homolog of NCBI NO: 13654274 NR Description: hypothetical protein DKFZp566J2046 [Homo sapiens] hypothetical protein [Homo sapiens] >gi|21753214|dbj|BAC04308.1|
  misc_feature (1)..(220): Homolog of NCBI NO: 14336767 NR Description: similar to homoprotocatechuate catabolism
MAAAAAQRLLAASTKIIGVGRNYIAHAKELGNPVPKEPVLFLKPTSSFLHAGVATAAVEIPEPLESLHHEVELAVVISRRGRDVPEASAMDFVGGYALALDMTARDLQSVAKSAGLPWTLAKGQDTFTPISAVVPKSAVTNPDDLELWLKVDDELRQKGPTSDMLFKIPFLISYISSIMTLMEGHVILTGTPEGVGPVRVGQKITAGITDLIDVEFDVQRRNRSFST

SEQ ID NO: 6303 - DNA, 860 bp, Zea mays subsp. mays
  misc_feature (1)..(860): Ceres Seq. ID no. 12353809
  misc_feature: MA Experiment ID: 108515 Result: Up-regulated in Transcription
  misc_feature: MA Experiment 108515 PARAMETER Experiment Name: Zm_2mM_SA_P Parameter: Age (day) Value: 8
  misc_feature: MA Experiment 108515 PARAMETER Experiment Name: Zm_2mM_SA_P Parameter: Organism Value: Zea mays
  misc_feature: MA Experiment 108515 PARAMETER Experiment Name: Zm_2mM_SA_P Parameter: Plant Line Value: 35A19
  misc_feature: MA Experiment 108515 PARAMETER Experiment Name: Zm_2mM_SA_P Parameter: Timepoint (hr) Value: 12
  misc_feature: MA Experiment 108515 PARAMETER Experiment Name: Zm_2mM_SA_P Parameter: Tissue Value: Aerial
  misc_feature: MA Experiment 108515 PARAMETER Experiment Name: Zm_2mM_SA_P Parameter: Treatment Value: 2mM SA vs. No Treatment
  misc_feature: MA Experiment ID: 108522 Result: Up-regulated in Transcription
  misc_feature: MA Experiment 108522 PARAMETER Experiment Name: Zm_42deg_Heat_P Parameter: Age (day) Value: 8
  misc_feature: MA Experiment 108522 PARAMETER Experiment Name: Zm_42deg_Heat_P Parameter: Organism Value: Zea mays
  misc_feature: MA Experiment 108522 PARAMETER Experiment Name: Zm_42deg_Heat_P Parameter: Plant Line Value: 35A19
  misc_feature: MA Experiment 108522 PARAMETER Experiment Name: Zm_42deg_Heat_P Parameter: Temperature (deg C) Value: 42 vs. 22
  misc_feature: MA Experiment 108522 PARAMETER Experiment Name: Zm_42deg_Heat_P Parameter: Timepoint (hr) Value: 1
  misc_feature: MA Experiment 108522 PARAMETER Experiment Name: Zm_42deg_Heat_P Parameter: Tissue Value: Aerial
  misc_feature: MA Experiment ID: 108523 Result: Up-regulated in Transcription
  misc_feature: MA Experiment 108523 PARAMETER Experiment Name: Zm_42deg_Heat_P Parameter: Age (day) Value: 8
  misc_feature: MA Experiment 108523 PARAMETER Experiment Name: Zm_42deg_Heat_P Parameter: Organism Value: Zea mays
  misc_feature: MA Experiment 108523 PARAMETER Experiment Name: Zm_42deg_Heat_P Parameter: Plant Line Value: 35A19
  misc_feature: MA Experiment 108523 PARAMETER Experiment Name: Zm_42deg_Heat_P Parameter: Temperature (deg C) Value: 42 vs. 22
  misc_feature: MA Experiment 108523 PARAMETER Experiment Name: Zm_42deg_Heat_P Parameter: Timepoint (hr) Value: 6
  misc_feature: MA Experiment 108523 PARAMETER Experiment Name: Zm_42deg_Heat_P Parameter: Tissue Value: Aerial
  misc_feature: MA Experiment ID: 108526 Result: Up-regulated in Transcription
  misc_feature: MA Experiment 108526 PARAMETER Experiment Name: Zm_5mM_NO_P Parameter: Age (day) Value: 8
  misc_feature: MA Experiment 108526 PARAMETER Experiment Name: Zm_5mM_NO_P Parameter: Organism Value: Zea mays
  misc_feature: MA Experiment 108526 PARAMETER Experiment Name: Zm_5mM_NO_P Parameter: Plant Line Value: 35A19
  misc_feature: MA Experiment 108526 PARAMETER Experiment Name: Zm_5mM_NO_P Parameter: Timepoint (hr) Value: 1
  misc_feature: MA Experiment 108526 PARAMETER Experiment Name: Zm_5mM_NO_P Parameter: Tissue Value: Aerial
  misc_feature: MA Experiment 108526 PARAMETER Experiment Name: Zm_5mM_NO_P Parameter: Treatment Value: 5mM NO vs. No Treatment
  misc_feature: MA Experiment ID: 108527 Result: Up-regulated in Transcription
  misc_feature: MA Experiment 108527 PARAMETER Experiment Name: Zm_5mM_NO_P Parameter: Age (day) Value: 8
  misc_feature: MA Experiment 108527 PARAMETER Experiment Name: Zm_5mM_NO_P Parameter: Organism Value: Zea mays
  misc_feature: MA Experiment 108527 PARAMETER Experiment Name: Zm_5mM_NO_P Parameter: Plant Line Value: 35A19
  misc_feature: MA Experiment 108527 PARAMETER Experiment Name: Zm_5mM_NO_P Parameter: Timepoint (hr) Value: 6
  misc_feature: MA Experiment 108527 PARAMETER Experiment Name: Zm_5mM_NO_P Parameter: Tissue Value: Aerial
  misc_feature: MA Experiment 108527 PARAMETER Experiment Name: Zm_5mM_NO_P Parameter: Treatment Value: 5mM NO vs. No Treatment
  misc_feature: MA Experiment ID: 108534 Result: Up-regulated in Transcription
  misc_feature: MA Experiment 108534 PARAMETER Experiment Name: Zm_4deg_Cold_P Parameter: Age (hr) Value: 8
  misc_feature: MA Experiment 108534 PARAMETER Experiment Name: Zm_4deg_Cold_P Parameter: Organism Value: Zea mays
  misc_feature: MA Experiment 108534 PARAMETER Experiment Name: Zm_4deg_Cold_P Parameter: Plant Line Value: 35A19
  misc_feature: MA Experiment 108534 PARAMETER Experiment Name: Zm_4deg_Cold_P Parameter: Temperature (deg C) Value: 4 vs. 22
  misc_feature: MA Experiment 108534 PARAMETER Experiment Name: Zm_4deg_Cold_P Parameter: Timepoint (hr) Value: 6
  misc_feature: MA Experiment 108534 PARAMETER Experiment Name: Zm_4deg_Cold_P Parameter: Tissue Value: Aerial
  misc_feature: MA Experiment ID: 108543 Result: Down-regulated in Transcription
  misc_feature: MA Experiment ID: 108544 Result: Down-regulated in Transcription
  misc_feature: MA Experiment ID: 108548 Result: Up-regulated in Transcription
  misc_feature: MA Experiment 108548 PARAMETER Experiment Name: Zm_20uM_KNO3_H-to-L_P Parameter: Age (day) Value: 11
  misc_feature: MA Experiment 108548 PARAMETER Experiment Name: Zm_20uM_KNO3_H-to-L_P Parameter: Organism Value: Zea mays
  misc_feature: MA Experiment 108548 PARAMETER Experiment Name: Zm_20uM_KNO3_H-to-L_P Parameter: Plant Line Value: 35A19
  misc_feature: MA Experiment 108548 PARAMETER Experiment Name: Zm_20uM_KNO3_H-to-L_P Parameter: Timepoint (hr) Value: 4
  misc_feature: MA Experiment 108548 PARAMETER Experiment Name: Zm_20uM_KNO3_H-to-L_P Parameter: Tissue Value: Roots
  misc_feature: MA Experiment 108548 PARAMETER Experiment Name: Zm_20uM_KNO3_H-to-L_P Parameter: Treatment Value: 20uM KNO3 vs. 60mM KNO3
  misc_feature: MA Experiment ID: 108556 Result: Up-regulated in Transcription
  misc_feature: MA Experiment 108556 PARAMETER Experiment Name: Zm_Drought_P Parameter: Age (day) Value: 9
  misc_feature: MA Experiment 108556 PARAMETER Experiment Name: Zm_Drought_P Parameter: Organism Value: Zea mays
  misc_feature: MA Experiment 108556 PARAMETER Experiment Name: Zm_Drought_P Parameter: Plant Line Value: 35A19
  misc_feature: MA Experiment 108556 PARAMETER Experiment Name: Zm_Drought_P Parameter: Timepoint (hr) Value: 24
  misc_feature: MA Experiment 108556 PARAMETER Experiment Name: Zm_Drought_P Parameter: Tissue Value: Aerial
  misc_feature: MA Experiment 108556 PARAMETER Experiment Name: Zm_Drought_P Parameter: Treatment Value: Drought vs. No Drought
  misc_feature: MA Experiment ID: 108687 Result: Up-regulated in Transcription
  misc_feature: MA Experiment 108687 PARAMETER Experiment Name: Zm_Embryos-Flowers__P Parameter: Tissue Value: Embryo vs. Aerial+
  misc_feature: MA Experiment ID: 108688 Result: Down-regulated in Transcription
  misc_feature: MA Experiment 108688 PARAMETER Experiment Name: Zm_Embryos-Flowers__P Parameter: Tissue Value: Immature Flowers vs. Aerial+
  misc_feature: MA Experiment ID: 20000478 Result: Up-regulated in Transcription
  misc_feature: MA Experiment 20000478 PARAMETER Experiment Name: Zm_5mM_SA_P Parameter: Age (day) Value: 11
  misc_feature: MA Experiment 20000478 PARAMETER Experiment Name: Zm_5mM_SA_P Parameter: Organism Value: Zea mays
  misc_feature: MA Experiment 20000478 PARAMETER Experiment Name: Zm_5mM_SA_P Parameter: Plant Line Value: 35A19
  misc_feature: MA Experiment 20000478 PARAMETER Experiment Name: Zm_5mM_SA_P Parameter: Timepoint (hr) Value: 72
  misc_feature: MA Experiment 20000478 PARAMETER Experiment Name: Zm_5mM_SA_P Parameter: Tissue Value: Aerial
  misc_feature: MA Experiment 20000478 PARAMETER Experiment Name: Zm_5mM_SA_P Parameter: Treatment Value: 5mM SA vs. No Treatment
  misc_feature: MA Experiment ID: 20000535 Result: Up-regulated in Transcription
  misc_feature: MA Experiment 20000535 PARAMETER Experiment Name: Zm_Hybrid_Seed_Dev_P Parameter: DAP Value: 30 vs. 12
  misc_feature: MA Experiment 20000535 PARAMETER Experiment Name: Zm_Hybrid_Seed_Dev_P Parameter: Organism Value: Zea mays
  misc_feature: MA Experiment 20000535 PARAMETER Experiment Name: Zm_Hybrid_Seed_Dev_P Parameter: Plant Line Value: 35A19
  misc_feature: MA Experiment 20000535 PARAMETER Experiment Name: Zm_Hybrid_Seed_Dev_P Parameter: Tissue Value: Embryo vs. Unfert Floret
  misc_feature: MA Experiment ID: 20000626 Result: Up-regulated in Transcription
  misc_feature: MA Experiment 20000626 PARAMETER Experiment Name: Zm_Herbicide-Treatments_P Parameter: Timepoint (hr) Value: 12
  misc_feature: MA Experiment 20000626 PARAMETER Experiment Name: Zm_Herbicide-Treatments_P Parameter: Tissue Value: Aerial
  misc_feature: MA Experiment 20000626 PARAMETER Experiment Name: Zm_Herbicide-Treatments_P Parameter: Treatment Value: Roundup vs. No Treatment
catccaaaaaaccagaagctagaagcctagaacagccaagaaaagccgaaacaacaacaatcccaatcccccccccccccccgcccnntgtcactcaaaactcgaccaacaatgtcgctgattcgccgtggaagcgcattcgaccccttctccctcgacctctgggaccccttccagggctttcccttcggctctggaagcagcagcagcagcagcctgttcccctcgttcggaggcaccaccaccagctcggagacggccgccttcgccggcgctcgcgtcgactggaaggagacgccggaggcgcacgtgttcaagaccgacgtgccggggctgaagaaggaggaggttaaggtggagctggaggacggcaacgtgctccagatcagcggcgagcgcagcaaggagcaggaggagaagagggacacctggcaccgcgtggagcgcagcagcggcaagttcctgcgcaggttccgcctgccggagaacgccaggacggagcagatcagtgcgtccatggagaacggcgtgctcaccgtcaccgtgcctaaggaggaggccaagaaggccgacgtcaagtctatccagatctccggctagtatgctcaagctcacaaccgatggtgtgccgtcttcgtcttgtcttcacatgccgggggtccataaaatgccagcgtccgtgtaatgtacttgtcacagtgtcagtgtattgtactggtatcatggttgtcttgagtagcgtgtgttgtggctattgtgttccgaacgatattgaagtctcatccgtcgtgtatcagtgtcgtctgtaacgaacccagttttaaaacatttcgaagtgagttgcttggtactcgtaaact

SEQ ID NO: 6304 - protein, 162 aa, Zea mays subsp. mays
  peptide (1)..(162): Ceres Seq. ID no. 12353810
  misc_feature (1)..(162): Homolog of NCBI NO: 34902026 NR Description: unknown protein [Oryza sativa (japonica
  misc_feature (1)..(162): Homolog of NCBI NO: 34902016 NR Description: putative class I low-molecular-weight heat shock
  misc_feature (1)..(162): Homolog of NCBI NO: 7441293 NR Description: heat shock protein 17.9 - pearl millet
  misc_feature (1)..(162): Homolog of NCBI NO: 2119194 NR Description: low-molecular-weight heat-shock protein - rice
  misc_feature (1)..(162): Homolog of NCBI NO: 34902028 NR Description: shock protein, low molecular weight [Oryza sativa
  misc_feature (1)..(162): Homolog of NCBI NO: 1213073 NR Description: heat shock protein 17.8 [Oryza sativa]
  misc_feature (1)..(162): Homolog of NCBI NO: 34902024 NR Description: unknown protein [Oryza sativa (japonica >gi|1815660|gb|AAC78392.1| low molecular mass heat shock protein [Oryza sativa] >gi|29893628|gb|AAP06882.1| unknown protein [Oryza
  misc_feature (1)..(162): Homolog of NCBI NO: 399937 NR Description: 17.4 KD CLASS I HEAT SHOCK PROTEIN
  misc_feature (1)..(162): Homolog of NCBI NO: 422000 NR Description: heat shock protein, low molecular weight (clone - rice >gi|169801|gb|AAB46378.1| LMW heat shock protein [Oryza
  misc_feature (1)..(162): Homolog of NCBI NO: 25044839 NR Description: class-1 LMW heat shock protein [Ananas comosus]
MSLIRRGSAFDPFSLDLWDPFQGFPFGSGSSSSSSLFPSFGGTTTSSETAAFAGARVDWKETPEAHVFKTDVPGLKKEEVKVELEDGNVLQISGERSKEQEEKRDTWHRVERSSGKFLRRFRLPENARTEQISASMENGVLTVTVPKEEAKKADVKSIQISG

SEQ ID NO: 6305 - protein, 116 aa, Zea mays subsp. mays
  peptide (1)..(116): Ceres Seq. ID no. 12353811
  misc_feature (29)..(29): Xaa is any aa, unknown or other
SKKPEARSLEQPRKAETTTIPIPPPPPPXVTQNSTNNVADSPWKRIRPLLPRPLGPLPGLSLRLWKQQQQQPVPLVRRHHHQLGDGRLRRRSRRLEGDAGGARVQDRRAGAEEGGG

SEQ ID NO: 6306 - DNA, 1713 bp, Zea mays subsp. mays
  misc_feature (1)..(1713): Ceres Seq. ID no. 12566201
  misc_feature: MA Experiment ID: 108529 Result: Down-regulated in Transcription
  misc_feature: MA Experiment 108529 PARAMETER Experiment Name: Zm_Imbibed_Seeds_P Parameter: Age (day) Value: 5 vs. 2
  misc_feature: MA Experiment 108529 PARAMETER Experiment Name: Zm_Imbibed_Seeds_P Parameter: Organism Value: Zea mays
  misc_feature: MA Experiment 108529 PARAMETER Experiment Name: Zm_Imbibed_Seeds_P Parameter: Plant Line Value: 35A19
  misc_feature: MA Experiment 108529 PARAMETER Experiment Name: Zm_Imbibed_Seeds_P Parameter: Tissue Value: Roots vs. Embryo
  misc_feature: MA Experiment ID: 108535 Result: Down-regulated in Transcription
  misc_feature: MA Experiment 108535 PARAMETER Experiment Name: Zm_Meristem_P Parameter: Age (day) Value: 8
  misc_feature: MA Experiment 108535 PARAMETER Experiment Name: Zm_Meristem_P Parameter: Organism Value: Zea mays
  misc_feature: MA Experiment 108535 PARAMETER Experiment Name: Zm_Meristem_P Parameter: Plant Line Value: 35A19
  misc_feature: MA Experiment 108535 PARAMETER Experiment Name: Zm_Meristem_P Parameter: Tissue Value: Root Meristem vs. Above Root Meristem
  misc_feature: MA Experiment ID: 108545 Result: Up-regulated in Transcription
  misc_feature: MA Experiment 108545 PARAMETER Experiment Name: Zm_Imbibed_Seeds_P Parameter: Age (day) Value: 3 vs. 2
  misc_feature: MA Experiment 108545 PARAMETER Experiment Name: Zm_Imbibed_Seeds_P Parameter: Organism Value: Zea mays
  misc_feature: MA Experiment 108545 PARAMETER Experiment Name: Zm_Imbibed_Seeds_P Parameter: Plant Line Value: 35A19
  misc_feature: MA Experiment 108545 PARAMETER Experiment Name: Zm_Imbibed_Seeds_P Parameter: Tissue Value: Aerial vs. Embryo
  misc_feature: MA Experiment ID: 108546 Result: Down-regulated in Transcription
  misc_feature: MA Experiment 108546 PARAMETER Experiment Name: Zm_Imbibed_Seeds_P Parameter: Age (day) Value: 3 vs. 2
  misc_feature: MA Experiment 108546 PARAMETER Experiment Name: Zm_Imbibed_Seeds_P Parameter: Organism Value: Zea mays
  misc_feature: MA Experiment 108546 PARAMETER Experiment Name: Zm_Imbibed_Seeds_P Parameter: Plant Line Value: 35A19
  misc_feature: MA Experiment 108546 PARAMETER Experiment Name: Zm_Imbibed_Seeds_P Parameter: Tissue Value: Roots vs. Embryo
  misc_feature: MA Experiment ID: 108547 Result: Up-regulated in Transcription
  misc_feature: MA Experiment 108547 PARAMETER Experiment Name: Zm_Imbibed_Seeds_P Parameter: Age (day) Value: 4 vs. 2
  misc_feature: MA Experiment 108547 PARAMETER Experiment Name: Zm_Imbibed_Seeds_P Parameter: Organism Value: Zea mays
  misc_feature: MA Experiment 108547 PARAMETER Experiment Name: Zm_Imbibed_Seeds_P Parameter: Plant Line Value: 35A19
  misc_feature: MA Experiment 108547 PARAMETER Experiment Name: Zm_Imbibed_Seeds_P Parameter: Tissue Value: Aerial vs. Embryo
  misc_feature: MA Experiment ID: 108689 Result: Up-regulated in Transcription
  misc_feature: MA Experiment 108689 PARAMETER Experiment Name: Zm_Drought_Roots_P Parameter: Age (day) Value: 9
  misc_feature: MA Experiment 108689 PARAMETER Experiment Name: Zm_Drought_Roots_P Parameter: Organism Value: Zea mays
  misc_feature: MA Experiment 108689 PARAMETER Experiment Name: Zm_Drought_Roots_P Parameter: Plant Line Value: 35A19
  misc_feature: MA Experiment 108689 PARAMETER Experiment Name: Zm_Drought_Roots_P Parameter: Timepoint (hr) Value: 24
  misc_feature: MA Experiment 108689 PARAMETER Experiment Name: Zm_Drought_Roots_P Parameter: Tissue Value: Roots
  misc_feature: MA Experiment 108689 PARAMETER Experiment Name: Zm_Drought_Roots_P Parameter: Treatment Value: Drought vs. No Drought
  misc_feature: MA Experiment ID: 20000479 Result: Down-regulated in Transcription
  misc_feature: MA Experiment 20000479 PARAMETER Experiment Name: Zm_Drought_P Parameter: Age (day) Value: 10
  misc_feature: MA Experiment 20000479 PARAMETER Experiment Name: Zm_Drought_P Parameter: Organism Value: Zea mays
  misc_feature: MA Experiment 20000479 PARAMETER Experiment Name: Zm_Drought_P Parameter: Plant Line Value: 35A19
  misc_feature: MA Experiment 20000479 PARAMETER Experiment Name: Zm_Drought_P Parameter: Timepoint (hr) Value: 48
  misc_feature: MA Experiment 20000479 PARAMETER Experiment Name: Zm_Drought_P Parameter: Tissue Value: Aerial
  misc_feature: MA Experiment 20000479 PARAMETER Experiment Name: Zm_Drought_P Parameter: Treatment Value: Drought vs. No Drought
  misc_feature: MA Experiment ID: 20000480 Result: Down-regulated in Transcription
  misc_feature: MA Experiment 20000480 PARAMETER Experiment Name: Zm_Drought_P Parameter: Age (day) Value: 11
  misc_feature: MA Experiment 20000480 PARAMETER Experiment Name: Zm_Drought_P Parameter: Organism Value: Zea mays
  misc_feature: MA Experiment 20000480 PARAMETER Experiment Name: Zm_Drought_P Parameter: Plant Line Value: 35A19
  misc_feature: MA Experiment 20000480 PARAMETER Experiment Name: Zm_Drought_P Parameter: Timepoint (hr) Value: 72
  misc_feature: MA Experiment 20000480 PARAMETER Experiment Name: Zm_Drought_P Parameter: Tissue Value: Aerial
  misc_feature: MA Experiment 20000480 PARAMETER Experiment Name: Zm_Drought_P Parameter: Treatment Value: Drought vs. No Drought
  misc_feature: MA Experiment ID: 20000626 Result: Down-regulated in Transcription
  misc_feature: MA Experiment 20000626 PARAMETER Experiment Name: Zm_Herbicide-Treatments_P Parameter: Timepoint (hr) Value: 12
  misc_feature: MA Experiment 20000626 PARAMETER Experiment Name: Zm_Herbicide-Treatments_P Parameter: Tissue Value: Aerial
  misc_feature: MA Experiment 20000626 PARAMETER Experiment Name: Zm_Herbicide-Treatments_P Parameter: Treatment Value: Roundup vs. No Treatment
gcacgagaccattacctagaacatcctaatcgaaaattcttcgctcacaccacgtacgatacgagcctcaccagcgccggcgctgtagtgtgcagccctcctcctggatctctgcacccttcggaggccactcctcgcgcgcgcgcgcgcgcggacatggaggtcgaataccacgaggtgagaggagttcggtctgctccgcgcaatgcggcgggcgaagacttatcttctccttattttccgccggccgggccttggatcgtccttgctgatcatctccgtttcggtgcgcttcttcctcctcctcctcctcctccttcggtcgcggaaacgccatggatggatggatgggacgggctagcaggagtacgtgcggagctcgagaggcgtgcagctattcacctgcggctggctgcccgctgccgcatcgcccaaggcgctcgtcttcctctgccacggctacggcatggagtgcagtggcttcatgagagaatgcggcgtgcggctggcggcggccgggtacggcgtgttcgggatggactacgagggccacggcaagtcgatgggcgcgcgctgctacatccgcagtttccgccgcctcgtcgacgactgcggccatttcttcaagtccgtctgcggtgggtcctgtatttcccgatcagaccacactctctctctgataccggctctctgaaccctgtttttttcctgcctcgacgcagagcttgaggagtaccggggcaagagccggttcctgtacggcgagtccatgggtggcgcggtggcgctgctgctgcacaccgaggaccccgccttctgggacggcgccgtcctcgtggcgcccatgtgcaagatatcggagaaggtgaagccgcaccctctggtgatcacgctcctgacgcaggtggaggacgtgatccccaggtggaagatcgtgcccaccaagcaggacgtcatcgacgccgccttcaaggaccccgtcaagcgtgaaaagatcaggaggaaccagctgatctaccaggacaagccgcggctcaagactgcgctggagatgctcagggccagcatgtacatagaagacagcttgtcacaggtgacgctgccgttcttcgtcctgcacggcgaggccgacacggtgacggacccggaggtgagccgcgcgctgtacgagcgttcggccagcgccgacaagaccatcaagctgtacccggggatgtggcacggcctcaccgccggggagcccgacgagaacgtggaggccatcttctccgacatcgtgtcctggctcaaccaccgcagccggagctgggccgtggaggaacgccatatgaccaggaagctggcgccagctccggccaagtccatcgaaggccacggcaccgtggacggcaaagtgcacacacaacaagggcgccctcggcggcgccagggcttcctctgcgggcttgccggccggacgcatcaccacgcggagatgtgaaagatagaatcgccgtctcggtcccggatcagatgggcgcctgctttcttcaaccatggcaaataaaggaatgatgacctgcggtttataatatagaggtcttattatgcttgtcaaagttatgtatgaccaatcattcccagtctggtgcagattcaaactcatgctcagatatatgtaatgtaagattataacgctattagcattctggataacccgttaacaatgacatt

SEQ ID NO: 6307 - protein, 242 aa, Zea mays subsp. mays
  peptide (1)..(242): Ceres Seq. ID no. 12566202
ARDHYLEHPNRKFFAHTTYDTSLTSAGAVVCSPPPGSLHPSEATPRARARADMEVEYHEVRGVRSAPRNAAGEDLSSPYFPPAGPWIVLADHLRFGALLPPPPPPPSVAETPWMDGWDGLAGVRAELERRAAIHLRLAARCRIAQGARLPLPRLRHGVQWLHERMRRAAGGGRVRRVRDGLRGPRQVDGRALLHPQFPPPRRRLRPFLQVRLRWVLYFPIRPHSLSDTGSLNPVFFLPRRRA

SEQ ID NO: 6308 - protein, 236 aa, Zea mays subsp. mays
  peptide (1)..(236): Ceres Seq. ID no. 12566203
  misc_feature (1)..(167): Pfam Name: alpha/beta hydrolase fold Pfam Description: alpha/beta hydrolase fold
  misc_feature (1)..(236): Homolog of NCBI NO: 30695682 NR Description: esterase/lipase/thioesterase family [Arabidopsis
  misc_feature (1)..(229): Homolog of NCBI NO: 18407407 NR Description: putative phospholipase; protein id: At2g47630.1, by cDNA: 33373., supported by cDNA: gi_16323213 [Arabidopsis >gi|16323214|gb|AAL15341.1| At2g47630/F17A22.2 [Arabidopsis
  misc_feature (1)..(236): Homolog of NCBI NO: 34894592 NR Description: phospholipase-like protein [Oryza sativa
  misc_feature (1)..(229): Homolog of NCBI NO: 21592863 NR Description: putative phospholipase [Arabidopsis thaliana]
  misc_feature (1)..(229): Homolog of NCBI NO: 7487574 NR Description: probable phospholipase [imported] - Arabidopsis
  misc_feature (1)..(176): Homolog of NCBI NO: 7487948 NR Description: lysophospholipase homolog F12L6.8 - Arabidopsis >gi|3355471|gb|AAC27833.1| putative phospholipase [Arabidopsis >gi|13877687|gb|AAK43921.1|AF370602_1 putative phospholipase
  misc_feature (1)..(176): Homolog of NCBI NO: 30687883 NR Description: esterase/lipase/thioesterase family [Arabidopsis >gi|19423964|gb|AAL87258.1| putative phospholipase [Arabidopsis >gi|21689759|gb|AAM67523.1| putative phospholipase [Arabidopsis
  misc_feature (1)..(177): Homolog of NCBI NO: 30687879 NR Description: hydrolase, alpha/beta fold family [Arabidopsis >gi|20197113|gb|AAC27832.2| putative phospholipase; alternative
  misc_feature (1)..(177): Homolog of NCBI NO: 7487947 NR Description: lysophospholipase homolog F12L6.7 - Arabidopsis
  misc_feature (1)..(177): Homolog of NCBI NO: 15233200 NR Description: lipase -like protein; protein id: At3g55180.1
MGGAVALLLHTEDPAFWDGAVLVAPMCKISEKVKPHPLVITLLTQVEDVIPRWKIVPTKQDVIDAAFKDPVKREKIRRNQLIYQDKPRLKTALEMLRASMYIEDSLSQVTLPFFVLHGEADTVTDPEVSRALYERSASADKTIKLYPGMWHGLTAGEPDENVEAIFSDIVSWLNHRSRSWAVEERHMTRKLAPAPAKSIEGHGTVDGKVHTQQGRPRRRQGFLCGLAGRTHHHAEM

SEQ ID NO: 6309 - protein, 211 aa, Zea mays subsp. mays
  peptide (1)..(211): Ceres Seq. ID no. 12566204
  misc_feature (1)..(142): Pfam Name: alpha/beta hydrolase fold Pfam Description: alpha/beta hydrolase fold
  misc_feature (1)..(211): Homolog of NCBI NO: 30695682 NR Description: esterase/lipase/thioesterase family [Arabidopsis
  misc_feature (1)..(204): Homolog of NCBI NO: 18407407 NR Description: putative phospholipase; protein id: At2g47630.1, by cDNA: 33373., supported by cDNA: gi_16323213 [Arabidopsis >gi|16323214|gb|AAL15341.1| At2g47630/F17A22.2 [Arabidopsis
  misc_feature (1)..(211): Homolog of NCBI NO: 34894592 NR Description: phospholipase-like protein [Oryza sativa
  misc_feature (1)..(204): Homolog of NCBI NO: 21592863 NR Description: putative phospholipase [Arabidopsis thaliana]
  misc_feature (1)..(204): Homolog of NCBI NO: 7487574 NR Description: probable phospholipase [imported] - Arabidopsis
  misc_feature (1)..(151): Homolog of NCBI NO: 7487948 NR Description: lysophospholipase homolog F12L6.8 - Arabidopsis >gi|3355471|gb|AAC27833.1| putative phospholipase [Arabidopsis >gi|13877687|gb|AAK43921.1|AF370602_1 putative phospholipase
  misc_feature (1)..(151): Homolog of NCBI NO: 30687883 NR Description: esterase/lipase/thioesterase family [Arabidopsis >gi|19423964|gb|AAL87258.1| putative phospholipase [Arabidopsis >gi|21689759|gb|AAM67523.1| putative phospholipase [Arabidopsis
  misc_feature (1)..(152): Homolog of NCBI NO: 30687879 NR Description: hydrolase, alpha/beta fold family [Arabidopsis >gi|20197113|gb|AAC27832.2| putative phospholipase; alternative
  misc_feature (1)..(152): Homolog of NCBI NO: 7487947 NR Description: lysophospholipase homolog F12L6.7 - Arabidopsis
  misc_feature (1)..(152): Homolog of NCBI NO: 15233200 NR Description: lipase -like protein; protein id: At3g55180.1
MCKISEKVKPHPLVITLLTQVEDVIPRWKIVPTKQDVIDAAFKDPVKREKIRRNQLIYQDKPRLKTALEMLRASMYIEDSLSQVTLPFFVLHGEADTVTDPEVSRALYERSASADKTIKLYPGMWHGLTAGEPDENVEAIFSDIVSWLNHRSRSWAVEERHMTRKLAPAPAKSIEGHGTVDGKVHTQQGRPRRRQGFLCGLAGRTHHHAEM

SEQ ID NO: 6310 - DNA, 1059 bp, Zea mays subsp. mays
  misc_feature (1)..(1059): Ceres Seq. ID no. 12409142
  misc_feature: MA Experiment ID: 108523 Result: Up-regulated in Transcription
  misc_feature: MA Experiment 108523 PARAMETER Experiment Name: Zm_42deg_Heat_P Parameter: Age (day) Value: 8
  misc_feature: MA Experiment 108523 PARAMETER Experiment Name: Zm_42deg_Heat_P Parameter: Organism Value: Zea mays
  misc_feature: MA Experiment 108523 PARAMETER Experiment Name: Zm_42deg_Heat_P Parameter: Plant Line Value: 35A19
  misc_feature: MA Experiment 108523 PARAMETER Experiment Name: Zm_42deg_Heat_P Parameter: Temperature (deg C) Value: 42 vs. 22
  misc_feature: MA Experiment 108523 PARAMETER Experiment Name: Zm_42deg_Heat_P Parameter: Timepoint (hr) Value: 6
  misc_feature: MA Experiment 108523 PARAMETER Experiment Name: Zm_42deg_Heat_P Parameter: Tissue Value: Aerial
  misc_feature: MA Experiment ID: 108527 Result: Up-regulated in Transcription
  misc_feature: MA Experiment 108527 PARAMETER Experiment Name: Zm_5mM_NO_P Parameter: Age (day) Value: 8
  misc_feature: MA Experiment 108527 PARAMETER Experiment Name: Zm_5mM_NO_P Parameter: Organism Value: Zea mays
  misc_feature: MA Experiment 108527 PARAMETER Experiment Name: Zm_5mM_NO_P Parameter: Plant Line Value: 35A19
  misc_feature: MA Experiment 108527 PARAMETER Experiment Name: Zm_5mM_NO_P Parameter: Timepoint (hr) Value: 6
  misc_feature: MA Experiment 108527 PARAMETER Experiment Name: Zm_5mM_NO_P Parameter: Tissue Value: Aerial
  misc_feature: MA Experiment 108527 PARAMETER Experiment Name: Zm_5mM_NO_P Parameter: Treatment Value: 5mM NO vs. No Treatment
  misc_feature: MA Experiment ID: 108528 Result: Up-regulated in Transcription
  misc_feature: MA Experiment 108528 PARAMETER Experiment Name: Zm_Imbibed_Seeds_P Parameter: Age (day) Value: 5 vs. 2
  misc_feature: MA Experiment 108528 PARAMETER Experiment Name: Zm_Imbibed_Seeds_P Parameter: Organism Value: Zea mays
  misc_feature: MA Experiment 108528 PARAMETER Experiment Name: Zm_Imbibed_Seeds_P Parameter: Plant Line Value: 35A19
  misc_feature: MA Experiment 108528 PARAMETER Experiment Name: Zm_Imbibed_Seeds_P Parameter: Tissue Value: Aerial vs. Embryo
  misc_feature: MA Experiment ID: 108536 Result: Up-regulated in Transcription
  misc_feature: MA Experiment 108536 PARAMETER Experiment Name: Zm_Meristem_P Parameter: Age (day) Value: 8
  misc_feature: MA Experiment 108536 PARAMETER Experiment Name: Zm_Meristem_P Parameter: Organism Value: Zea mays
  misc_feature: MA Experiment 108536 PARAMETER Experiment Name: Zm_Meristem_P Parameter: Plant Line Value: 35A19
  misc_feature: MA Experiment 108536 PARAMETER Experiment Name: Zm_Meristem_P Parameter: Tissue Value: Shoot Meristem vs. Above Shoot Meristem
  misc_feature: MA Experiment ID: 108559 Result: Up-regulated in Transcription
  misc_feature: MA Experiment 108559 PARAMETER Experiment Name: Zm_5mM_NO_P Parameter: Age (day) Value: 8
  misc_feature: MA Experiment 108559 PARAMETER Experiment Name: Zm_5mM_NO_P Parameter: Organism Value: Zea mays
  misc_feature: MA Experiment 108559 PARAMETER Experiment Name: Zm_5mM_NO_P Parameter: Plant Line Value: 35A19
  misc_feature: MA Experiment 108559 PARAMETER Experiment Name: Zm_5mM_NO_P Parameter: Timepoint (hr) Value: 12
  misc_feature: MA Experiment 108559 PARAMETER Experiment Name: Zm_5mM_NO_P Parameter: Tissue Value: Aerial
  misc_feature: MA Experiment 108559 PARAMETER Experiment Name: Zm_5mM_NO_P Parameter: Treatment Value: 5mM NO vs. No Treatment
  misc_feature: MA Experiment ID: 108689 Result: Down-regulated in Transcription
  misc_feature: MA Experiment 108689 PARAMETER Experiment Name: Zm_Drought_Roots_P Parameter: Age (day) Value: 9
  misc_feature: MA Experiment 108689 PARAMETER Experiment Name: Zm_Drought_Roots_P Parameter: Organism Value: Zea mays
  misc_feature: MA Experiment 108689 PARAMETER Experiment Name: Zm_Drought_Roots_P Parameter: Plant Line Value: 35A19
  misc_feature: MA Experiment 108689 PARAMETER Experiment Name: Zm_Drought_Roots_P Parameter: Timepoint (hr) Value: 24
  misc_feature: MA Experiment 108689 PARAMETER Experiment Name: Zm_Drought_Roots_P Parameter: Tissue Value: Roots
  misc_feature: MA Experiment 108689 PARAMETER Experiment Name: Zm_Drought_Roots_P Parameter: Treatment Value: Drought vs. No Drought
  misc_feature: MA Experiment ID: 20000478 Result: Down-regulated in Transcription
  misc_feature: MA Experiment 20000478 PARAMETER Experiment Name: Zm_5mM_SA_P Parameter: Age (day) Value: 11
  misc_feature: MA Experiment 20000478 PARAMETER Experiment Name: Zm_5mM_SA_P Parameter: Organism Value: Zea mays
  misc_feature: MA Experiment 20000478 PARAMETER Experiment Name: Zm_5mM_SA_P Parameter: Plant Line Value: 35A19
  misc_feature: MA Experiment 20000478 PARAMETER Experiment Name: Zm_5mM_SA_P Parameter: Timepoint (hr) Value: 72
  misc_feature: MA Experiment 20000478 PARAMETER Experiment Name: Zm_5mM_SA_P Parameter: Tissue Value: Aerial
  misc_feature: MA Experiment 20000478 PARAMETER Experiment Name: Zm_5mM_SA_P Parameter: Treatment Value: 5mM SA vs. No Treatment
  misc_feature: MA Experiment ID: 20000532 Result: Up-regulated in Transcription
  misc_feature: MA Experiment 20000532 PARAMETER Experiment Name: Zm_0.001percent_MeJA_P Parameter: Age (day) Value: 10
  misc_feature: MA Experiment 20000532 PARAMETER Experiment Name: Zm_0.001percent_MeJA_P Parameter: Organism Value: Zea mays
  misc_feature: MA Experiment 20000532 PARAMETER Experiment Name: Zm_0.001percent_MeJA_P Parameter: Plant Line Value: 35A19
  misc_feature: MA Experiment 20000532 PARAMETER Experiment Name: Zm_0.001percent_MeJA_P Parameter: Timepoint (hr) Value: 48
  misc_feature: MA Experiment 20000532 PARAMETER Experiment Name: Zm_0.001percent_MeJA_P Parameter: Tissue Value: Aerial
  misc_feature: MA Experiment 20000532 PARAMETER Experiment Name: Zm_0.001percent_MeJA_P Parameter: Treatment Value: 0.001percent MeJA vs. No Treatment
  misc_feature: MA Experiment ID: 20000533 Result: Up-regulated in Transcription
  misc_feature: MA Experiment 20000533 PARAMETER Experiment Name: Zm_0.001percent_MeJA_P Parameter: Age (day) Value: 11
  misc_feature: MA Experiment 20000533 PARAMETER Experiment Name: Zm_0.001percent_MeJA_P Parameter: Organism Value: Zea mays
  misc_feature: MA Experiment 20000533 PARAMETER Experiment Name: Zm_0.001percent_MeJA_P Parameter: Plant Line Value: 35A19
  misc_feature: MA Experiment 20000533 PARAMETER Experiment Name: Zm_0.001percent_MeJA_P Parameter: Timepoint (hr) Value: 72
  misc_feature: MA Experiment 20000533 PARAMETER Experiment Name: Zm_0.001percent_MeJA_P Parameter: Tissue Value: Aerial
  misc_feature: MA Experiment 20000533 PARAMETER Experiment Name: Zm_0.001percent_MeJA_P Parameter: Treatment Value: 0.001percent MeJA vs. No Treatment
  misc_feature: MA Experiment ID: 20000626 Result: Up-regulated in Transcription
  misc_feature: MA Experiment 20000626 PARAMETER Experiment Name: Zm_Herbicide-Treatments_P Parameter: Timepoint (hr) Value: 12
  misc_feature: MA Experiment 20000626 PARAMETER Experiment Name: Zm_Herbicide-Treatments_P Parameter: Tissue Value: Aerial
  misc_feature: MA Experiment 20000626 PARAMETER Experiment Name: Zm_Herbicide-Treatments_P Parameter: Treatment Value: Roundup vs. No Treatment
acactcttgccctctagctctagcagcagcagccaaagccatggaggcgagcggcatgaagctccgccggacgttcctcctcaccctactgctggtgctctccaccgccgtgacgcccatcctctcgctgcctgcagacaacgtggtagcctgcgactgcgacaagcccaaggcgcccaagccgtcgcactcgcgcccgcccaagacgaccaagccctcccacccgtcgccgaaacccgagaacccgaagccacccaagggccccgcgtacccggcggcggggcacccaccgcctaagagcccctcctacccaccggtcgtaggcccacccgtcacgcgcccgccggtcgtcggaccgccagtgacctacccgccgattaccggttctccgacgacgccgccggtcatcggcccaccggtcacgcgcccgccggtcgtcggaccaccggtgacctacccgccgatcaccggccctccgtcgacgccgcttccggtcaccggcccgcccgtgacctacccacccggcggaggcgggggcagctcgacgccgtgcccgccgccaccgccactgccgacgtgcccggcggactcgctgaagctgggcgcgtgcgtggacctgctgggcgggctggtgcacgtcggcctcggcgaccccgtggtgaaccagtgctgcccggtgctggaggggctggtggagctggaggcggccgtgtgcctgtgcaccaccatcaagctcaggctcctcaacgtcaacctgtacctgcccctggcgctccagctcctcctcacctgcggcaagacgccgccgccgggctacacctgcaccgtctgactgacgtcctcgatcggttagctagcgcctagcggcatagtagcagcagcccatgcattatccgtccatgcacatgcatgtacgtagctatgccttatgctatgcatgcatctctctgcaagtggttgctgtctgctgcatggtggaagactcgagagctactagctagctagtagagagtagagacgtcgtgttgttgttgcatgcaatgcatatgcgtgccttcg

SEQ ID NO: 6311 - protein, 276 aa, Zea mays subsp. mays
  peptide (1)..(276): Ceres Seq. ID no. 12409143
  misc_feature (193)..(274): Pfam Name: Protease inhibitor/seed storage/LTP family Pfam Description: Protease inhibitor/seed storage/LTP family
  misc_feature (56)..(274): Homolog of NCBI NO: 11994732 NR Description: contains similarity to cell wall-plasma membrane
  misc_feature (56)..(274): Homolog of NCBI NO: 15233282 NR Description: unknown protein; protein id: At3g22120.1
  misc_feature (56)..(274): Homolog of NCBI NO: 7446482 NR Description: probable cell wall-plasma membrane linker protein
  misc_feature (56)..(274): Homolog of NCBI NO: 25453525 NR Description: cell wall-plasma membrane linker protein homolog
  misc_feature (43)..(276): Homolog of NCBI NO: 18396941 NR Description: expressed protein; protein id: At2g10940.1, by cDNA: 32647., supported by cDNA: gi_17473864 [Arabidopsis >gi|25411373|pir||G84494 hypothetical protein At2g10940
HSCPLALAAAAKAMEASGMKLRRTFLLTLLLVLSTAVTPILSLPADNVVACDCDKPKAPKPSHSRPPKTTKPSHPSPKPENPKPPKGPAYPAAGHPPPKSPSYPPVVGPPVTRPPVVGPPVTYPPITGSPTTPPVIGPPVTRPPVVGPPVTYPPITGPPSTPLPVTGPPVTYPPGGGGGSSTPCPPPPPLPTCPADSLKLGACVDLLGGLVHVGLGDPVVNQCCPVLEGLVELEAAVCLCTTIKLRLLNVNLYLPLALQLLLTCGKTPPPGYTCTV

SEQ ID NO: 6312 - protein, 263 aa, Zea mays subsp. mays
  peptide (1)..(263): Ceres Seq. ID no. 12409144
  misc_feature (180)..(261): Pfam Name: Protease inhibitor/seed storage/LTP family Pfam Description: Protease inhibitor/seed storage/LTP family
  misc_feature (43)..(261): Homolog of NCBI NO: 11994732 NR Description: contains similarity to cell wall-plasma membrane
  misc_feature (43)..(261): Homolog of NCBI NO: 15233282 NR Description: unknown protein; protein id: At3g22120.1
  misc_feature (43)..(261): Homolog of NCBI NO: 7446482 NR Description: probable cell wall-plasma membrane linker protein
  misc_feature (43)..(261): Homolog of NCBI NO: 25453525 NR Description: cell wall-plasma membrane linker protein homolog
  misc_feature (30)..(263): Homolog of NCBI NO: 18396941 NR Description: expressed protein; protein id: At2g10940.1, by cDNA: 32647., supported by cDNA: gi_17473864 [Arabidopsis >gi|25411373|pir||G84494 hypothetical protein At2g10940
MEASGMKLRRTFLLTLLLVLSTAVTPILSLPADNVVACDCDKPKAPKPSHSRPPKTTKPSHPSPKPENPKPPKGPAYPAAGHPPPKSPSYPPVVGPPVTRPPVVGPPVTYPPITGSPTTPPVIGPPVTRPPVVGPPVTYPPITGPPSTPLPVTGPPVTYPPGGGGGSSTPCPPPPPLPTCPADSLKLGACVDLLGGLVHVGLGDPVVNQCCPVLEGLVELEAAVCLCTTIKLRLLNVNLYLPLALQLLLTCGKTPPPGYTCTV

SEQ ID NO: 6313 - protein, 258 aa, Zea mays subsp. mays
  peptide (1)..(258): Ceres Seq. ID no. 12409145
  misc_feature (175)..(256): Pfam Name: Protease inhibitor/seed storage/LTP family Pfam Description: Protease inhibitor/seed storage/LTP family
  misc_feature (38)..(256): Homolog of NCBI NO: 11994732 NR Description: contains similarity to cell wall-plasma membrane
  misc_feature (38)..(256): Homolog of NCBI NO: 15233282 NR Description: unknown protein; protein id: At3g22120.1
  misc_feature (38)..(256): Homolog of NCBI NO: 7446482 NR Description: probable cell wall-plasma membrane linker protein
  misc_feature (38)..(256): Homolog of NCBI NO: 25453525 NR Description: cell wall-plasma membrane linker protein homolog
  misc_feature (25)..(258): Homolog of NCBI NO: 18396941 NR Description: expressed protein; protein id: At2g10940.1, by cDNA: 32647., supported by cDNA: gi_17473864 [Arabidopsis >gi|25411373|pir||G84494 hypothetical protein At2g10940
MKLRRTFLLTLLLVLSTAVTPILSLPADNVVACDCDKPKAPKPSHSRPPKTTKPSHPSPKPENPKPPKGPAYPAAGHPPPKSPSYPPVVGPPVTRPPVVGPPVTYPPITGSPTTPPVIGPPVTRPPVVGPPVTYPPITGPPSTPLPVTGPPVTYPPGGGGGSSTPCPPPPPLPTCPADSLKLGACVDLLGGLVHVGLGDPVVNQCCPVLEGLVELEAAVCLCTTIKLRLLNVNLYLPLALQLLLTCGKTPPPGYTCTV

SEQ ID NO: 6314 - DNA, 1601 bp, Zea mays subsp. mays
  misc_feature (1)..(1601): Ceres Seq. ID no. 13491106
  misc_feature: MA Experiment ID: 108528 Result: Up-regulated in Transcription
  misc_feature: MA Experiment 108528 PARAMETER Experiment Name: Zm_Imbibed_Seeds_P Parameter: Age (day) Value: 5 vs. 2
  misc_feature: MA Experiment 108528 PARAMETER Experiment Name: Zm_Imbibed_Seeds_P Parameter: Organism Value: Zea mays
  misc_feature: MA Experiment 108528 PARAMETER Experiment Name: Zm_Imbibed_Seeds_P Parameter: Plant Line Value: 35A19
  misc_feature: MA Experiment 108528 PARAMETER Experiment Name: Zm_Imbibed_Seeds_P Parameter: Tissue Value: Aerial vs. Embryo
  misc_feature: MA Experiment ID: 108530 Result: Up-regulated in Transcription
  misc_feature: MA Experiment 108530 PARAMETER Experiment Name: Zm_Imbibed_Seeds_P Parameter: Age (day) Value: 6 vs. 2
  misc_feature: MA Experiment 108530 PARAMETER Experiment Name: Zm_Imbibed_Seeds_P Parameter: Organism Value: Zea mays
  misc_feature: MA Experiment 108530 PARAMETER Experiment Name: Zm_Imbibed_Seeds_P Parameter: Plant Line Value: 35A19
  misc_feature: MA Experiment 108530 PARAMETER Experiment Name: Zm_Imbibed_Seeds_P Parameter: Tissue Value: Aerial vs. Embryo
  misc_feature: MA Experiment ID: 108536 Result: Down-regulated in Transcription
  misc_feature: MA Experiment 108536 PARAMETER Experiment Name: Zm_Meristem_P Parameter: Age (day) Value: 8
  misc_feature: MA Experiment 108536 PARAMETER Experiment Name: Zm_Meristem_P Parameter: Organism Value: Zea mays
  misc_feature: MA Experiment 108536 PARAMETER Experiment Name: Zm_Meristem_P Parameter: Plant Line Value: 35A19
  misc_feature: MA Experiment 108536 PARAMETER Experiment Name: Zm_Meristem_P Parameter: Tissue Value: Shoot Meristem vs. Above Shoot Meristem
  misc_feature: MA Experiment ID: 108545 Result: Up-regulated in Transcription
  misc_feature: MA Experiment 108545 PARAMETER Experiment Name: Zm_Imbibed_Seeds_P Parameter: Age (day) Value: 3 vs. 2
  misc_feature: MA Experiment 108545 PARAMETER Experiment Name: Zm_Imbibed_Seeds_P Parameter: Organism Value: Zea mays
  misc_feature: MA Experiment 108545 PARAMETER Experiment Name: Zm_Imbibed_Seeds_P Parameter: Plant Line Value: 35A19
  misc_feature: MA Experiment 108545 PARAMETER Experiment Name: Zm_Imbibed_Seeds_P Parameter: Tissue Value: Aerial vs. Embryo
  misc_feature: MA Experiment ID: 108547 Result: Up-regulated in Transcription
  misc_feature: MA Experiment 108547 PARAMETER Experiment Name: Zm_Imbibed_Seeds_P Parameter: Age (day) Value: 4 vs. 2
  misc_feature: MA Experiment 108547 PARAMETER Experiment Name: Zm_Imbibed_Seeds_P Parameter: Organism Value: Zea mays
  misc_feature: MA Experiment 108547 PARAMETER Experiment Name: Zm_Imbibed_Seeds_P Parameter: Plant Line Value: 35A19
  misc_feature: MA Experiment 108547 PARAMETER Experiment Name: Zm_Imbibed_Seeds_P Parameter: Tissue Value: Aerial vs. Embryo
  misc_feature: MA Experiment ID: 108688 Result: Down-regulated in Transcription
  misc_feature: MA Experiment 108688 PARAMETER Experiment Name: Zm_Embryos-Flowers__P Parameter: Tissue Value: Immature Flowers vs. Aerial+
  misc_feature: MA Experiment ID: 20000480 Result: Down-regulated in Transcription
  misc_feature: MA Experiment 20000480 PARAMETER Experiment Name: Zm_Drought_P Parameter: Age (day) Value: 11
  misc_feature: MA Experiment 20000480 PARAMETER Experiment Name: Zm_Drought_P Parameter: Organism Value: Zea mays
  misc_feature: MA Experiment 20000480 PARAMETER Experiment Name: Zm_Drought_P Parameter: Plant Line Value: 35A19
  misc_feature: MA Experiment 20000480 PARAMETER Experiment Name: Zm_Drought_P Parameter: Timepoint (hr) Value: 72
  misc_feature: MA Experiment 20000480 PARAMETER Experiment Name: Zm_Drought_P Parameter: Tissue Value: Aerial
  misc_feature: MA Experiment 20000480 PARAMETER Experiment Name: Zm_Drought_P Parameter: Treatment Value: Drought vs. No Drought
  misc_feature: MA Experiment ID: 20000488 Result: Up-regulated in Transcription
  misc_feature: MA Experiment 20000488 PARAMETER Experiment Name: Zm_50mM_NH4NO3_L_to_H_P Parameter: Organism Value: Zea mays
  misc_feature: MA Experiment 20000488 PARAMETER Experiment Name: Zm_50mM_NH4NO3_L_to_H_P Parameter: Timepoint (hr) Value: 8
  misc_feature: MA Experiment 20000488 PARAMETER Experiment Name: Zm_50mM_NH4NO3_L_to_H_P Parameter: Tissue Value: Leaves
  misc_feature: MA Experiment 20000488 PARAMETER Experiment Name: Zm_50mM_NH4NO3_L_to_H_P Parameter: Treatment Value: 50mM NH4NO3 vs. 100mM Mannitol
  misc_feature: MA Experiment ID: 20000626 Result: Down-regulated in Transcription
  misc_feature: MA Experiment 20000626 PARAMETER Experiment Name: Zm_Herbicide-Treatments_P Parameter: Timepoint (hr) Value: 12
  misc_feature: MA Experiment 20000626 PARAMETER Experiment Name: Zm_Herbicide-Treatments_P Parameter: Tissue Value: Aerial
  misc_feature: MA Experiment 20000626 PARAMETER Experiment Name: Zm_Herbicide-Treatments_P Parameter: Treatment Value: Roundup vs. No Treatment
  misc_feature: MA Experiment ID: 20001608 Result: Up-regulated in Transcription
  misc_feature: MA Experiment 20001608 PARAMETER Experiment Name: Zm_50ppm_KNO3_L-to-H_P Parameter: Age (day) Value: 21
  misc_feature: MA Experiment 20001608 PARAMETER Experiment Name: Zm_50ppm_KNO3_L-to-H_P Parameter: Organism Value: Zea mays
  misc_feature: MA Experiment 20001608 PARAMETER Experiment Name: Zm_50ppm_KNO3_L-to-H_P Parameter: Plant Line Value: 35A19
  misc_feature: MA Experiment 20001608 PARAMETER Experiment Name: Zm_50ppm_KNO3_L-to-H_P Parameter: Timepoint (hr) Value: 48
  misc_feature: MA Experiment 20001608 PARAMETER Experiment Name: Zm_50ppm_KNO3_L-to-H_P Parameter: Tissue Value: Shoots
  misc_feature: MA Experiment 20001608 PARAMETER Experiment Name: Zm_50ppm_KNO3_L-to-H_P Parameter: Treatment Value: 50ppm KNO3 vs. 50ppm KCl
ccttccgattctccgtcgcctgagcggctgagccaacttgccaagcccaagcaagccaagtcgtcgcctccccgacccaacgccgcgacccccttgcccgtccgcgaccgctgcagcacctcggatcccgccccaatggcaacagcgtgtccgccgctctcgctgccgtccacctccctcttccgcggcaggtccgcccgcgccgggcccaacgcaggcagctcacggccgtccgctgcagcgccgtcggagaggcggtcgtggaggaggcctcgcccagacggcggaagagccgctgctggtgagcgcaatcagagggaggaagtcgagaggccacccgtctggctcatgaggcaggccgggaggtacatgaagagctaccaattgctctgcgagcggtatccttcgttccgtgaaagatcagaaaatgtcgacctagttgttgagatctctttgcaaccatggaaggttttcaagcctgatggagtcatcttgttctcggacatccttactccacttcctgggatgaacataccttttgacattgtgaagggaaaaggtccagtgatctatgatccattgagaacggcagcagctgtgaatgaagtcagagaatttgttcctgaggagtgggtcccttatgtggggcaggctctgaatattttgagacaagaggttaaaaatgaagctgctgtactaggttttgttggagctccgtttaccttggcatcttattgtgtggaaggaggttcatcaaagaactttacattgattaagaaaatggccttctcagaaccagcgattttacacaatttgctacagaagttcacaacatcaatggctaactatattaaataccaagcggacaatggggcgcaggctgtccaaattttcgattcatgggctactgaactcagcccggctgattttgaggagtttagcctgccttatctaaagcagatagtggatagtgttagggaaacacatcctgacttgcctctgatactttacgcaagtggatctgggggcttgctggagaggcttcctttgacaggtgttgatgttgtcagcttggactggacggtcgatatggcagagggcaggaaaagattgggatctaacacagcagtccaagggaacgtggaccctggtgttctttttggatccaaagagtttataacgaggcggatttacgacactgtgcagaaggctggcaatgttggacatgtattgaaccttggccatggcatcaaggttggaactccggaggaaaatgttgctcacttttttgaggtcgcaaaagggatcagatattaaagaacctggcatggttttttcctttttccaaatcggcagaagttgtagagtcggcggtcgaggatagatgcagaaagcccatgtgcagtatagagtgcctgaaaaaatttttgggactgattttgtttgttgcatttcaagttccggtttcagtgtaatattgtaagcagatttgagtggaggcgtaatgaagtgcctaattgtttatagcaatatagttttgtacaaccagtatccttgtttatgagagtacgaagcagaaatactgatcatgtgttgacatg

SEQ ID NO: 6315 - protein, 438 aa, Zea mays subsp. mays
  peptide (1)..(438): Ceres Seq. ID no. 13491107
  misc_feature (105)..(436): Pfam Name: Uroporphyrinogen decarboxylase (URO-D) Pfam Description: Uroporphyrinogen decarboxylase (URO-D)
  misc_feature (46)..(438): Homolog of NCBI NO: 6014938 NR Description: Uroporphyrinogen decarboxylase, chloroplast
  misc_feature (109)..(438): Homolog of NCBI NO: 2501646 NR Description: Uroporphyrinogen decarboxylase (UPD)
  misc_feature (107)..(438): Homolog of NCBI NO: 2501647 NR Description: Uroporphyrinogen decarboxylase, chloroplast
  misc_feature (107)..(438): Homolog of NCBI NO: 16975230 NR Description: Chain A, Crystal Structure And Substrate Binding
  misc_feature (107)..(438): Homolog of NCBI NO: 15226690 NR Description: uroporphyrinogen decarboxylase (UPD), putative thaliana] >gi|6014937|sp|O22886|DCUP_ARATH Uroporphyrinogen
  misc_feature (107)..(438): Homolog of NCBI NO: 14334768 NR Description: putative uroporphyrinogen decarboxylase
  misc_feature (107)..(436): Homolog of NCBI NO: 16332025 NR Description: uroporphyrinogen decarboxylase [Synechocystis sp.
  misc_feature (107)..(436): Homolog of NCBI NO: 23041382 NR Description: hypothetical protein [Trichodesmium erythraeum
  misc_feature (97)..(436): Homolog of NCBI NO: 33240529 NR Description: Uroporphyrinogen decarboxylase [Prochlorococcus subsp. marinus str. CCMP1375] >gi|33238057|gb|AAQ00124.1| decarboxylase [Prochlorococcus marinus subsp. marinus str.
  misc_feature (97)..(434): Homolog of NCBI NO: 17231401 NR Description: uroporphyrinogen decarboxylase [Nostoc sp. PCC
PSDSPSPERLSQLAKPKQAKSSPPRPNAATPLPVRDRCSTSDPAPMATACPPLSLPSTSLFRGRSARAGPNAGSSRPSAAAPSERRSWRRPRPDGGRAAAGERNQREEVERPPVWLMRQAGRYMKSYQLLCERYPSFRERSENVDLVVEISLQPWKVFKPDGVILFSDILTPLPGMNIPFDIVKGKGPVIYDPLRTAAAVNEVREFVPEEWVPYVGQALNILRQEVKNEAAVLGFVGAPFTLASYCVEGGSSKNFTLIKKMAFSEPAILHNLLQKFTTSMANYIKYQADNGAQAVQIFDSWATELSPADFEEFSLPYLKQIVDSVRETHPDLPLILYASGSGGLLERLPLTGVDVVSLDWTVDMAEGRKRLGSNTAVQGNVDPGVLFGSKEFITRRIYDTVQKAGNVGHVLNLGHGIKVGTPEENVAHFFEVAKGIRY

SEQ ID NO: 6316 - protein, 393 aa, Zea mays subsp. mays
  peptide (1)..(393): Ceres Seq. ID no. 13491108
  misc_feature (60)..(391): Pfam Name: Uroporphyrinogen decarboxylase (URO-D) Pfam Description: Uroporphyrinogen decarboxylase (URO-D)
  misc_feature (1)..(393): Homolog of NCBI NO: 6014938 NR Description: Uroporphyrinogen decarboxylase, chloroplast
  misc_feature (64)..(393): Homolog of NCBI NO: 2501646 NR Description: Uroporphyrinogen decarboxylase (UPD)
  misc_feature (62)..(393): Homolog of NCBI NO: 2501647 NR Description: Uroporphyrinogen decarboxylase, chloroplast
  misc_feature (62)..(393): Homolog of NCBI NO: 16975230 NR Description: Chain A, Crystal Structure And Substrate Binding
  misc_feature (62)..(393): Homolog of NCBI NO: 15226690 NR Description: uroporphyrinogen decarboxylase (UPD), putative thaliana] >gi|6014937|sp|O22886|DCUP_ARATH Uroporphyrinogen
  misc_feature (62)..(393): Homolog of NCBI NO: 14334768 NR Description: putative uroporphyrinogen decarboxylase
  misc_feature (62)..(391): Homolog of NCBI NO: 16332025 NR Description: uroporphyrinogen decarboxylase [Synechocystis sp.
  misc_feature (62)..(391): Homolog of NCBI NO: 23041382 NR Description: hypothetical protein [Trichodesmium erythraeum
  misc_feature (52)..(391): Homolog of NCBI NO: 33240529 NR Description: Uroporphyrinogen decarboxylase [Prochlorococcus subsp. marinus str. CCMP1375] >gi|33238057|gb|AAQ00124.1| decarboxylase [Prochlorococcus marinus subsp. marinus str.
  misc_feature (52)..(389): Homolog of NCBI NO: 17231401 NR Description: uroporphyrinogen decarboxylase [Nostoc sp. PCC
MATACPPLSLPSTSLFRGRSARAGPNAGSSRPSAAAPSERRSWRRPRPDGGRAAAGERNQREEVERPPVWLMRQAGRYMKSYQLLCERYPSFRERSENVDLVVEISLQPWKVFKPDGVILFSDILTPLPGMNIPFDIVKGKGPVIYDPLRTAAAVNEVREFVPEEWVPYVGQALNILRQEVKNEAAVLGFVGAPFTLASYCVEGGSSKNFTLIKKMAFSEPAILHNLLQKFTTSMANYIKYQADNGAQAVQIFDSWATELSPADFEEFSLPYLKQIVDSVRETHPDLPLILYASGSGGLLERLPLTGVDVVSLDWTVDMAEGRKRLGSNTAVQGNVDPGVLFGSKEFITRRIYDTVQKAGNVGHVLNLGHGIKVGTPEENVAHFFEVAKGIRY

SEQ ID NO: 6317 - protein, 322 aa, Zea mays subsp. mays
  peptide (1)..(322): Ceres Seq. ID no. 13491109
  misc_feature (1)..(320): Pfam Name: Uroporphyrinogen decarboxylase (URO-D) Pfam Description: Uroporphyrinogen decarboxylase (URO-D)
  misc_feature (1)..(322): Homolog of NCBI NO: 6014938 NR Description: Uroporphyrinogen decarboxylase, chloroplast
  misc_feature (1)..(322): Homolog of NCBI NO: 2501646 NR Description: Uroporphyrinogen decarboxylase (UPD)
  misc_feature (1)..(322): Homolog of NCBI NO: 2501647 NR Description: Uroporphyrinogen decarboxylase, chloroplast
  misc_feature (1)..(322): Homolog of NCBI NO: 16975230 NR Description: Chain A, Crystal Structure And Substrate Binding
  misc_feature (1)..(322): Homolog of NCBI NO: 15226690 NR Description: uroporphyrinogen decarboxylase (UPD), putative thaliana] >gi|6014937|sp|O22886|DCUP_ARATH Uroporphyrinogen
  misc_feature (1)..(322): Homolog of NCBI NO: 14334768 NR Description: putative uroporphyrinogen decarboxylase
  misc_feature (1)..(320): Homolog of NCBI NO: 16332025 NR Description: uroporphyrinogen decarboxylase [Synechocystis sp.
  misc_feature (1)..(320): Homolog of NCBI NO: 23041382 NR Description: hypothetical protein [Trichodesmium erythraeum
  misc_feature (1)..(320): Homolog of NCBI NO: 33240529 NR Description: Uroporphyrinogen decarboxylase [Prochlorococcus subsp. marinus str. CCMP1375] >gi|33238057|gb|AAQ00124.1| decarboxylase [Prochlorococcus marinus subsp. marinus str.
  misc_feature (1)..(318): Homolog of NCBI NO: 17231401 NR Description: uroporphyrinogen decarboxylase [Nostoc sp. PCC
MRQAGRYMKSYQLLCERYPSFRERSENVDLVVEISLQPWKVFKPDGVILFSDILTPLPGMNIPFDIVKGKGPVIYDPLRTAAAVNEVREFVPEEWVPYVGQALNILRQEVKNEAAVLGFVGAPFTLASYCVEGGSSKNFTLIKKMAFSEPAILHNLLQKFTTSMANYIKYQADNGAQAVQIFDSWATELSPADFEEFSLPYLKQIVDSVRETHPDLPLILYASGSGGLLERLPLTGVDVVSLDWTVDMAEGRKRLGSNTAVQGNVDPGVLFGSKEFITRRIYDTVQKAGNVGHVLNLGHGIKVGTPEENVAHFFEVAKGIRY

SEQ ID NO: 6318 - DNA, 1556 bp, Zea mays subsp. mays
  misc_feature (1)..(1556): Ceres Seq. ID no. 12409134
  misc_feature: MA Experiment ID: 20000534 Result: Down-regulated in Transcription
  misc_feature: MA Experiment 20000534 PARAMETER Experiment Name: Zm_Hybrid_Pollen_P Parameter: Age (day) Value: 8
  misc_feature: MA Experiment 20000534 PARAMETER Experiment Name: Zm_Hybrid_Pollen_P Parameter: Organism Value: Zea mays
  misc_feature: MA Experiment 20000534 PARAMETER Experiment Name: Zm_Hybrid_Pollen_P Parameter: Plant Line Value: 35A19
  misc_feature: MA Experiment 20000534 PARAMETER Experiment Name: Zm_Hybrid_Pollen_P Parameter: Tissue Value: Pollen vs. Aerial
ctgattccttccgccttgtcagcgcagcgatccagacccacccgagccaacaacccatggccgccgcgacgccgcgtctcctgctcgcggtcgcgggcctcaccctcgccggtgctgcaggacccggcggagctcctgcgccttgccaaggagccggccttcgcggactggatggtcggggtgcggcggcggatccacgagaacccggagctgggatacgaggagttccagaccagcgagctcgtgcgccgggagctccacgccatggggatcccctacaggcaccccttcgccgtcaccggcgtggtagcaacagtcggcaccggcgggtccgcccttcgttgctctgcgggcggacatggacgcgctgcccttgcaggaaagtgtggagtgggaacacaagagcaaagtccctgggaagatgcatggatgtggacatgatgcacatgttgctatgctgttgggatctgctaagattcttcaggagcatcgtgatgagttgaagggtacagtagttcttgtcttccaaccagctgaggaaggtggcggtggggccaagaaaatgatagaagacagagctgtggaaaacatagatgccatttttgggcttcatatagctgactctgtgcctattggtgtgctggcatccaggccagggcctattatggctgggagtggattctttgaggccgtaataagtggaaagggaggacatgctgcacttcctcatcacactatagatccgatattggctgcctcaaatgttattgtgagccttcagcaacttgtttctcgagaagctgatcccttggactcacaggttgtgacagttggaaagtttcaaggaggtggagccttcaatgtgatccctgattcggtaactataggtggcaccttccgagcctttctgaaagagagttttaatcaattgaagcagcggattgaagaggtgattgtgtctcaagctagcgtgcagcgctgcagcgctgccgtggacttcctcagcaaggaccgtcctttcttcccgccgaccatcaacagccccgagctccacgacttcttcgtgaacgtggccggcgagatggtcggctcgaggaacgtgagggacaggcagccgctgatgggcgccgaggacttcgcgttctacgccgaggcggtcccttccacctactactacttcgtgggcatgtacaacgagacgcgcgggccgcaggcgccccaccactccccctacttcaccatcaacgaagacgcccttccctacggcgcggccgggcaggcggcgctggcagctcgctacctactcgagcgtcagcagcctgctgccgccaccgctgataaggcagaaacccatgatgagctgtagatagtacatgatgtttgcgtccctgtccctgtgttgatggaattagattgagcaataatttcttcgccaagtttattcagcggctgtacatatcctggtatctccatgctttggtaatgatcggttgggatcagtcagcaaatagtctgagaaacatgctttagtctgagaaacatgattccatcccttg

SEQ ID NO: 6319 - protein, 335 aa, Zea mays subsp. mays
  peptide (1)..(335): Ceres Seq. ID no. 12409135
  misc_feature (1)..(316): Pfam Name: Peptidase family M20/M25/M40 Pfam Description: Peptidase family M20/M25/M40
  misc_feature (1)..(335): Homolog of NCBI NO: 34914096 NR Description: putative IAA-Ala hydrolase [Oryza sativa
  misc_feature (1)..(335): Homolog of NCBI NO: 27948556 NR Description: IAA-amino acid hydrolase [Oryza sativa (indica
  misc_feature (1)..(335): Homolog of NCBI NO: 15218027 NR Description: IAA-Ala hydrolase (IAR3); protein id:
  misc_feature (1)..(335): Homolog of NCBI NO: 2181184 NR Description: JR3 protein [Arabidopsis thaliana]
  misc_feature (1)..(317): Homolog of NCBI NO: 15218029 NR Description: auxin conjugate hydrolase (ILL5); protein id: [Arabidopsis thaliana] >gi|25319490|pir||H96556 auxin conjugate
  misc_feature (1)..(335): Homolog of NCBI NO: 34910396 NR Description: putative IAA-Ala hydrolase [Oryza sativa
  misc_feature (1)..(335): Homolog of NCBI NO: 902791 NR Description: ILL2
  misc_feature (1)..(335): Homolog of NCBI NO: 15241894 NR Description: IAA-amino acid hydrolase (gb|AAC04866.1); protein At5g56660.1, supported by cDNA: gi_18175666, supported by cDNA:
  misc_feature (1)..(335): Homolog of NCBI NO: 18175667 NR Description: IAA-amino acid hydrolase [Arabidopsis thaliana]
  misc_feature (1)..(335): Homolog of NCBI NO: 15241892 NR Description: IAA-amino acid hydrolase homolog 1 precursor protein id: At5g56650.1, supported by cDNA: gi_902788
MDALPLQESVEWEHKSKVPGKMHGCGHDAHVAMLLGSAKILQEHRDELKGTVVLVFQPAEEGGGGAKKMIEDRAVENIDAIFGLHIADSVPIGVLASRPGPIMAGSGFFEAVISGKGGHAALPHHTIDPILAASNVIVSLQQLVSREADPLDSQVVTVGKFQGGGAFNVIPDSVTIGGTFRAFLKESFNQLKQRIEEVIVSQASVQRCSAAVDFLSKDRPFFPPTINSPELHDFFVNVAGEMVGSRNVRDRQPLMGAEDFAFYAEAVPSTYYYFVGMYNETRGPQAPHHSPYFTINEDALPYGAAGQAALAARYLLERQQPAAATADKAETHDEL

SEQ ID NO: 6320 - protein, 314 aa, Zea mays subsp. mays
  peptide (1)..(314): Ceres Seq. ID no. 12409136
  misc_feature (1)..(295): Pfam Name: Peptidase family M20/M25/M40 Pfam Description: Peptidase family M20/M25/M40
  misc_feature (1)..(314): Homolog of NCBI NO: 34914096 NR Description: putative IAA-Ala hydrolase [Oryza sativa
  misc_feature (1)..(314): Homolog of NCBI NO: 27948556 NR Description: IAA-amino acid hydrolase [Oryza sativa (indica
  misc_feature (1)..(314): Homolog of NCBI NO: 15218027 NR Description: IAA-Ala hydrolase (IAR3); protein id:
  misc_feature (1)..(314): Homolog of NCBI NO: 2181184 NR Description: JR3 protein [Arabidopsis thaliana]
  misc_feature (1)..(296): Homolog of NCBI NO: 15218029 NR Description: auxin conjugate hydrolase (ILL5); protein id: [Arabidopsis thaliana] >gi|25319490|pir||H96556 auxin conjugate
  misc_feature (1)..(314): Homolog of NCBI NO: 34910396 NR Description: putative IAA-Ala hydrolase [Oryza sativa
  misc_feature (1)..(314): Homolog of NCBI NO: 902791 NR Description: ILL2
  misc_feature (1)..(314): Homolog of NCBI NO: 15241894 NR Description: IAA-amino acid hydrolase (gb|AAC04866.1); protein At5g56660.1, supported by cDNA: gi_18175666, supported by cDNA:
  misc_feature (1)..(314): Homolog of NCBI NO: 18175667 NR Description: IAA-amino acid hydrolase [Arabidopsis thaliana]
  misc_feature (1)..(314): Homolog of NCBI NO: 15241892 NR Description: IAA-amino acid hydrolase homolog 1 precursor protein id: At5g56650.1, supported by cDNA: gi_902788
MHGCGHDAHVAMLLGSAKILQEHRDELKGTVVLVFQPAEEGGGGAKKMIEDRAVENIDAIFGLHIADSVPIGVLASRPGPIMAGSGFFEAVISGKGGHAALPHHTIDPILAASNVIVSLQQLVSREADPLDSQVVTVGKFQGGGAFNVIPDSVTIGGTFRAFLKESFNQLKQRIEEVIVSQASVQRCSAAVDFLSKDRPFFPPTINSPELHDFFVNVAGEMVGSRNVRDRQPLMGAEDFAFYAEAVPSTYYYFVGMYNETRGPQAPHHSPYFTINEDALPYGAAGQAALAARYLLERQQPAAATADKAETHDEL

SEQ ID NO: 6321 - protein, 303 aa, Zea mays subsp. mays
  peptide (1)..(303): Ceres Seq. ID no. 12409137
  misc_feature (1)..(284): Pfam Name: Peptidase family M20/M25/M40 Pfam Description: Peptidase family M20/M25/M40
  misc_feature (1)..(303): Homolog of NCBI NO: 34914096 NR Description: putative IAA-Ala hydrolase [Oryza sativa
  misc_feature (1)..(303): Homolog of NCBI NO: 27948556 NR Description: IAA-amino acid hydrolase [Oryza sativa (indica
  misc_feature (1)..(303): Homolog of NCBI NO: 15218027 NR Description: IAA-Ala hydrolase (IAR3); protein id:
  misc_feature (1)..(303): Homolog of NCBI NO: 2181184 NR Description: JR3 protein [Arabidopsis thaliana]
  misc_feature (1)..(285): Homolog of NCBI NO: 15218029 NR Description: auxin conjugate hydrolase (ILL5); protein id: [Arabidopsis thaliana] >gi|25319490|pir||H96556 auxin conjugate
  misc_feature (1)..(303): Homolog of NCBI NO: 34910396 NR Description: putative IAA-Ala hydrolase [Oryza sativa
  misc_feature (1)..(303): Homolog of NCBI NO: 902791 NR Description: ILL2
  misc_feature (1)..(303): Homolog of NCBI NO: 15241894 NR Description: IAA-amino acid hydrolase (gb|AAC04866.1); protein At5g56660.1, supported by cDNA: gi_18175666, supported by cDNA:
  misc_feature (1)..(303): Homolog of NCBI NO: 18175667 NR Description: IAA-amino acid hydrolase [Arabidopsis thaliana]
  misc_feature (1)..(303): Homolog of NCBI NO: 15241892 NR Description: IAA-amino acid hydrolase homolog 1 precursor protein id: At5g56650.1, supported by cDNA: gi_902788
MLLGSAKILQEHRDELKGTVVLVFQPAEEGGGGAKKMIEDRAVENIDAIFGLHIADSVPIGVLASRPGPIMAGSGFFEAVISGKGGHAALPHHTIDPILAASNVIVSLQQLVSREADPLDSQVVTVGKFQGGGAFNVIPDSVTIGGTFRAFLKESFNQLKQRIEEVIVSQASVQRCSAAVDFLSKDRPFFPPTINSPELHDFFVNVAGEMVGSRNVRDRQPLMGAEDFAFYAEAVPSTYYYFVGMYNETRGPQAPHHSPYFTINEDALPYGAAGQAALAARYLLERQQPAAATADKAETHDEL

SEQ ID NO: 6322 - DNA, 1078 bp, Zea mays subsp. mays
  misc_feature (1)..(1078): Ceres Seq. ID no. 12577742
  misc_feature: MA Experiment ID: 108535 Result: Up-regulated in Transcription
  misc_feature: MA Experiment 108535 PARAMETER Experiment Name: Zm_Meristem_P Parameter: Age (day) Value: 8
  misc_feature: MA Experiment 108535 PARAMETER Experiment Name: Zm_Meristem_P Parameter: Organism Value: Zea mays
  misc_feature: MA Experiment 108535 PARAMETER Experiment Name: Zm_Meristem_P Parameter: Plant Line Value: 35A19
  misc_feature: MA Experiment 108535 PARAMETER Experiment Name: Zm_Meristem_P Parameter: Tissue Value: Root Meristem vs. Above Root Meristem
  misc_feature: MA Experiment ID: 20000492 Result: Up-regulated in Transcription
  misc_feature: MA Experiment 20000492 PARAMETER Experiment Name: Zm_Hybrid_Seed_Dev_P Parameter: DAP Value: 12
  misc_feature: MA Experiment 20000492 PARAMETER Experiment Name: Zm_Hybrid_Seed_Dev_P Parameter: Organism Value: Zea mays
  misc_feature: MA Experiment 20000492 PARAMETER Experiment Name: Zm_Hybrid_Seed_Dev_P Parameter: Plant Line Value: 35A19
  misc_feature: MA Experiment 20000492 PARAMETER Experiment Name: Zm_Hybrid_Seed_Dev_P Parameter: Tissue Value: Fert Kernel vs. Unfert Floret
  misc_feature: MA Experiment ID: 20000534 Result: Down-regulated in Transcription
  misc_feature: MA Experiment 20000534 PARAMETER Experiment Name: Zm_Hybrid_Pollen_P Parameter: Age (day) Value: 8
  misc_feature: MA Experiment 20000534 PARAMETER Experiment Name: Zm_Hybrid_Pollen_P Parameter: Organism Value: Zea mays
  misc_feature: MA Experiment 20000534 PARAMETER Experiment Name: Zm_Hybrid_Pollen_P Parameter: Plant Line Value: 35A19
  misc_feature: MA Experiment 20000534 PARAMETER Experiment Name: Zm_Hybrid_Pollen_P Parameter: Tissue Value: Pollen vs. Aerial
agttcgccactctcgccatcggggacgagggactgggagccaggatacttctgccgcgcggcgaccggtcgagcgaaatcgatctaccccaggtgcggcgggcgcggctttattctcaagattttttctgtgttctttagagagcagccatggacgagtggattcgccaaaccgaggtgtgggtgcaccaaaccgacagctggatccggcagcagcccccggagcagatctatgtagcggccgcggtggttgccgtcacaatcctgttgcttatcgtagcatcttgtctgaaatcgtctagaccaaacaccatagttctatctgggcttagtggcagtggcaaaaccactatttactaccagcttcgggatggatcatcacatcaaggaactgttacttcaatggaagaaaacagtgatacttttgtgctgcattcggagcaagaaaggaaagacaaagtaaaacctgtgcatattattgatgttcctggtcatgctaggctcaaacccaaacttgatgaagtcctgcctaaagctgctgcggttgtctttgttgttgatgctcaagatttcttgtctagcatgcaagctgctgcagagtacctttatgacattctgacaaaggcaactgtagtgaagaaaaaggtccctgtgcttatattctgcaacaagacagataaagttaccgcccactcgaaggaattcatcaagaagcagttggagaaagaattgaacaagcttagggaatctaggaacgccgtatcgtcagccgacatctctgatgaagtccagcttggggtccctggagaggcattcaacttcagccagtgccagaacaaggtggctgttgcggagggtgctggtttgacaggtgatgtttcggccgtggaacaattcatccgtgaacatgtgaaggcataggttgttcttattgtttttggggctccaaatggctatcctgatgagataagatgtacattgcgtcaatgtggttgttacctttcatgcatgtacaccttcatccggtgctctgaagttgcttagagacagtgaagcacagtcatattttgaactggttc

SEQ ID NO: 6323 - protein, 256 aa, Zea mays subsp. mays
  peptide (1)..(256): Ceres Seq. ID no. 12577743
  misc_feature (49)..(223): Pfam Name: ADP-ribosylation factor family Pfam Description: ADP-ribosylation factor family
  misc_feature (9)..(255): Homolog of NCBI NO: 15239201 NR Description: signal recognition particle receptor beta
  misc_feature (9)..(255): Homolog of NCBI NO: 15224229 NR Description: putative signal recognition particle receptor subunit; protein id: At2g18770.1, supported by cDNA: 14084.
  misc_feature (19)..(235): Homolog of NCBI NO: 32450191 NR Description: Unknown (protein for MGC:64420) [Xenopus laevis]
  misc_feature (19)..(250): Homolog of NCBI NO: 6678137 NR Description: signal recognition particle receptor, B subunit musculus] >gi|1351115|sp|P47758|SRPB_MOUSE Signal recognition
  misc_feature (19)..(250): Homolog of NCBI NO: 12842535 NR Description: unnamed protein product [Mus musculus]
  misc_feature (19)..(247): Homolog of NCBI NO: 27721301 NR Description: similar to signal recognition particle receptor,
  misc_feature (19)..(235): Homolog of NCBI NO: 38174090 NR Description: Unknown (protein for MGC:75930) [Silurana
  misc_feature (19)..(247): Homolog of NCBI NO: 31340540 NR Description: Signal recognition particle receptor beta subunit (Protein APMCF1) >gi|22761735|dbj|BAC11675.1| unnamed protein [Homo sapiens] >gi|24528583|gb|AAD34888.3|AF141882_1 APMCF1 [Homo
  misc_feature (19)..(247): Homolog of NCBI NO: 38649415 NR Description: Signal recognition particle receptor, beta
  misc_feature (19)..(247): Homolog of NCBI NO: 14042265 NR Description: unnamed protein product [Homo sapiens]
MDEWIRQTEVWVHQTDSWIRQQPPEQIYVAAAVVAVTILLLIVASCLKSSRPNTIVLSGLSGSGKTTIYYQLRDGSSHQGTVTSMEENSDTFVLHSEQERKDKVKPVHIIDVPGHARLKPKLDEVLPKAAAVVFVVDAQDFLSSMQAAAEYLYDILTKATVVKKKVPVLIFCNKTDKVTAHSKEFIKKQLEKELNKLRESRNAVSSADISDEVQLGVPGEAFNFSQCQNKVAVAEGAGLTGDVSAVEQFIREHVKA

SEQ ID NO: 6324 - protein, 172 aa, Zea mays subsp. mays
  peptide (1)..(172): Ceres Seq. ID no. 12577744
  misc_feature (1)..(139): Pfam Name: ADP-ribosylation factor family Pfam Description: ADP-ribosylation factor family
  misc_feature (1)..(171): Homolog of NCBI NO: 15239201 NR Description: signal recognition particle receptor beta
  misc_feature (1)..(171): Homolog of NCBI NO: 15224229 NR Description: putative signal recognition particle receptor subunit; protein id: At2g18770.1, supported by cDNA: 14084.
  misc_feature (1)..(151): Homolog of NCBI NO: 32450191 NR Description: Unknown (protein for MGC:64420) [Xenopus laevis]
  misc_feature (1)..(166): Homolog of NCBI NO: 6678137 NR Description: signal recognition particle receptor, B subunit musculus] >gi|1351115|sp|P47758|SRPB_MOUSE Signal recognition
  misc_feature (1)..(166): Homolog of NCBI NO: 12842535 NR Description: unnamed protein product [Mus musculus]
  misc_feature (1)..(163): Homolog of NCBI NO: 27721301 NR Description: similar to signal recognition particle receptor,
  misc_feature (1)..(151): Homolog of NCBI NO: 38174090 NR Description: Unknown (protein for MGC:75930) [Silurana
  misc_feature (1)..(163): Homolog of NCBI NO: 31340540 NR Description: Signal recognition particle receptor beta subunit (Protein APMCF1) >gi|22761735|dbj|BAC11675.1| unnamed protein [Homo sapiens] >gi|24528583|gb|AAD34888.3|AF141882_1 APMCF1 [Homo
  misc_feature (1)..(163): Homolog of NCBI NO: 38649415 NR Description: Signal recognition particle receptor, beta
  misc_feature (1)..(163): Homolog of NCBI NO: 14042265 NR Description: unnamed protein product [Homo sapiens]
MEENSDTFVLHSEQERKDKVKPVHIIDVPGHARLKPKLDEVLPKAAAVVFVVDAQDFLSSMQAAAEYLYDILTKATVVKKKVPVLIFCNKTDKVTAHSKEFIKKQLEKELNKLRESRNAVSSADISDEVQLGVPGEAFNFSQCQNKVAVAEGAGLTGDVSAVEQFIREHVKA

SEQ ID NO: 6325 - DNA, 1103 bp, Zea mays subsp. mays
  misc_feature (1)..(1103): Ceres Seq. ID no. 13498465
  misc_feature: MA Experiment ID: 108523 Result: Up-regulated in Transcription
  misc_feature: MA Experiment 108523 PARAMETER Experiment Name: Zm_42deg_Heat_P Parameter: Age (day) Value: 8
  misc_feature: MA Experiment 108523 PARAMETER Experiment Name: Zm_42deg_Heat_P Parameter: Organism Value: Zea mays
  misc_feature: MA Experiment 108523 PARAMETER Experiment Name: Zm_42deg_Heat_P Parameter: Plant Line Value: 35A19
  misc_feature: MA Experiment 108523 PARAMETER Experiment Name: Zm_42deg_Heat_P Parameter: Temperature (deg C) Value: 42 vs. 22
  misc_feature: MA Experiment 108523 PARAMETER Experiment Name: Zm_42deg_Heat_P Parameter: Timepoint (hr) Value: 6
  misc_feature: MA Experiment 108523 PARAMETER Experiment Name: Zm_42deg_Heat_P Parameter: Tissue Value: Aerial
  misc_feature: MA Experiment ID: 108527 Result: Up-regulated in Transcription
  misc_feature: MA Experiment 108527 PARAMETER Experiment Name: Zm_5mM_NO_P Parameter: Age (day) Value: 8
  misc_feature: MA Experiment 108527 PARAMETER Experiment Name: Zm_5mM_NO_P Parameter: Organism Value: Zea mays
  misc_feature: MA Experiment 108527 PARAMETER Experiment Name: Zm_5mM_NO_P Parameter: Plant Line Value: 35A19
  misc_feature: MA Experiment 108527 PARAMETER Experiment Name: Zm_5mM_NO_P Parameter: Timepoint (hr) Value: 6
  misc_feature: MA Experiment 108527 PARAMETER Experiment Name: Zm_5mM_NO_P Parameter: Tissue Value: Aerial
  misc_feature: MA Experiment 108527 PARAMETER Experiment Name: Zm_5mM_NO_P Parameter: Treatment Value: 5mM NO vs. No Treatment
  misc_feature: MA Experiment ID: 108528 Result: Up-regulated in Transcription
  misc_feature: MA Experiment 108528 PARAMETER Experiment Name: Zm_Imbibed_Seeds_P Parameter: Age (day) Value: 5 vs. 2
  misc_feature: MA Experiment 108528 PARAMETER Experiment Name: Zm_Imbibed_Seeds_P Parameter: Organism Value: Zea mays
  misc_feature: MA Experiment 108528 PARAMETER Experiment Name: Zm_Imbibed_Seeds_P Parameter: Plant Line Value: 35A19
  misc_feature: MA Experiment 108528 PARAMETER Experiment Name: Zm_Imbibed_Seeds_P Parameter: Tissue Value: Aerial vs. Embryo
  misc_feature: MA Experiment ID: 108535 Result: Down-regulated in Transcription
  misc_feature: MA Experiment 108535 PARAMETER Experiment Name: Zm_Meristem_P Parameter: Age (day) Value: 8
  misc_feature: MA Experiment 108535 PARAMETER Experiment Name: Zm_Meristem_P Parameter: Organism Value: Zea mays
  misc_feature: MA Experiment 108535 PARAMETER Experiment Name: Zm_Meristem_P Parameter: Plant Line Value: 35A19
  misc_feature: MA Experiment 108535 PARAMETER Experiment Name: Zm_Meristem_P Parameter: Tissue Value: Root Meristem vs. Above Root Meristem
  misc_feature: MA Experiment ID: 108543 Result: Down-regulated in Transcription
  misc_feature: MA Experiment ID: 108544 Result: Down-regulated in Transcription
  misc_feature: MA Experiment ID: 108556 Result: Down-regulated in Transcription
  misc_feature: MA Experiment 108556 PARAMETER Experiment Name: Zm_Drought_P Parameter: Age (day) Value: 9
  misc_feature: MA Experiment 108556 PARAMETER Experiment Name: Zm_Drought_P Parameter: Organism Value: Zea mays
  misc_feature: MA Experiment 108556 PARAMETER Experiment Name: Zm_Drought_P Parameter: Plant Line Value: 35A19
  misc_feature: MA Experiment 108556 PARAMETER Experiment Name: Zm_Drought_P Parameter: Timepoint (hr) Value: 24
  misc_feature: MA Experiment 108556 PARAMETER Experiment Name: Zm_Drought_P Parameter: Tissue Value: Aerial
  misc_feature: MA Experiment 108556 PARAMETER Experiment Name: Zm_Drought_P Parameter: Treatment Value: Drought vs. No Drought
  misc_feature: MA Experiment ID: 20000480 Result: Down-regulated in Transcription
  misc_feature: MA Experiment 20000480 PARAMETER Experiment Name: Zm_Drought_P Parameter: Age (day) Value: 11
  misc_feature: MA Experiment 20000480 PARAMETER Experiment Name: Zm_Drought_P Parameter: Organism Value: Zea mays
  misc_feature: MA Experiment 20000480 PARAMETER Experiment Name: Zm_Drought_P Parameter: Plant Line Value: 35A19
  misc_feature: MA Experiment 20000480 PARAMETER Experiment Name: Zm_Drought_P Parameter: Timepoint (hr) Value: 72
  misc_feature: MA Experiment 20000480 PARAMETER Experiment Name: Zm_Drought_P Parameter: Tissue Value: Aerial
  misc_feature: MA Experiment 20000480 PARAMETER Experiment Name: Zm_Drought_P Parameter: Treatment Value: Drought vs. No Drought
  misc_feature: MA Experiment ID: 20000535 Result: Down-regulated in Transcription
  misc_feature: MA Experiment 20000535 PARAMETER Experiment Name: Zm_Hybrid_Seed_Dev_P Parameter: DAP Value: 30 vs. 12
  misc_feature: MA Experiment 20000535 PARAMETER Experiment Name: Zm_Hybrid_Seed_Dev_P Parameter: Organism Value: Zea mays
  misc_feature: MA Experiment 20000535 PARAMETER Experiment Name: Zm_Hybrid_Seed_Dev_P Parameter: Plant Line Value: 35A19
  misc_feature: MA Experiment 20000535 PARAMETER Experiment Name: Zm_Hybrid_Seed_Dev_P Parameter: Tissue Value: Embryo vs. Unfert Floret
aaggactcagtccacactccacagggaaggagggagcaggagaggtaggtagccaagaagatcggttccagcggcaggcgcgagcgaggcgtgaccgatggcggccgcgtcgctctgagccgggcgcggtggctcctggtggagcacccggccgtgccctcgttccgctggcagccaggccgcacggtcggcgcgacgccgtccttcgcggccgccgtcatctgcggctacctcgccgcggtgctcgtcctccgccgcctcgtcctgccccgcctcccggcgctgcctccgccggcgctccgcgcgctctccgccgcccacaacgcggtcctgctggcgctctccgccgccatggccggcgggtgcgcgctgtcgacggccgcgacggcgccggcgccgcggtgggcgtgggccttctgcttcccgccgcggggcgccacggaggcgtcggggcccgtcttcttctgggcgcacgtgttctacctctccaaggtgtacgagctcggcgacacgctgctcatcctgctcgcccgccgcccgctcacgctgctccacgtgtaccaccacgcgctcgtcgtggccatgtgctacctctggctcgccacccggcagtcgctgatgcccgtcgcgctcgtcaccaacgccggcgtgcacgtcgtgatgtactcctactacctctcctgcagcgtcggcctgcgctggcccgggcggtggaagcgcgccgtcacggagctgcagatcgcgcagttcctcttcagcttcgcggcctccgtggtgatgctgtggctccacttcgccgctggcggctgcgaggggatggccggctgggtgttcaacgccgtcttcaacgcgtcgctgctcgcgctcttcctcaacttccacggcgccgcctacaaaggcgccgccaaggccaacaagggtaaagcggaatgacgcggccgacaagctttaatttgccggcaaccaaaatcctcgtgagatttaattgggaccaattgtttaatgttgcttcttcgccaaattattactgatacgaagtctgtctgaaataattgttcgaaaaagaatggcatcgatcgcccttgaattatgggtgaattttc

SEQ ID NO: 6326 - protein, 306 aa, Zea mays subsp. mays
  peptide (1)..(306): Ceres Seq. ID no. 13498466
GLSPHSTGKEGAGEVGSQEDRFQRQARARRDRWRPRRSEPGAVAPGGAPGRALVPLAARPHGRRDAVLRGRRHLRLPRRGARPPPPRPAPPPGAASAGAPRALRRPQRGPAGALRRHGRRVRAVDGRDGAGAAVGVGLLLPAAGRHGGVGARLLLGARVLPLQGVRARRHAAHPARPPPAHAAPRVPPRARRGHVLPLARHPAVADARRARHQRRRARRDVLLLPLLQRRPALARAVEARRHGAADRAVPLQLRGLRGDAVAPLRRWRLRGDGRLGVQRRLQRVAARALPQLPRRRLQRRRQGQQG

SEQ ID NO: 6327 - protein, 193 aa, Zea mays subsp. mays
  peptide (1)..(193): Ceres Seq. ID no. 13498467
  misc_feature (1)..(193): Pfam Name: GNS1/SUR4 family Pfam Description: GNS1/SUR4 family
  misc_feature (1)..(193): Homolog of NCBI NO: 19033556 NR Description: putative long chain fatty acid elongation enzyme
  misc_feature (1)..(191): Homolog of NCBI NO: 15230729 NR Description: expressed protein [Arabidopsis thaliana]
  misc_feature (1)..(182): Homolog of NCBI NO: 15230725 NR Description: expressed protein [Arabidopsis thaliana] unknown protein [Arabidopsis thaliana] unknown protein [Arabidopsis thaliana]
  misc_feature (1)..(188): Homolog of NCBI NO: 15222085 NR Description: hypothetical protein [Arabidopsis thaliana]
  misc_feature (1)..(177): Homolog of NCBI NO: 15234538 NR Description: expressed protein [Arabidopsis thaliana]
  misc_feature (1)..(193): Homolog of NCBI NO: 19569971 NR Description: Hypothetical 36.2 kDa protein in UBP12-CDC6 region. [Dictyostelium discoideum] >gi|28829059|gb|AAM43611.2|
  misc_feature (1)..(181): Homolog of NCBI NO: 28828933 NR Description: similar to GNS1/SUR4 family protein
  misc_feature (1)..(193): Homolog of NCBI NO: 40740549 NR Description: hypothetical protein AN8117.2 [Aspergillus
  misc_feature (1)..(185): Homolog of NCBI NO: 40739267 NR Description: hypothetical protein AN6435.2 [Aspergillus
  misc_feature (1)..(189): Homolog of NCBI NO: 8050874 NR Description: long chain fatty acid elongation enzyme
MAGGCALSTAATAPAPRWAWAFCFPPRGATEASGPVFFWAHVFYLSKVYELGDTLLILLARRPLTLLHVYHHALVVAMCYLWLATRQSLMPVALVTNAGVHVVMYSYYLSCSVGLRWPGRWKRAVTELQIAQFLFSFAASVVMLWLHFAAGGCEGMAGWVFNAVFNASLLALFLNFHGAAYKGAAKANKGKAE

SEQ ID NO: 6328 - DNA, 1768 bp, Zea mays subsp. mays
  misc_feature (1)..(1768): Ceres Seq. ID no. 12409131
  misc_feature: MA Experiment ID: 108522 Result: Down-regulated in Transcription
  misc_feature: MA Experiment 108522 PARAMETER Experiment Name: Zm_42deg_Heat_P Parameter: Age (day) Value: 8
  misc_feature: MA Experiment 108522 PARAMETER Experiment Name: Zm_42deg_Heat_P Parameter: Organism Value: Zea mays
  misc_feature: MA Experiment 108522 PARAMETER Experiment Name: Zm_42deg_Heat_P Parameter: Plant Line Value: 35A19
  misc_feature: MA Experiment 108522 PARAMETER Experiment Name: Zm_42deg_Heat_P Parameter: Temperature (deg C) Value: 42 vs. 22
  misc_feature: MA Experiment 108522 PARAMETER Experiment Name: Zm_42deg_Heat_P Parameter: Timepoint (hr) Value: 1
  misc_feature: MA Experiment 108522 PARAMETER Experiment Name: Zm_42deg_Heat_P Parameter: Tissue Value: Aerial
  misc_feature: MA Experiment ID: 108535 Result: Down-regulated in Transcription
  misc_feature: MA Experiment 108535 PARAMETER Experiment Name: Zm_Meristem_P Parameter: Age (day) Value: 8
  misc_feature: MA Experiment 108535 PARAMETER Experiment Name: Zm_Meristem_P Parameter: Organism Value: Zea mays
  misc_feature: MA Experiment 108535 PARAMETER Experiment Name: Zm_Meristem_P Parameter: Plant Line Value: 35A19
  misc_feature: MA Experiment 108535 PARAMETER Experiment Name: Zm_Meristem_P Parameter: Tissue Value: Root Meristem vs. Above Root Meristem
  misc_feature: MA Experiment ID: 108543 Result: Up-regulated in Transcription
  misc_feature: MA Experiment ID: 20000477 Result: Down-regulated in Transcription
  misc_feature: MA Experiment 20000477 PARAMETER Experiment Name: Zm_5mM_SA_P Parameter: Age (day) Value: 10
  misc_feature: MA Experiment 20000477 PARAMETER Experiment Name: Zm_5mM_SA_P Parameter: Organism Value: Zea mays
  misc_feature: MA Experiment 20000477 PARAMETER Experiment Name: Zm_5mM_SA_P Parameter: Plant Line Value: 35A19
  misc_feature: MA Experiment 20000477 PARAMETER Experiment Name: Zm_5mM_SA_P Parameter: Timepoint (hr) Value: 48
  misc_feature: MA Experiment 20000477 PARAMETER Experiment Name: Zm_5mM_SA_P Parameter: Tissue Value: Aerial
  misc_feature: MA Experiment 20000477 PARAMETER Experiment Name: Zm_5mM_SA_P Parameter: Treatment Value: 5mM SA vs. No Treatment
  misc_feature: MA Experiment ID: 20000478 Result: Down-regulated in Transcription
  misc_feature: MA Experiment 20000478 PARAMETER Experiment Name: Zm_5mM_SA_P Parameter: Age (day) Value: 11
  misc_feature: MA Experiment 20000478 PARAMETER Experiment Name: Zm_5mM_SA_P Parameter: Organism Value: Zea mays
  misc_feature: MA Experiment 20000478 PARAMETER Experiment Name: Zm_5mM_SA_P Parameter: Plant Line Value: 35A19
  misc_feature: MA Experiment 20000478 PARAMETER Experiment Name: Zm_5mM_SA_P Parameter: Timepoint (hr) Value: 72
  misc_feature: MA Experiment 20000478 PARAMETER Experiment Name: Zm_5mM_SA_P Parameter: Tissue Value: Aerial
  misc_feature: MA Experiment 20000478 PARAMETER Experiment Name: Zm_5mM_SA_P Parameter: Treatment Value: 5mM SA vs. No Treatment
  misc_feature: MA Experiment ID: 20000479 Result: Down-regulated in Transcription
  misc_feature: MA Experiment 20000479 PARAMETER Experiment Name: Zm_Drought_P Parameter: Age (day) Value: 10
  misc_feature: MA Experiment 20000479 PARAMETER Experiment Name: Zm_Drought_P Parameter: Organism Value: Zea mays
  misc_feature: MA Experiment 20000479 PARAMETER Experiment Name: Zm_Drought_P Parameter: Plant Line Value: 35A19
  misc_feature: MA Experiment 20000479 PARAMETER Experiment Name: Zm_Drought_P Parameter: Timepoint (hr) Value: 48
  misc_feature: MA Experiment 20000479 PARAMETER Experiment Name: Zm_Drought_P Parameter: Tissue Value: Aerial
  misc_feature: MA Experiment 20000479 PARAMETER Experiment Name: Zm_Drought_P Parameter: Treatment Value: Drought vs. No Drought
  misc_feature: MA Experiment ID: 20000480 Result: Down-regulated in Transcription
  misc_feature: MA Experiment 20000480 PARAMETER Experiment Name: Zm_Drought_P Parameter: Age (day) Value: 11
  misc_feature: MA Experiment 20000480 PARAMETER Experiment Name: Zm_Drought_P Parameter: Organism Value: Zea mays
  misc_feature: MA Experiment 20000480 PARAMETER Experiment Name: Zm_Drought_P Parameter: Plant Line Value: 35A19
  misc_feature: MA Experiment 20000480 PARAMETER Experiment Name: Zm_Drought_P Parameter: Timepoint (hr) Value: 72
  misc_feature: MA Experiment 20000480 PARAMETER Experiment Name: Zm_Drought_P Parameter: Tissue Value: Aerial
  misc_feature: MA Experiment 20000480 PARAMETER Experiment Name: Zm_Drought_P Parameter: Treatment Value: Drought vs. No Drought
  misc_feature: MA Experiment ID: 20000492 Result: Down-regulated in Transcription
  misc_feature: MA Experiment 20000492 PARAMETER Experiment Name: Zm_Hybrid_Seed_Dev_P Parameter: DAP Value: 12
  misc_feature: MA Experiment 20000492 PARAMETER Experiment Name: Zm_Hybrid_Seed_Dev_P Parameter: Organism Value: Zea mays
  misc_feature: MA Experiment 20000492 PARAMETER Experiment Name: Zm_Hybrid_Seed_Dev_P Parameter: Plant Line Value: 35A19
  misc_feature: MA Experiment 20000492 PARAMETER Experiment Name: Zm_Hybrid_Seed_Dev_P Parameter: Tissue Value: Fert Kernel vs. Unfert Floret
atctcttgtgccagcacaatgatgctttgtcatatctagggagaagtgagtaaaagccatgagtgatgattatgcttctcttcttcttttccttcttaatgacgtactgccagtacgtacgtgctgttgtcagggaactgtatccgaattccaaattttgaacatgatttagcaagacagacagagagaaagagaatagttgactagttgtaaacttgtaatgtatggatcatgcctttcattcgatggctactgatcttgcttcgagcgcagtctgccgcggacctggcctgggagatagccgtcctggaggagcaagtcgtccgcaaggagctgcacctgctgtccctgtacagagccgcgttcgaccagtacctcggcgtctcccctcgcgcgtctgctcaggaaccgcgccatgagcgcagcagcagaagggctactgctgctgacgacgaaggcgcccttcgcctgaggagcatcaaggagtctgcgtcctacagcctaccaacgctctccgattctaaacgcgtagagctctccaggtgctcctcagggcggtccagcctggccaacttcctgagcgcctcgatcgctgagtacgtgcctaagatctcgtgcaagctctcggaggacatactgcggtgcgtctccgccgtctactgcaagctcgcgagcaggccgctgtcgcaggaggaggaggaggcgaggtccgagacgccgccgttcacgccttctctctcggtctcgtccgcgtcgagctccttctccctcaagaagcagcaccccgtccgtggctggagccctcggtgctactacaacgccgacgcgactgcgaccccggacgcgtacgcttcgtccggcgggagcagtgggcggtacagtggggtgatggttttcccagggatacatgtagacgaggagaagtttgagtatgcctgcaaaatcctggacactatcagatcgctgatcaaacggctggagaagattgatcctagaaagatggcacatgaagagcagctctgtttctgggtcaacatccacaatgccttggttatgcatgctttcatggcctatggattacaggaaaaacggatgaaaagcactgacttgattctgaaggctgcatacaatgtgggtgggcattcagtgaactcccaaactatccagaactcgattctaggatgccagtcccaccgcccttcactgtgggttcggacactatttacgccgacgaaaaaatctgggagctccatacatccatatgcgcttcagtacgcagagccaattgcgcactttgcgctctcgaccggcgcgttttcagacccacctgtgaggctgtacacagccaagaaactgtaccatcagctggagcaagccagggccgagttcatccaagcaaatgtcatggtccggaggcagaccatcttcctgcccaaggttctccacttctatgcgaaggatgcttccctggagctacctgaccttgttgacatagtgtgcgagagcatgcctgagctgcagcgaaaagagatcaggcagtatcttaggaggaggatcgacaagtgtgttcagtggttgccctacaagtcttctttcaggtacactgtgcatagcagtttggctgagtaggcacttttttttcttctctatgtgcttgtaaataaggagccatgattctaagaacagtcgtctgttggggtgtgtgtgtgtatgtaaaactatattgtgacagttctttctttcttagaggaaaattacagcttatctc

SEQ ID NO: 6329 - protein, 465 aa, Zea mays subsp. mays
  peptide (1)..(465): Ceres Seq. ID no. 12409132
  misc_feature (243)..(387): Pfam Name: Protein of unknown function, DUF547 Pfam Description: Protein of unknown function, DUF547
  misc_feature (111)..(459): Homolog of NCBI NO: 15240016 NR Description: putative protein; protein id: At5g66600.1 thaliana] >gi|10177541|dbj|BAB10936.1|
  misc_feature (16)..(103): Homolog of NCBI NO: 15240016 NR Description: putative protein; protein id: At5g66600.1 thaliana] >gi|10177541|dbj|BAB10936.1|
  misc_feature (190)..(459): Homolog of NCBI NO: 18394945 NR Description: unknown protein; protein id: At1g21060.1
  misc_feature (190)..(459): Homolog of NCBI NO: 25372915 NR Description: T22I11.12 protein - Arabidopsis thaliana Contains similarity to an unknown protein F14G6.22 gi|6642679 Arabidopsis thaliana gb|AC015450. ESTs gb|AI994240 and gb|T42814
  misc_feature (14)..(187): Homolog of NCBI NO: 18394945 NR Description: unknown protein; protein id: At1g21060.1
  misc_feature (13)..(465): Homolog of NCBI NO: 34905078 NR Description: P0686C03.22 [Oryza sativa (japonica
  misc_feature (14)..(187): Homolog of NCBI NO: 25372915 NR Description: T22I11.12 protein - Arabidopsis thaliana Contains similarity to an unknown protein F14G6.22 gi|6642679 Arabidopsis thaliana gb|AC015450. ESTs gb|AI994240 and gb|T42814
  misc_feature (9)..(463): Homolog of NCBI NO: 18411161 NR Description: expressed protein; protein id: At1g76620.1, by cDNA: gi_16974597 [Arabidopsis thaliana] At1g76620/F14G6_22 [Arabidopsis thaliana]
  misc_feature (66)..(464): Homolog of NCBI NO: 40539066 NR Description: hypothetical protein [Oryza sativa (japonica
  misc_feature (118)..(463): Homolog of NCBI NO: 7486263 NR Description: hypothetical protein At2g23700 [imported] -
MPFIRWLLILLRAQSAADLAWEIAVLEEQVVRKELHLLSLYRAAFDQYLGVSPRASAQEPRHERSSRRATAADDEGALRLRSIKESASYSLPTLSDSKRVELSRCSSGRSSLANFLSASIAEYVPKISCKLSEDILRCVSAVYCKLASRPLSQEEEEARSETPPFTPSLSVSSASSSFSLKKQHPVRGWSPRCYYNADATATPDAYASSGGSSGRYSGVMVFPGIHVDEEKFEYACKILDTIRSLIKRLEKIDPRKMAHEEQLCFWVNIHNALVMHAFMAYGLQEKRMKSTDLILKAAYNVGGHSVNSQTIQNSILGCQSHRPSLWVRTLFTPTKKSGSSIHPYALQYAEPIAHFALSTGAFSDPPVRLYTAKKLYHQLEQARAEFIQANVMVRRQTIFLPKVLHFYAKDASLELPDLVDIVCESMPELQRKEIRQYLRRRIDKCVQWLPYKSSFRYTVHSSLAE

SEQ ID NO: 6330 - protein, 246 aa, Zea mays subsp. mays
  peptide (1)..(246): Ceres Seq. ID no. 12409133
  misc_feature (24)..(168): Pfam Name: Protein of unknown function, DUF547 Pfam Description: Protein of unknown function, DUF547
  misc_feature (1)..(246): Homolog of NCBI NO: 34905078 NR Description: P0686C03.22 [Oryza sativa (japonica
  misc_feature (1)..(240): Homolog of NCBI NO: 15240016 NR Description: putative protein; protein id: At5g66600.1 thaliana] >gi|10177541|dbj|BAB10936.1|
  misc_feature (1)..(240): Homolog of NCBI NO: 18394945 NR Description: unknown protein; protein id: At1g21060.1
  misc_feature (1)..(240): Homolog of NCBI NO: 25372915 NR Description: T22I11.12 protein - Arabidopsis thaliana Contains similarity to an unknown protein F14G6.22 gi|6642679 Arabidopsis thaliana gb|AC015450. ESTs gb|AI994240 and gb|T42814
  misc_feature (1)..(244): Homolog of NCBI NO: 18411161 NR Description: expressed protein; protein id: At1g76620.1, by cDNA: gi_16974597 [Arabidopsis thaliana] At1g76620/F14G6_22 [Arabidopsis thaliana]
  misc_feature (1)..(245): Homolog of NCBI NO: 40539066 NR Description: hypothetical protein [Oryza sativa (japonica
  misc_feature (1)..(244): Homolog of NCBI NO: 7486263 NR Description: hypothetical protein At2g23700 [imported] -
  misc_feature (1)..(244): Homolog of NCBI NO: 15224054 NR Description: unknown protein; protein id: At2g23700.1 thaliana] >gi|20197175|gb|AAC17092.2| unknown protein thaliana] >gi|26451207|dbj|BAC42707.1| unknown protein
  misc_feature (1)..(244): Homolog of NCBI NO: 39104579 NR Description: unknown protein [Arabidopsis thaliana]
  misc_feature (1)..(244): Homolog of NCBI NO: 28916180 NR Description: putative ternary complex factor MIP1 [Antirrhinum
MVFPGIHVDEEKFEYACKILDTIRSLIKRLEKIDPRKMAHEEQLCFWVNIHNALVMHAFMAYGLQEKRMKSTDLILKAAYNVGGHSVNSQTIQNSILGCQSHRPSLWVRTLFTPTKKSGSSIHPYALQYAEPIAHFALSTGAFSDPPVRLYTAKKLYHQLEQARAEFIQANVMVRRQTIFLPKVLHFYAKDASLELPDLVDIVCESMPELQRKEIRQYLRRRIDKCVQWLPYKSSFRYTVHSSLAE

SEQ ID NO: 6331 - DNA, 1411 bp, Zea mays subsp. mays
  misc_feature (1)..(1411): Ceres Seq. ID no. 12409129
  misc_feature: MA Experiment ID: 108522 Result: Up-regulated in Transcription
  misc_feature: MA Experiment 108522 PARAMETER Experiment Name: Zm_42deg_Heat_P Parameter: Age (day) Value: 8
  misc_feature: MA Experiment 108522 PARAMETER Experiment Name: Zm_42deg_Heat_P Parameter: Organism Value: Zea mays
  misc_feature: MA Experiment 108522 PARAMETER Experiment Name: Zm_42deg_Heat_P Parameter: Plant Line Value: 35A19
  misc_feature: MA Experiment 108522 PARAMETER Experiment Name: Zm_42deg_Heat_P Parameter: Temperature (deg C) Value: 42 vs. 22
  misc_feature: MA Experiment 108522 PARAMETER Experiment Name: Zm_42deg_Heat_P Parameter: Timepoint (hr) Value: 1
  misc_feature: MA Experiment 108522 PARAMETER Experiment Name: Zm_42deg_Heat_P Parameter: Tissue Value: Aerial
  misc_feature: MA Experiment ID: 108523 Result: Up-regulated in Transcription
  misc_feature: MA Experiment 108523 PARAMETER Experiment Name: Zm_42deg_Heat_P Parameter: Age (day) Value: 8
  misc_feature: MA Experiment 108523 PARAMETER Experiment Name: Zm_42deg_Heat_P Parameter: Organism Value: Zea mays
  misc_feature: MA Experiment 108523 PARAMETER Experiment Name: Zm_42deg_Heat_P Parameter: Plant Line Value: 35A19
  misc_feature: MA Experiment 108523 PARAMETER Experiment Name: Zm_42deg_Heat_P Parameter: Temperature (deg C) Value: 42 vs. 22
  misc_feature: MA Experiment 108523 PARAMETER Experiment Name: Zm_42deg_Heat_P Parameter: Timepoint (hr) Value: 6
  misc_feature: MA Experiment 108523 PARAMETER Experiment Name: Zm_42deg_Heat_P Parameter: Tissue Value: Aerial
  misc_feature: MA Experiment ID: 108536 Result: Down-regulated in Transcription
  misc_feature: MA Experiment 108536 PARAMETER Experiment Name: Zm_Meristem_P Parameter: Age (day) Value: 8
  misc_feature: MA Experiment 108536 PARAMETER Experiment Name: Zm_Meristem_P Parameter: Organism Value: Zea mays
  misc_feature: MA Experiment 108536 PARAMETER Experiment Name: Zm_Meristem_P Parameter: Plant Line Value: 35A19
  misc_feature: MA Experiment 108536 PARAMETER Experiment Name: Zm_Meristem_P Parameter: Tissue Value: Shoot Meristem vs. Above Shoot Meristem
  misc_feature: MA Experiment ID: 108545 Result: Up-regulated in Transcription
  misc_feature: MA Experiment 108545 PARAMETER Experiment Name: Zm_Imbibed_Seeds_P Parameter: Age (day) Value: 3 vs. 2
  misc_feature: MA Experiment 108545 PARAMETER Experiment Name: Zm_Imbibed_Seeds_P Parameter: Organism Value: Zea mays
  misc_feature: MA Experiment 108545 PARAMETER Experiment Name: Zm_Imbibed_Seeds_P Parameter: Plant Line Value: 35A19
  misc_feature: MA Experiment 108545 PARAMETER Experiment Name: Zm_Imbibed_Seeds_P Parameter: Tissue Value: Aerial vs. Embryo
  misc_feature: MA Experiment ID: 108547 Result: Up-regulated in Transcription
  misc_feature: MA Experiment 108547 PARAMETER Experiment Name: Zm_Imbibed_Seeds_P Parameter: Age (day) Value: 4 vs. 2
  misc_feature: MA Experiment 108547 PARAMETER Experiment Name: Zm_Imbibed_Seeds_P Parameter: Organism Value: Zea mays
  misc_feature: MA Experiment 108547 PARAMETER Experiment Name: Zm_Imbibed_Seeds_P Parameter: Plant Line Value: 35A19
  misc_feature: MA Experiment 108547 PARAMETER Experiment Name: Zm_Imbibed_Seeds_P Parameter: Tissue Value: Aerial vs. Embryo
cccgctgctgcctgctctcctccccgaaggccgaatccgatagctagcggctagcgccaacaaaacccctctctccgcgcccgctccccaccggtgacagcgcgcccatggctgccttactccgaacggccgcggccctcgcgcccccgccctcgtcgtccctgtccgcacgggagccgcgtgggcggtgcctgcggctagcctgctcccggcgcgcgccggcccgacagcttcgggcgtggctactgccgactccgcacgtcttcggtcgttctgggggccggttccggcgcctgagcgtcaccgaggccgaggaggccgcgcagacggcgacgcaggaggatccagaaaccgaagttactggagagagtgctgcagatgacagtgctggaagcacagacgaaactccatcatttattgtgacaacactgcaatcatacagagaagctctgattaatgatgatgaagcaaaagctgctgagatagaatcctttttactttctatcgaggatgagaagaactctcttttgagcaaaatcactgctctagatgtggaactagcaactcaacgagaacgtatcttgcggattagtgctgattttgacaatttcaggaaaaggacagaaaatgagaagcttaacatgatggaaaatgtgcaaggggaacttatagagagctttttgcctgttctcgataactttgaaagagcaaaaatgcaaataaaggtggaaacagagggagaggagaaaataaataatagctaccagagcattaataagcaatttatcgagattcttaattcattgagtgttgaagatgttgaaactgttggcaaaccatttgatcctatgctgcacgaggctattatgagagaagaatcatcggagtatgaagagggaatcatactccaggaattccgaaaaggcttcaaacttggggaaagactacttcgcccagcaatggtcaaggtgtctgcagggccaggccctgaaaattctggagatgatgaccctacagttgttgaagatagtgtggcacctcaaaaggttgaggatgttgaagaagacggttttgatgacggcgatgcagaataggtggctggagcttcagctgtgaatcaacaagaacaagtccagaaattttgatgcttttctggagcgtgccaagcaggtaataggattagtaccaattcgttcaagctagagttaggtccccaaatgtgctggttctttactgctgctgacatgggggtgttggtattgcgacaaatttgtgtttctacccgccgtggtcaactttttgttcttacgaaggggaattttcgtggttcatagatgcaaaaatgatatttgtaaggactaaattggctcagtttgctattgataatcaatatatgaattccattgtttgt

SEQ ID NO: 6332 - protein, 328 aa, Zea mays subsp. mays
  peptide (1)..(328): Ceres Seq. ID no. 12409130
  misc_feature (130)..(290): Pfam Name: GrpE Pfam Description: GrpE
  misc_feature (26)..(295): Homolog of NCBI NO: 30686476 NR Description: chloroplast GrpE protein [Arabidopsis thaliana] GrpE protein [Arabidopsis thaliana] >gi|9759048|dbj|BAB09570.1|
  misc_feature (26)..(295): Homolog of NCBI NO: 18418410 NR Description: chloroplast GrpE protein; protein id: supported by cDNA: gi_13878046, supported by cDNA: gi_17104678 thaliana] >gi|13878047|gb|AAK44101.1|AF370286_1 putative
  misc_feature (91)..(292): Homolog of NCBI NO: 18400095 NR Description: putative heat shock protein; protein id: supported by cDNA: 40701., supported by cDNA: gi_17529221
  misc_feature (104)..(292): Homolog of NCBI NO: 21593629 NR Description: putative heat shock protein [Arabidopsis thaliana]
  misc_feature (89)..(300): Homolog of NCBI NO: 15384277 NR Description: co-chaperone CGE1 precursor isoform a
  misc_feature (88)..(308): Homolog of NCBI NO: 32488078 NR Description: OSJNBa0084A10.6 [Oryza sativa (japonica
  misc_feature (90)..(300): Homolog of NCBI NO: 15384279 NR Description: co-chaperone CGE1 precursor isoform b
  misc_feature (59)..(303): Homolog of NCBI NO: 22298857 NR Description: heat shock protein [Thermosynechococcus elongatus >gi|22295038|dbj|BAC08866.1| heat shock protein
  misc_feature (110)..(289): Homolog of NCBI NO: 37523763 NR Description: heat shock protein [Gloeobacter violaceus]
  misc_feature (77)..(315): Homolog of NCBI NO: 33239468 NR Description: Molecular chaperone GrpE, heat shock protein marinus subsp. marinus str. CCMP1375] >gi|33236993|gb|AAP99062.1| chaperone GrpE, heat shock protein [Prochlorococcus marinus
MAALLRTAAALAPPPSSSLSAREPRGRCLRLACSRRAPARQLRAWLLPTPHVFGRSGGRFRRLSVTEAEEAAQTATQEDPETEVTGESAADDSAGSTDETPSFIVTTLQSYREALINDDEAKAAEIESFLLSIEDEKNSLLSKITALDVELATQRERILRISADFDNFRKRTENEKLNMMENVQGELIESFLPVLDNFERAKMQIKVETEGEEKINNSYQSINKQFIEILNSLSVEDVETVGKPFDPMLHEAIMREESSEYEEGIILQEFRKGFKLGERLLRPAMVKVSAGPGPENSGDDDPTVVEDSVAPQKVEDVEEDGFDDGDAE

SEQ ID NO: 6333 - DNA, 764 bp, Zea mays subsp. mays
  misc_feature (1)..(764): Ceres Seq. ID no. 12403432
  misc_feature: MA Experiment ID: 108504 Result: Up-regulated in Transcription
  misc_feature: MA Experiment 108504 PARAMETER Experiment Name: Zm_Drought_P Parameter: Age (day) Value: 8
  misc_feature: MA Experiment 108504 PARAMETER Experiment Name: Zm_Drought_P Parameter: Organism Value: Zea mays
  misc_feature: MA Experiment 108504 PARAMETER Experiment Name: Zm_Drought_P Parameter: Plant Line Value: 35A19
  misc_feature: MA Experiment 108504 PARAMETER Experiment Name: Zm_Drought_P Parameter: Timepoint (hr) Value: 12
  misc_feature: MA Experiment 108504 PARAMETER Experiment Name: Zm_Drought_P Parameter: Tissue Value: Aerial
  misc_feature: MA Experiment 108504 PARAMETER Experiment Name: Zm_Drought_P Parameter: Treatment Value: Drought vs. No Drought
  misc_feature: MA Experiment ID: 108527 Result: Down-regulated in Transcription
  misc_feature: MA Experiment 108527 PARAMETER Experiment Name: Zm_5mM_NO_P Parameter: Age (day) Value: 8
  misc_feature: MA Experiment 108527 PARAMETER Experiment Name: Zm_5mM_NO_P Parameter: Organism Value: Zea mays
  misc_feature: MA Experiment 108527 PARAMETER Experiment Name: Zm_5mM_NO_P Parameter: Plant Line Value: 35A19
  misc_feature: MA Experiment 108527 PARAMETER Experiment Name: Zm_5mM_NO_P Parameter: Timepoint (hr) Value: 6
  misc_feature: MA Experiment 108527 PARAMETER Experiment Name: Zm_5mM_NO_P Parameter: Tissue Value: Aerial
  misc_feature: MA Experiment 108527 PARAMETER Experiment Name: Zm_5mM_NO_P Parameter: Treatment Value: 5mM NO vs. No Treatment
  misc_feature: MA Experiment ID: 108528 Result: Up-regulated in Transcription
  misc_feature: MA Experiment 108528 PARAMETER Experiment Name: Zm_Imbibed_Seeds_P Parameter: Age (day) Value: 5 vs. 2
  misc_feature: MA Experiment 108528 PARAMETER Experiment Name: Zm_Imbibed_Seeds_P Parameter: Organism Value: Zea mays
  misc_feature: MA Experiment 108528 PARAMETER Experiment Name: Zm_Imbibed_Seeds_P Parameter: Plant Line Value: 35A19
  misc_feature: MA Experiment 108528 PARAMETER Experiment Name: Zm_Imbibed_Seeds_P Parameter: Tissue Value: Aerial vs. Embryo
  misc_feature: MA Experiment ID: 108529 Result: Up-regulated in Transcription
  misc_feature: MA Experiment 108529 PARAMETER Experiment Name: Zm_Imbibed_Seeds_P Parameter: Age (day) Value: 5 vs. 2
  misc_feature: MA Experiment 108529 PARAMETER Experiment Name: Zm_Imbibed_Seeds_P Parameter: Organism Value: Zea mays
  misc_feature: MA Experiment 108529 PARAMETER Experiment Name: Zm_Imbibed_Seeds_P Parameter: Plant Line Value: 35A19
  misc_feature: MA Experiment 108529 PARAMETER Experiment Name: Zm_Imbibed_Seeds_P Parameter: Tissue Value: Roots vs. Embryo
  misc_feature: MA Experiment ID: 108530 Result: Up-regulated in Transcription
  misc_feature: MA Experiment 108530 PARAMETER Experiment Name: Zm_Imbibed_Seeds_P Parameter: Age (day) Value: 6 vs. 2
  misc_feature: MA Experiment 108530 PARAMETER Experiment Name: Zm_Imbibed_Seeds_P Parameter: Organism Value: Zea mays
  misc_feature: MA Experiment 108530 PARAMETER Experiment Name: Zm_Imbibed_Seeds_P Parameter: Plant Line Value: 35A19
  misc_feature: MA Experiment 108530 PARAMETER Experiment Name: Zm_Imbibed_Seeds_P Parameter: Tissue Value: Aerial vs. Embryo
  misc_feature: MA Experiment ID: 108533 Result: Down-regulated in Transcription
  misc_feature: MA Experiment 108533 PARAMETER Experiment Name: Zm_4deg_Cold_P Parameter: Age (hr) Value: 8
  misc_feature: MA Experiment 108533 PARAMETER Experiment Name: Zm_4deg_Cold_P Parameter: Organism Value: Zea mays
  misc_feature: MA Experiment 108533 PARAMETER Experiment Name: Zm_4deg_Cold_P Parameter: Plant Line Value: 35A19
  misc_feature: MA Experiment 108533 PARAMETER Experiment Name: Zm_4deg_Cold_P Parameter: Temperature (deg C) Value: 4 vs. 22
  misc_feature: MA Experiment 108533 PARAMETER Experiment Name: Zm_4deg_Cold_P Parameter: Timepoint (hr) Value: 1
  misc_feature: MA Experiment 108533 PARAMETER Experiment Name: Zm_4deg_Cold_P Parameter: Tissue Value: Aerial
  misc_feature: MA Experiment ID: 108534 Result: Down-regulated in Transcription
  misc_feature: MA Experiment 108534 PARAMETER Experiment Name: Zm_4deg_Cold_P Parameter: Age (hr) Value: 8
  misc_feature: MA Experiment 108534 PARAMETER Experiment Name: Zm_4deg_Cold_P Parameter: Organism Value: Zea mays
  misc_feature: MA Experiment 108534 PARAMETER Experiment Name: Zm_4deg_Cold_P Parameter: Plant Line Value: 35A19
  misc_feature: MA Experiment 108534 PARAMETER Experiment Name: Zm_4deg_Cold_P Parameter: Temperature (deg C) Value: 4 vs. 22
  misc_feature: MA Experiment 108534 PARAMETER Experiment Name: Zm_4deg_Cold_P Parameter: Timepoint (hr) Value: 6
  misc_feature: MA Experiment 108534 PARAMETER Experiment Name: Zm_4deg_Cold_P Parameter: Tissue Value: Aerial
  misc_feature: MA Experiment ID: 108535 Result: Down-regulated in Transcription
  misc_feature: MA Experiment 108535 PARAMETER Experiment Name: Zm_Meristem_P Parameter: Age (day) Value: 8
  misc_feature: MA Experiment 108535 PARAMETER Experiment Name: Zm_Meristem_P Parameter: Organism Value: Zea mays
  misc_feature: MA Experiment 108535 PARAMETER Experiment Name: Zm_Meristem_P Parameter: Plant Line Value: 35A19
  misc_feature: MA Experiment 108535 PARAMETER Experiment Name: Zm_Meristem_P Parameter: Tissue Value: Root Meristem vs. Above Root Meristem
  misc_feature: MA Experiment ID: 108543 Result: Up-regulated in Transcription
  misc_feature: MA Experiment ID: 108544 Result: Up-regulated in Transcription
  misc_feature: MA Experiment ID: 108546 Result: Up-regulated in Transcription
  misc_feature: MA Experiment 108546 PARAMETER Experiment Name: Zm_Imbibed_Seeds_P Parameter: Age (day) Value: 3 vs. 2
  misc_feature: MA Experiment 108546 PARAMETER Experiment Name: Zm_Imbibed_Seeds_P Parameter: Organism Value: Zea mays
  misc_feature: MA Experiment 108546 PARAMETER Experiment Name: Zm_Imbibed_Seeds_P Parameter: Plant Line Value: 35A19
  misc_feature: MA Experiment 108546 PARAMETER Experiment Name: Zm_Imbibed_Seeds_P Parameter: Tissue Value: Roots vs. Embryo
  misc_feature: MA Experiment ID: 108547 Result: Up-regulated in Transcription
  misc_feature: MA Experiment 108547 PARAMETER Experiment Name: Zm_Imbibed_Seeds_P Parameter: Age (day) Value: 4 vs. 2
  misc_feature: MA Experiment 108547 PARAMETER Experiment Name: Zm_Imbibed_Seeds_P Parameter: Organism Value: Zea mays
  misc_feature: MA Experiment 108547 PARAMETER Experiment Name: Zm_Imbibed_Seeds_P Parameter: Plant Line Value: 35A19
  misc_feature: MA Experiment 108547 PARAMETER Experiment Name: Zm_Imbibed_Seeds_P Parameter: Tissue Value: Aerial vs. Embryo
  misc_feature: MA Experiment ID: 108556 Result: Up-regulated in Transcription
  misc_feature: MA Experiment 108556 PARAMETER Experiment Name: Zm_Drought_P Parameter: Age (day) Value: 9
  misc_feature: MA Experiment 108556 PARAMETER Experiment Name: Zm_Drought_P Parameter: Organism Value: Zea mays
  misc_feature: MA Experiment 108556 PARAMETER Experiment Name: Zm_Drought_P Parameter: Plant Line Value: 35A19
  misc_feature: MA Experiment 108556 PARAMETER Experiment Name: Zm_Drought_P Parameter: Timepoint (hr) Value: 24
  misc_feature: MA Experiment 108556 PARAMETER Experiment Name: Zm_Drought_P Parameter: Tissue Value: Aerial
  misc_feature: MA Experiment 108556 PARAMETER Experiment Name: Zm_Drought_P Parameter: Treatment Value: Drought vs. No Drought
  misc_feature: MA Experiment ID: 108687 Result: Down-regulated in Transcription
  misc_feature: MA Experiment 108687 PARAMETER Experiment Name: Zm_Embryos-Flowers__P Parameter: Tissue Value: Embryo vs. Aerial+
  misc_feature: MA Experiment ID: 20000480 Result: Up-regulated in Transcription
  misc_feature: MA Experiment 20000480 PARAMETER Experiment Name: Zm_Drought_P Parameter: Age (day) Value: 11
  misc_feature: MA Experiment 20000480 PARAMETER Experiment Name: Zm_Drought_P Parameter: Organism Value: Zea mays
  misc_feature: MA Experiment 20000480 PARAMETER Experiment Name: Zm_Drought_P Parameter: Plant Line Value: 35A19
  misc_feature: MA Experiment 20000480 PARAMETER Experiment Name: Zm_Drought_P Parameter: Timepoint (hr) Value: 72
  misc_feature: MA Experiment 20000480 PARAMETER Experiment Name: Zm_Drought_P Parameter: Tissue Value: Aerial
  misc_feature: MA Experiment 20000480 PARAMETER Experiment Name: Zm_Drought_P Parameter: Treatment Value: Drought vs. No Drought
  misc_feature: MA Experiment ID: 20000535 Result: Down-regulated in Transcription
  misc_feature: MA Experiment 20000535 PARAMETER Experiment Name: Zm_Hybrid_Seed_Dev_P Parameter: DAP Value: 30 vs. 12
  misc_feature: MA Experiment 20000535 PARAMETER Experiment Name: Zm_Hybrid_Seed_Dev_P Parameter: Organism Value: Zea mays
  misc_feature: MA Experiment 20000535 PARAMETER Experiment Name: Zm_Hybrid_Seed_Dev_P Parameter: Plant Line Value: 35A19
  misc_feature: MA Experiment 20000535 PARAMETER Experiment Name: Zm_Hybrid_Seed_Dev_P Parameter: Tissue Value: Embryo vs. Unfert Floret
gacaagcaagaacagctgtcgatccaattgtcacttgctctccctccaacaagctaattaaggccggtcatccctcttctagctcgtttcattatccatggcggaggagaagcaccaccaccaccacctgttccaccacaagaaggacgaggagcaggaggagcagctcgccggcggcgggtacggcgagtccgccgagtacacggaggccacggtgacggaggtcgtgtccacgggcgagaacgagtacgacgagtacaagaaggaggagaagcagcacaagcacaagcagcacctcggcgaggccggcgccatcgccgccggcgccttcgcactctacgagaagcacgaggcaaagaaggacccggagcacgcgcaccgccacaagatcgaggaggaggtcgcggcggcggcggccgtcggctccggcggcttcgccttccacgagcaccacgagaagaagaaggaccacaaggacgccgaggaggccggcggcgagaagaagcaccacttcttcggctgattgatcctcccgtatcgtcgtccctccccgtgtgctacgcgtgcgtgtgtgagagtgatatcgagcgcccgccgtgttgtgcgcgcgtacgtatgtatgcgctcgtgtgatgcacgaataagcgtggctacgtaatctatcgtatgtatacgtgtgtgtatgcatgtgcttgtgtatgatcgtggtacgaggaccgaaaaaatgtatgcaactctgatttacttacatgtttagttgtttc

SEQ ID NO: 6334 - protein, 141 aa, Zea mays subsp. mays
  peptide (1)..(141): Ceres Seq. ID no. 12403433
  misc_feature (54)..(107): Pfam Name: ABA/WDS induced protein Pfam Description: ABA/WDS induced protein
  misc_feature (1)..(141): Homolog of NCBI NO: 15667623 NR Description: drought inducible 22 kD protein [Saccharum
  misc_feature (1)..(141): Homolog of NCBI NO: 7489448 NR Description: abscisic acid- and stress-induced protein - rice
  misc_feature (1)..(141): Homolog of NCBI NO: 6525055 NR Description: anth [Lilium longiflorum]
  misc_feature (1)..(140): Homolog of NCBI NO: 7484607 NR Description: ABA stress ripening protein - common ice plant
  misc_feature (26)..(140): Homolog of NCBI NO: 16588758 NR Description: abscisic stress ripening-like protein [Prunus
  misc_feature (26)..(140): Homolog of NCBI NO: 2677824 NR Description: abscisic stress ripening protein homolog [Prunus
  misc_feature (1)..(140): Homolog of NCBI NO: 7484489 NR Description: abscisic acid- and water-stress-inducible protein
  misc_feature (26)..(138): Homolog of NCBI NO: 38532363 NR Description: abscisic acid and water deficit stress inducible
  misc_feature (1)..(140): Homolog of NCBI NO: 14582465 NR Description: putative transcription factor [Vitis vinifera]
  misc_feature (1)..(140): Homolog of NCBI NO: 7484497 NR Description: water-stress-inducible protein LP3 - loblolly
MAEEKHHHHHLFHHKKDEEQEEQLAGGGYGESAEYTEATVTEVVSTGENEYDEYKKEEKQHKHKQHLGEAGAIAAGAFALYEKHEAKKDPEHAHRHKIEEEVAAAAAVGSGGFAFHEHHEKKKDHKDAEEAGGEKKHHFFG

SEQ ID NO: 6335 - protein, 71 aa, Zea mays subsp. mays
  peptide (1)..(71): Ceres Seq. ID no. 12403434
  misc_feature (11)..(71): Homolog of NCBI NO: 28574039 NR Description: Salivary gland secretion 1 CG3047-PA
  misc_feature (34)..(71): Homolog of NCBI NO: 28972153 NR Description: mKIAA0324 protein [Mus musculus]
  misc_feature (34)..(71): Homolog of NCBI NO: 5821151 NR Description: RNA binding protein [Homo sapiens]
  misc_feature (34)..(71): Homolog of NCBI NO: 6634015 NR Description: KIAA0324 protein [Homo sapiens]
  misc_feature (34)..(71): Homolog of NCBI NO: 7512967 NR Description: hypothetical protein KIAA0324 - human (fragment)
  misc_feature (34)..(71): Homolog of NCBI NO: 19923466 NR Description: splicing coactivator subunit SRm300; RNA binding
  misc_feature (36)..(71): Homolog of NCBI NO: 134466 NR Description: SALIVARY GLUE PROTEIN SGS-3 PRECURSOR
  misc_feature (34)..(71): Homolog of NCBI NO: 5821151 NR Description: RNA binding protein [Homo sapiens]
  misc_feature (34)..(71): Homolog of NCBI NO: 5821151 NR Description: RNA binding protein [Homo sapiens]
  misc_feature (34)..(71): Homolog of NCBI NO: 6634015 NR Description: KIAA0324 protein [Homo sapiens]
QARTAVDPIVTCSPSNKLIKAGHPSSSSFHYPWRRRSTTTTTCSTTRRTRSRRSSSPAAGTASPPSTRRPR

SEQ ID NO: 6336 - DNA, 1770 bp, Zea mays subsp. mays
  misc_feature (1)..(1770): Ceres Seq. ID no. 12410829
  misc_feature: MA Experiment ID: 108523 Result: Down-regulated in Transcription
  misc_feature: MA Experiment 108523 PARAMETER Experiment Name: Zm_42deg_Heat_P Parameter: Age (day) Value: 8
  misc_feature: MA Experiment 108523 PARAMETER Experiment Name: Zm_42deg_Heat_P Parameter: Organism Value: Zea mays
  misc_feature: MA Experiment 108523 PARAMETER Experiment Name: Zm_42deg_Heat_P Parameter: Plant Line Value: 35A19
  misc_feature: MA Experiment 108523 PARAMETER Experiment Name: Zm_42deg_Heat_P Parameter: Temperature (deg C) Value: 42 vs. 22
  misc_feature: MA Experiment 108523 PARAMETER Experiment Name: Zm_42deg_Heat_P Parameter: Timepoint (hr) Value: 6
  misc_feature: MA Experiment 108523 PARAMETER Experiment Name: Zm_42deg_Heat_P Parameter: Tissue Value: Aerial
  misc_feature: MA Experiment ID: 108529 Result: Up-regulated in Transcription
  misc_feature: MA Experiment 108529 PARAMETER Experiment Name: Zm_Imbibed_Seeds_P Parameter: Age (day) Value: 5 vs. 2
  misc_feature: MA Experiment 108529 PARAMETER Experiment Name: Zm_Imbibed_Seeds_P Parameter: Organism Value: Zea mays
  misc_feature: MA Experiment 108529 PARAMETER Experiment Name: Zm_Imbibed_Seeds_P Parameter: Plant Line Value: 35A19
  misc_feature: MA Experiment 108529 PARAMETER Experiment Name: Zm_Imbibed_Seeds_P Parameter: Tissue Value: Roots vs. Embryo
  misc_feature: MA Experiment ID: 108535 Result: Down-regulated in Transcription
  misc_feature: MA Experiment 108535 PARAMETER Experiment Name: Zm_Meristem_P Parameter: Age (day) Value: 8
  misc_feature: MA Experiment 108535 PARAMETER Experiment Name: Zm_Meristem_P Parameter: Organism Value: Zea mays
  misc_feature: MA Experiment 108535 PARAMETER Experiment Name: Zm_Meristem_P Parameter: Plant Line Value: 35A19
  misc_feature: MA Experiment 108535 PARAMETER Experiment Name: Zm_Meristem_P Parameter: Tissue Value: Root Meristem vs. Above Root Meristem
  misc_feature: MA Experiment ID: 20000535 Result: Down-regulated in Transcription
  misc_feature: MA Experiment 20000535 PARAMETER Experiment Name: Zm_Hybrid_Seed_Dev_P Parameter: DAP Value: 30 vs. 12
  misc_feature: MA Experiment 20000535 PARAMETER Experiment Name: Zm_Hybrid_Seed_Dev_P Parameter: Organism Value: Zea mays
  misc_feature: MA Experiment 20000535 PARAMETER Experiment Name: Zm_Hybrid_Seed_Dev_P Parameter: Plant Line Value: 35A19
  misc_feature: MA Experiment 20000535 PARAMETER Experiment Name: Zm_Hybrid_Seed_Dev_P Parameter: Tissue Value: Embryo vs. Unfert Floret
tctgttcccctttccctcctgcgcaccccgtcttctcctccccgcgtcaaaccccagcacaaaaagcaaccgcccgccgcctcctcgctcctctcccgaatcagccgtcgcggtgcctaatccggccgaccccccctccgatccgcgggtgcccgccgcagaggcggcgcctccgggcctcccccgatgtatagcaacttcaaggagcaggcgatcgagtacgtcaagcaggcagtccaggaggacaatgccggcaactacgtcaaggcgttccctctctacatgaacgcgctcgagtacttcaaaacccacctcaagtacgagaagaaccccaagatcaaggaggccatcaccgccaagttcaccgagtacctccgccgcgccgaggagatccgggcggtcctcgatgagggcggcgcagggcctggggccaacggtggcgacgcagctgtcgccacgcgccccaagacccaagggcaaggatggggacggaggcaacggaggggatgactccgagcagtccaagctgagggcggggctcaactccgccatcatcaccgagaagcccaacattaagtggaacgacgttgccggcctcgagagcgccaagcaggcactgcaggaggccgttatattgcccgtcaagttcccgcagttcttcacgggcaagcggaggccttggagggcgtttcttttgtatggccccccaggaacaggaaagtcttatttggcaaaagctgttgcaaccgaggctgattcaacatttttcagtatatcttcttcagatctggtttcaaagtggatgggtgaaagtgagaaattagttgcaaatctgttccaaatggctcgggaaaatgccccttccattatcttcattgatgaaattgattctttatgcggtcaacgtggagaaggcaatgaaagtgaagcatctaggagaattaagactgaacttcttgtgcaaatgcagggtgttggtcacaatgatgataaagttcttgttcttgctgccacgaatacgccatatgctctggaccaggctgtgcggcgaagatttgacaagcgtatctacattccgctacctgacatgaaagcaaggcaacacatgtttaaggtccatctcggggatacaccgcacagtttaactgaaagtgatttcgagagcttggcccgtcggacagacgggttttctggttctgacgttgctgtctgcgttaaggacgtgttatttgaacccgtgcgcaaaacgcaggatgccatgttcttcttcaaggcggacggtgacatgtggatgccatgtggaccgaagcaaccgggcgccgtgcagaccaccatgcaggagcttgcatccaaaggcctcgctgcgaagattcttccgccccctatctcgagggcggacttcgagaaggtcctgtcgaggcagaggccgacggttagcaagaaggacctggaggtgcacgagaggttcacgaaggagttcggcgaggagggctgacagacgcgggcacccacccatgcacgggctgctgcaccacacaaatgtatattgcttcttatgacttggattgttctgcttggaagtggaagttgcgttacattacaatttggtgtcccaactacggctaatcatgccagctggtttctcgtgttgggctaccaatgggcctctgttgtcagcctatttcatttttattgttgcacatggaatttttccacgggtgtattattatggaataataattgttagcgtggtggagtccttgtggttgc

SEQ ID NO: 6337 - protein, 362 aa, Zea mays subsp. mays
  peptide (1)..(362): Ceres Seq. ID no. 12410830
  misc_feature (94)..(279): Pfam Name: ATPase family associated with various cellular Pfam Description: ATPase family associated with various cellular
  misc_feature (20)..(362): Homolog of NCBI NO: 15226199 NR Description: putative ATPase; protein id: At2g27600.1, by cDNA: 3818., supported by cDNA: gi_13605796, supported by
  misc_feature (20)..(362): Homolog of NCBI NO: 21593336 NR Description: putative ATPase [Arabidopsis thaliana]
  misc_feature (4)..(322): Homolog of NCBI NO: 22652796 NR Description: AAA-ATPase-like protein [Oryza sativa (japonica
  misc_feature (29)..(358): Homolog of NCBI NO: 34895696 NR Description: putative AAA-type ATPase [Oryza sativa (japonica
  misc_feature (73)..(362): Homolog of NCBI NO: 16265863 NR Description: suppressor of K+ transport growth defect-like
  misc_feature (17)..(362): Homolog of NCBI NO: 17865802 NR Description: vacuolar protein sorting factor 4B; suppressor of transport defect 1 [Homo sapiens] vacuolar protein sorting factor 4B [Homo sapiens]
  misc_feature (17)..(362): Homolog of NCBI NO: 9087199 NR Description: SKD1 protein (Vacuolar sorting protein 4b)
  misc_feature (23)..(362): Homolog of NCBI NO: 5712623 NR Description: SKD1 [Mus musculus] >gi|13277834|gb|AAH03799.1|
  misc_feature (23)..(362): Homolog of NCBI NO: 34878783 NR Description: similar to SKD1 [Rattus norvegicus]
  misc_feature (23)..(362): Homolog of NCBI NO: 6677981 NR Description: suppressor of K+ transport defect 1 [Mus >gi|1173444|sp|P46467|SKD1_MOUSE SKD1 protein (Vacuolar sorting
MRAAQGLGPTVATQLSPRAPRPKGKDGDGGNGGDDSEQSKLRAGLNSAIITEKPNIKWNDVAGLESAKQALQEAVILPVKFPQFFTGKRRPWRAFLLYGPPGTGKSYLAKAVATEADSTFFSISSSDLVSKWMGESEKLVANLFQMARENAPSIIFIDEIDSLCGQRGEGNESEASRRIKTELLVQMQGVGHNDDKVLVLAATNTPYALDQAVRRRFDKRIYIPLPDMKARQHMFKVHLGDTPHSLTESDFESLARRTDGFSGSDVAVCVKDVLFEPVRKTQDAMFFFKADGDMWMPCGPKQPGAVQTTMQELASKGLAAKILPPPISRADFEKVLSRQRPTVSKKDLEVHERFTKEFGEEG

SEQ ID NO: 6338 - protein, 230 aa, Zea mays subsp. mays
  peptide (1)..(230): Ceres Seq. ID no. 12410831
  misc_feature (1)..(147): Pfam Name: ATPase family associated with various cellular Pfam Description: ATPase family associated with various cellular
  misc_feature (1)..(230): Homolog of NCBI NO: 15226199 NR Description: putative ATPase; protein id: At2g27600.1, by cDNA: 3818., supported by cDNA: gi_13605796, supported by
  misc_feature (1)..(230): Homolog of NCBI NO: 21593336 NR Description: putative ATPase [Arabidopsis thaliana]
  misc_feature (1)..(190): Homolog of NCBI NO: 22652796 NR Description: AAA-ATPase-like protein [Oryza sativa (japonica
  misc_feature (1)..(226): Homolog of NCBI NO: 34895696 NR Description: putative AAA-type ATPase [Oryza sativa (japonica
  misc_feature (1)..(230): Homolog of NCBI NO: 16265863 NR Description: suppressor of K+ transport growth defect-like
  misc_feature (1)..(230): Homolog of NCBI NO: 17865802 NR Description: vacuolar protein sorting factor 4B; suppressor of transport defect 1 [Homo sapiens] vacuolar protein sorting factor 4B [Homo sapiens]
  misc_feature (1)..(230): Homolog of NCBI NO: 9087199 NR Description: SKD1 protein (Vacuolar sorting protein 4b)
  misc_feature (1)..(230): Homolog of NCBI NO: 5712623 NR Description: SKD1 [Mus musculus] >gi|13277834|gb|AAH03799.1|
  misc_feature (1)..(230): Homolog of NCBI NO: 34878783 NR Description: similar to SKD1 [Rattus norvegicus]
  misc_feature (1)..(230): Homolog of NCBI NO: 6677981 NR Description: suppressor of K+ transport defect 1 [Mus >gi|1173444|sp|P46467|SKD1_MOUSE SKD1 protein (Vacuolar sorting
MGESEKLVANLFQMARENAPSIIFIDEIDSLCGQRGEGNESEASRRIKTELLVQMQGVGHNDDKVLVLAATNTPYALDQAVRRRFDKRIYIPLPDMKARQHMFKVHLGDTPHSLTESDFESLARRTDGFSGSDVAVCVKDVLFEPVRKTQDAMFFFKADGDMWMPCGPKQPGAVQTTMQELASKGLAAKILPPPISRADFEKVLSRQRPTVSKKDLEVHERFTKEFGEEG

SEQ ID NO: 6339 - protein, 217 aa, Zea mays subsp. mays
  peptide (1)..(217): Ceres Seq. ID no. 12410832
  misc_feature (1)..(134): Pfam Name: ATPase family associated with various cellular Pfam Description: ATPase family associated with various cellular
  misc_feature (1)..(217): Homolog of NCBI NO: 15226199 NR Description: putative ATPase; protein id: At2g27600.1, by cDNA: 3818., supported by cDNA: gi_13605796, supported by
  misc_feature (1)..(217): Homolog of NCBI NO: 21593336 NR Description: putative ATPase [Arabidopsis thaliana]
  misc_feature (1)..(177): Homolog of NCBI NO: 22652796 NR Description: AAA-ATPase-like protein [Oryza sativa (japonica
  misc_feature (1)..(213): Homolog of NCBI NO: 34895696 NR Description: putative AAA-type ATPase [Oryza sativa (japonica
  misc_feature (1)..(217): Homolog of NCBI NO: 16265863 NR Description: suppressor of K+ transport growth defect-like
  misc_feature (1)..(217): Homolog of NCBI NO: 17865802 NR Description: vacuolar protein sorting factor 4B; suppressor of transport defect 1 [Homo sapiens] vacuolar protein sorting factor 4B [Homo sapiens]
  misc_feature (1)..(217): Homolog of NCBI NO: 9087199 NR Description: SKD1 protein (Vacuolar sorting protein 4b)
  misc_feature (1)..(217): Homolog of NCBI NO: 5712623 NR Description: SKD1 [Mus musculus] >gi|13277834|gb|AAH03799.1|
  misc_feature (1)..(217): Homolog of NCBI NO: 34878783 NR Description: similar to SKD1 [Rattus norvegicus]
  misc_feature (1)..(217): Homolog of NCBI NO: 6677981 NR Description: suppressor of K+ transport defect 1 [Mus >gi|1173444|sp|P46467|SKD1_MOUSE SKD1 protein (Vacuolar sorting
MARENAPSIIFIDEIDSLCGQRGEGNESEASRRIKTELLVQMQGVGHNDDKVLVLAATNTPYALDQAVRRRFDKRIYIPLPDMKARQHMFKVHLGDTPHSLTESDFESLARRTDGFSGSDVAVCVKDVLFEPVRKTQDAMFFFKADGDMWMPCGPKQPGAVQTTMQELASKGLAAKILPPPISRADFEKVLSRQRPTVSKKDLEVHERFTKEFGEEG

SEQ ID NO: 6340 - DNA, 1422 bp, Zea mays subsp. mays
  misc_feature (1)..(1422): Ceres Seq. ID no. 12410825
  misc_feature: MA Experiment ID: 108536 Result: Down-regulated in Transcription
  misc_feature: MA Experiment 108536 PARAMETER Experiment Name: Zm_Meristem_P Parameter: Age (day) Value: 8
  misc_feature: MA Experiment 108536 PARAMETER Experiment Name: Zm_Meristem_P Parameter: Organism Value: Zea mays
  misc_feature: MA Experiment 108536 PARAMETER Experiment Name: Zm_Meristem_P Parameter: Plant Line Value: 35A19
  misc_feature: MA Experiment 108536 PARAMETER Experiment Name: Zm_Meristem_P Parameter: Tissue Value: Shoot Meristem vs. Above Shoot Meristem
  misc_feature: MA Experiment ID: 108559 Result: Down-regulated in Transcription
  misc_feature: MA Experiment 108559 PARAMETER Experiment Name: Zm_5mM_NO_P Parameter: Age (day) Value: 8
  misc_feature: MA Experiment 108559 PARAMETER Experiment Name: Zm_5mM_NO_P Parameter: Organism Value: Zea mays
  misc_feature: MA Experiment 108559 PARAMETER Experiment Name: Zm_5mM_NO_P Parameter: Plant Line Value: 35A19
  misc_feature: MA Experiment 108559 PARAMETER Experiment Name: Zm_5mM_NO_P Parameter: Timepoint (hr) Value: 12
  misc_feature: MA Experiment 108559 PARAMETER Experiment Name: Zm_5mM_NO_P Parameter: Tissue Value: Aerial
  misc_feature: MA Experiment 108559 PARAMETER Experiment Name: Zm_5mM_NO_P Parameter: Treatment Value: 5mM NO vs. No Treatment
  misc_feature: MA Experiment ID: 20000480 Result: Down-regulated in Transcription
  misc_feature: MA Experiment 20000480 PARAMETER Experiment Name: Zm_Drought_P Parameter: Age (day) Value: 11
  misc_feature: MA Experiment 20000480 PARAMETER Experiment Name: Zm_Drought_P Parameter: Organism Value: Zea mays
  misc_feature: MA Experiment 20000480 PARAMETER Experiment Name: Zm_Drought_P Parameter: Plant Line Value: 35A19
  misc_feature: MA Experiment 20000480 PARAMETER Experiment Name: Zm_Drought_P Parameter: Timepoint (hr) Value: 72
  misc_feature: MA Experiment 20000480 PARAMETER Experiment Name: Zm_Drought_P Parameter: Tissue Value: Aerial
  misc_feature: MA Experiment 20000480 PARAMETER Experiment Name: Zm_Drought_P Parameter: Treatment Value: Drought vs. No Drought
  misc_feature: MA Experiment ID: 20000535 Result: Down-regulated in Transcription
  misc_feature: MA Experiment 20000535 PARAMETER Experiment Name: Zm_Hybrid_Seed_Dev_P Parameter: DAP Value: 30 vs. 12
  misc_feature: MA Experiment 20000535 PARAMETER Experiment Name: Zm_Hybrid_Seed_Dev_P Parameter: Organism Value: Zea mays
  misc_feature: MA Experiment 20000535 PARAMETER Experiment Name: Zm_Hybrid_Seed_Dev_P Parameter: Plant Line Value: 35A19
  misc_feature: MA Experiment 20000535 PARAMETER Experiment Name: Zm_Hybrid_Seed_Dev_P Parameter: Tissue Value: Embryo vs. Unfert Floret
agatctccggatcgttcatccactggtcgagaatccagatctctcgccttctcgctaccaaataccaaccacgaagaacaggaagaatgcccaaactgtcgtgtcgggtgctctttgcggctcttctcatcgcttcgctagccgctctgctcgtccggttcccgatccacaggctcctcaacccccacgccgccatggaccccgactccgagctcgagttcgagatgcccggcgtcttgcgtgtgtacaagaccggccgcgtcgagcgcttcgacggcaccgagaccgtcccgccctgccccgatggcgatcccgccaacggcgtcgcgtccaaggacatcgtcctggaccccgccgcaggcatctccgcccgcctctacctacccgcgggagtggatgccgggaagaagctccccgtcgttgtgttcttccacggcggtgcgttcatggtccacaccgccgcctccccgctgtaccacatctacgccgcctccctcgctgccgcggtgcccgccgtcgtcgtctccgttgactaccgcctagctcccgagcaccgcatccccgccgcctacgacgacgcattcgcggccctgaaggcggtcatcgccgcgtgccgcgcggatggcgccgaggcggaggctgagccctggctcgcctctcacggcgacgcctcccgcatcgtccttgcgggggacagcgccggcggtaacatggcgcacaacgtggcgataaggctgcgcaaggaaggcggcatcgagggttacggcgacatggtcagcggcgtcgtcctcctgtacccttatttctgggggaaggagccgctgggcgcggagcccacggatcccggctaccgcgcaatgttcgatcccacttgggaattcatctgcggcggaaagttcggcctcgaccacccctacgtcaacccaatggcatcgccggaggagttgaggcagctcggttcccgccgcgtgctggtgaccacggcggaccagtgctggttcgtggagagggcaagggcgtacgcagagggaatcaagaaatgcggctgggagggggagctcgagttctacgagaccaagggtgaggcgcacgtcttcttcttgcctaaacacggcagcgaaaaagccgtgaaggagctcgccctcgtggccgaattcgtccggcgctgttgaggtacctttcgctttgtttgcccggacctggtgagtagttcagcgagaaaaaaaatcgcacaattagtgacttttattcatattgcaaattaaggacagaggttcagtctcgattcagaatcctgatcttgaatttctgttgtgcatcgaaatttatcctgaacagtacacactgtaattctgaagtacaggcaagcgagtggctaaatgtattgtatacttgaaaactgtccaatgtattgtatactcg

SEQ ID NO: 6341 - protein, 389 aa, Zea mays subsp. mays
  peptide (1)..(389): Ceres Seq. ID no. 12410826
  misc_feature (125)..(179): Pfam Name: Carboxylesterase Pfam Description: Carboxylesterase
  misc_feature (68)..(388): Homolog of NCBI NO: 15227669 NR Description: putative esterase; protein id: At2g03550.1
  misc_feature (71)..(388): Homolog of NCBI NO: 28393060 NR Description: putative esterase [Arabidopsis thaliana]
  misc_feature (59)..(386): Homolog of NCBI NO: 38344841 NR Description: OSJNBa0064H22.22 [Oryza sativa (japonica
  misc_feature (68)..(387): Homolog of NCBI NO: 15228425 NR Description: putative protein; protein id: At3g48690.1, by cDNA: gi_18086340 [Arabidopsis thaliana]
  misc_feature (68)..(387): Homolog of NCBI NO: 15228426 NR Description: putative protein; protein id: At3g48700.1
  misc_feature (68)..(387): Homolog of NCBI NO: 18086341 NR Description: AT3g48690/T8P19_200 [Arabidopsis thaliana]
  misc_feature (70)..(388): Homolog of NCBI NO: 21536771 NR Description: unknown [Arabidopsis thaliana]
  misc_feature (70)..(388): Homolog of NCBI NO: 18401743 NR Description: expressed protein; protein id: At1g47480.1, by cDNA: 111056. [Arabidopsis thaliana] >gi|25405208|pir||A96515
  misc_feature (70)..(388): Homolog of NCBI NO: 34393904 NR Description: putative cell death associated protein [Oryza
  misc_feature (68)..(386): Homolog of NCBI NO: 15222795 NR Description: unknown protein; protein id: At1g49660.1
ISGSFIHWSRIQISRLLATKYQPRRTGRMPKLSCRVLFAALLIASLAALLVRFPIHRLLNPHAAMDPDSELEFEMPGVLRVYKTGRVERFDGTETVPPCPDGDPANGVASKDIVLDPAAGISARLYLPAGVDAGKKLPVVVFFHGGAFMVHTAASPLYHIYAASLAAAVPAVVVSVDYRLAPEHRIPAAYDDAFAALKAVIAACRADGAEAEAEPWLASHGDASRIVLAGDSAGGNMAHNVAIRLRKEGGIEGYGDMVSGVVLLYPYFWGKEPLGAEPTDPGYRAMFDPTWEFICGGKFGLDHPYVNPMASPEELRQLGSRRVLVTTADQCWFVERARAYAEGIKKCGWEGELEFYETKGEAHVFFLPKHGSEKAVKELALVAEFVRRC

SEQ ID NO: 6342 - protein, 361 aa, Zea mays subsp. mays
  peptide (1)..(361): Ceres Seq. ID no. 12410827
  misc_feature (97)..(151): Pfam Name: Carboxylesterase Pfam Description: Carboxylesterase
  misc_feature (40)..(360): Homolog of NCBI NO: 15227669 NR Description: putative esterase; protein id: At2g03550.1
  misc_feature (43)..(360): Homolog of NCBI NO: 28393060 NR Description: putative esterase [Arabidopsis thaliana]
  misc_feature (31)..(358): Homolog of NCBI NO: 38344841 NR Description: OSJNBa0064H22.22 [Oryza sativa (japonica
  misc_feature (40)..(359): Homolog of NCBI NO: 15228425 NR Description: putative protein; protein id: At3g48690.1, by cDNA: gi_18086340 [Arabidopsis thaliana]
  misc_feature (40)..(359): Homolog of NCBI NO: 15228426 NR Description: putative protein; protein id: At3g48700.1
  misc_feature (40)..(359): Homolog of NCBI NO: 18086341 NR Description: AT3g48690/T8P19_200 [Arabidopsis thaliana]
  misc_feature (42)..(360): Homolog of NCBI NO: 21536771 NR Description: unknown [Arabidopsis thaliana]
  misc_feature (42)..(360): Homolog of NCBI NO: 18401743 NR Description: expressed protein; protein id: At1g47480.1, by cDNA: 111056. [Arabidopsis thaliana] >gi|25405208|pir||A96515
  misc_feature (42)..(360): Homolog of NCBI NO: 34393904 NR Description: putative cell death associated protein [Oryza
  misc_feature (40)..(358): Homolog of NCBI NO: 15222795 NR Description: unknown protein; protein id: At1g49660.1
MPKLSCRVLFAALLIASLAALLVRFPIHRLLNPHAAMDPDSELEFEMPGVLRVYKTGRVERFDGTETVPPCPDGDPANGVASKDIVLDPAAGISARLYLPAGVDAGKKLPVVVFFHGGAFMVHTAASPLYHIYAASLAAAVPAVVVSVDYRLAPEHRIPAAYDDAFAALKAVIAACRADGAEAEAEPWLASHGDASRIVLAGDSAGGNMAHNVAIRLRKEGGIEGYGDMVSGVVLLYPYFWGKEPLGAEPTDPGYRAMFDPTWEFICGGKFGLDHPYVNPMASPEELRQLGSRRVLVTTADQCWFVERARAYAEGIKKCGWEGELEFYETKGEAHVFFLPKHGSEKAVKELALVAEFVRRC

SEQ ID NO: 6343 - protein, 325 aa, Zea mays subsp. mays
  peptide (1)..(325): Ceres Seq. ID no. 12410828
  misc_feature (61)..(115): Pfam Name: Carboxylesterase Pfam Description: Carboxylesterase
  misc_feature (4)..(322): Homolog of NCBI NO: 15222795 NR Description: unknown protein; protein id: At1g49660.1
  misc_feature (4)..(324): Homolog of NCBI NO: 15227669 NR Description: putative esterase; protein id: At2g03550.1
  misc_feature (7)..(324): Homolog of NCBI NO: 28393060 NR Description: putative esterase [Arabidopsis thaliana]
  misc_feature (1)..(322): Homolog of NCBI NO: 38344841 NR Description: OSJNBa0064H22.22 [Oryza sativa (japonica
  misc_feature (4)..(323): Homolog of NCBI NO: 15228425 NR Description: putative protein; protein id: At3g48690.1, by cDNA: gi_18086340 [Arabidopsis thaliana]
  misc_feature (4)..(323): Homolog of NCBI NO: 15228426 NR Description: putative protein; protein id: At3g48700.1
  misc_feature (4)..(323): Homolog of NCBI NO: 18086341 NR Description: AT3g48690/T8P19_200 [Arabidopsis thaliana]
  misc_feature (6)..(324): Homolog of NCBI NO: 21536771 NR Description: unknown [Arabidopsis thaliana]
  misc_feature (6)..(324): Homolog of NCBI NO: 18401743 NR Description: expressed protein; protein id: At1g47480.1, by cDNA: 111056. [Arabidopsis thaliana] >gi|25405208|pir||A96515
  misc_feature (6)..(324): Homolog of NCBI NO: 34393904 NR Description: putative cell death associated protein [Oryza
MDPDSELEFEMPGVLRVYKTGRVERFDGTETVPPCPDGDPANGVASKDIVLDPAAGISARLYLPAGVDAGKKLPVVVFFHGGAFMVHTAASPLYHIYAASLAAAVPAVVVSVDYRLAPEHRIPAAYDDAFAALKAVIAACRADGAEAEAEPWLASHGDASRIVLAGDSAGGNMAHNVAIRLRKEGGIEGYGDMVSGVVLLYPYFWGKEPLGAEPTDPGYRAMFDPTWEFICGGKFGLDHPYVNPMASPEELRQLGSRRVLVTTADQCWFVERARAYAEGIKKCGWEGELEFYETKGEAHVFFLPKHGSEKAVKELALVAEFVRRC

SEQ ID NO: 6344 - DNA, 1630 bp, Zea mays subsp. mays
  misc_feature (1)..(1630): Ceres Seq. ID no. 12353812
  misc_feature: MA Experiment ID: 108527 Result: Down-regulated in Transcription
  misc_feature: MA Experiment 108527 PARAMETER Experiment Name: Zm_5mM_NO_P Parameter: Age (day) Value: 8
  misc_feature: MA Experiment 108527 PARAMETER Experiment Name: Zm_5mM_NO_P Parameter: Organism Value: Zea mays
  misc_feature: MA Experiment 108527 PARAMETER Experiment Name: Zm_5mM_NO_P Parameter: Plant Line Value: 35A19
  misc_feature: MA Experiment 108527 PARAMETER Experiment Name: Zm_5mM_NO_P Parameter: Timepoint (hr) Value: 6
  misc_feature: MA Experiment 108527 PARAMETER Experiment Name: Zm_5mM_NO_P Parameter: Tissue Value: Aerial
  misc_feature: MA Experiment 108527 PARAMETER Experiment Name: Zm_5mM_NO_P Parameter: Treatment Value: 5mM NO vs. No Treatment
  misc_feature: MA Experiment ID: 108528 Result: Up-regulated in Transcription
  misc_feature: MA Experiment 108528 PARAMETER Experiment Name: Zm_Imbibed_Seeds_P Parameter: Age (day) Value: 5 vs. 2
  misc_feature: MA Experiment 108528 PARAMETER Experiment Name: Zm_Imbibed_Seeds_P Parameter: Organism Value: Zea mays
  misc_feature: MA Experiment 108528 PARAMETER Experiment Name: Zm_Imbibed_Seeds_P Parameter: Plant Line Value: 35A19
  misc_feature: MA Experiment 108528 PARAMETER Experiment Name: Zm_Imbibed_Seeds_P Parameter: Tissue Value: Aerial vs. Embryo
  misc_feature: MA Experiment ID: 108529 Result: Down-regulated in Transcription
  misc_feature: MA Experiment 108529 PARAMETER Experiment Name: Zm_Imbibed_Seeds_P Parameter: Age (day) Value: 5 vs. 2
  misc_feature: MA Experiment 108529 PARAMETER Experiment Name: Zm_Imbibed_Seeds_P Parameter: Organism Value: Zea mays
  misc_feature: MA Experiment 108529 PARAMETER Experiment Name: Zm_Imbibed_Seeds_P Parameter: Plant Line Value: 35A19
  misc_feature: MA Experiment 108529 PARAMETER Experiment Name: Zm_Imbibed_Seeds_P Parameter: Tissue Value: Roots vs. Embryo
  misc_feature: MA Experiment ID: 108530 Result: Up-regulated in Transcription
  misc_feature: MA Experiment 108530 PARAMETER Experiment Name: Zm_Imbibed_Seeds_P Parameter: Age (day) Value: 6 vs. 2
  misc_feature: MA Experiment 108530 PARAMETER Experiment Name: Zm_Imbibed_Seeds_P Parameter: Organism Value: Zea mays
  misc_feature: MA Experiment 108530 PARAMETER Experiment Name: Zm_Imbibed_Seeds_P Parameter: Plant Line Value: 35A19
  misc_feature: MA Experiment 108530 PARAMETER Experiment Name: Zm_Imbibed_Seeds_P Parameter: Tissue Value: Aerial vs. Embryo
  misc_feature: MA Experiment ID: 108547 Result: Up-regulated in Transcription
  misc_feature: MA Experiment 108547 PARAMETER Experiment Name: Zm_Imbibed_Seeds_P Parameter: Age (day) Value: 4 vs. 2
  misc_feature: MA Experiment 108547 PARAMETER Experiment Name: Zm_Imbibed_Seeds_P Parameter: Organism Value: Zea mays
  misc_feature: MA Experiment 108547 PARAMETER Experiment Name: Zm_Imbibed_Seeds_P Parameter: Plant Line Value: 35A19
  misc_feature: MA Experiment 108547 PARAMETER Experiment Name: Zm_Imbibed_Seeds_P Parameter: Tissue Value: Aerial vs. Embryo
  misc_feature: MA Experiment ID: 108597 Result: Down-regulated in Transcription
  misc_feature: MA Experiment 108597 PARAMETER Experiment Name: Zm_100uM_ABA_P Parameter: Age (day) Value: 9
  misc_feature: MA Experiment 108597 PARAMETER Experiment Name: Zm_100uM_ABA_P Parameter: Organism Value: Zea mays
  misc_feature: MA Experiment 108597 PARAMETER Experiment Name: Zm_100uM_ABA_P Parameter: Plant Line Value: 35A19
  misc_feature: MA Experiment 108597 PARAMETER Experiment Name: Zm_100uM_ABA_P Parameter: Timepoint (hr) Value: 24
  misc_feature: MA Experiment 108597 PARAMETER Experiment Name: Zm_100uM_ABA_P Parameter: Tissue Value: Aerial
  misc_feature: MA Experiment 108597 PARAMETER Experiment Name: Zm_100uM_ABA_P Parameter: Treatment Value: 100uM ABA vs. No Treatment
  misc_feature: MA Experiment ID: 20000492 Result: Down-regulated in Transcription
  misc_feature: MA Experiment 20000492 PARAMETER Experiment Name: Zm_Hybrid_Seed_Dev_P Parameter: DAP Value: 12
  misc_feature: MA Experiment 20000492 PARAMETER Experiment Name: Zm_Hybrid_Seed_Dev_P Parameter: Organism Value: Zea mays
  misc_feature: MA Experiment 20000492 PARAMETER Experiment Name: Zm_Hybrid_Seed_Dev_P Parameter: Plant Line Value: 35A19
  misc_feature: MA Experiment 20000492 PARAMETER Experiment Name: Zm_Hybrid_Seed_Dev_P Parameter: Tissue Value: Fert Kernel vs. Unfert Floret
  misc_feature: MA Experiment ID: 20000535 Result: Down-regulated in Transcription
  misc_feature: MA Experiment 20000535 PARAMETER Experiment Name: Zm_Hybrid_Seed_Dev_P Parameter: DAP Value: 30 vs. 12
  misc_feature: MA Experiment 20000535 PARAMETER Experiment Name: Zm_Hybrid_Seed_Dev_P Parameter: Organism Value: Zea mays
  misc_feature: MA Experiment 20000535 PARAMETER Experiment Name: Zm_Hybrid_Seed_Dev_P Parameter: Plant Line Value: 35A19
  misc_feature: MA Experiment 20000535 PARAMETER Experiment Name: Zm_Hybrid_Seed_Dev_P Parameter: Tissue Value: Embryo vs. Unfert Floret
  misc_feature: MA Experiment ID: 20001613 Result: Up-regulated in Transcription
  misc_feature: MA Experiment 20001613 PARAMETER Experiment Name: Zm_50ppm_KNO3_L-to-H_P Parameter: Age (day) Value: 20
  misc_feature: MA Experiment 20001613 PARAMETER Experiment Name: Zm_50ppm_KNO3_L-to-H_P Parameter: Organism Value: Zea mays
  misc_feature: MA Experiment 20001613 PARAMETER Experiment Name: Zm_50ppm_KNO3_L-to-H_P Parameter: Plant Line Value: 35A19
  misc_feature: MA Experiment 20001613 PARAMETER Experiment Name: Zm_50ppm_KNO3_L-to-H_P Parameter: Timepoint (hr) Value: 24
  misc_feature: MA Experiment 20001613 PARAMETER Experiment Name: Zm_50ppm_KNO3_L-to-H_P Parameter: Tissue Value: Roots
  misc_feature: MA Experiment 20001613 PARAMETER Experiment Name: Zm_50ppm_KNO3_L-to-H_P Parameter: Treatment Value: 50ppm KNO3 vs. 50ppm KCl
atcttgatctcatctcctatcttcttcctcctagattctttcttccgcgcgccctctctctctctctccttcctgccttctgcctgcgggcggcccatgtccgtggcgcccctcctgccctgcgagctgcttctccagcgaaaaggttgctgcgccttgacgcaccaccgatccaccgccgcccaacccgagcgttctgtccggcagctaggtagcgagctgcgcggtggctgcgaccggaagcagggaggggaacagggcagcgaacgcccggcgattgccttgcttgcctgtgtgctccggccggcgcgagttggtcggtcgttccatgcatggatgacaaggaacttatctcacagtccgacctgcagtcattctaccagcagcagcagcagcaccaccgggccttcggcggcggcggcggcgggcagcatagcccgtcctcgctggccgggatgcactccgtcattcgccccatgcccaacatgaacatgagcccgtcggcgatccttaactctatcggcgggggctccttcaccggtatgcagttccaaatggacccgccgccgccaccattgctgcacaccgccgccatgggtgcctcggctcctacctccacccccggtgccgtccccgcggcccccacggagccggtcaagcgcaaaagagggagaccgcgcaaatacggtcccgacggcaccatgaagcagcagcagctcgtcgccgcacagccaaggatagggccgtctggtcccaacatgatcagcagcgccgggatagaggactcttcgcagaagaagcggcgcggccggccgccgggcaccgccaagaagcatcagccctcgccctctcaaggcaatgcgttcgccggttcagctggaacgagcttcactccgcacatcatcacggcgtctccttcagaggacgtggcggcgaagatcgtcgcgttcgccacccagtcgtcaagggcggtgtgcgtgctctcggcgatgggctccgtctccagggccgtcctccgccacccggccgacggctctcccatggcgagggttcacgcgtcgccgcagccgtacaacaacagcccagccatctacgaggggttctacgagatcatgagcctaaccggctcgtacaacctggccgagggctcacaacaagaacagtgccagggccagggccagccgagcggcgggctcagcgtcacgctctgcagccctgagaggaatgtgatcggaggtgttttgggcggcccactggtagctgcaggaaccgtgcaggtggtactggggagttttcaccaaggagggtcgaaatccaagtccaagaaaggcgggaagcagcagcaggcgccggcgccggcggccgccttcagttccgactcgctcaccggcggccaggaggcgtcgcccagctctgggcacaaccaaaatctaacgccgccgccgccgccgccctccgtgacgggagggtggcccacctccgggatgtttgacaccagcattgatatcaactcatctagaggatagctcatttcatttgtcgataattccagccctcgagaaattttctgttctcgcacaagaatgatcgaaaccatacttcgaaatagattattcggtttctccctttt

SEQ ID NO: 6345 - protein, 397 aa, Zea mays subsp. mays
  peptide (1)..(397): Ceres Seq. ID no. 12353813
  misc_feature (31)..(271): Homolog of NCBI NO: 2213534 NR Description: DNA-binding PD1-like protein [Pisum sativum]
  misc_feature (245)..(383): Homolog of NCBI NO: 2213534 NR Description: DNA-binding PD1-like protein [Pisum sativum]
  misc_feature (31)..(271): Homolog of NCBI NO: 7488825 NR Description: probable DNA-binding protein - garden pea
  misc_feature (245)..(383): Homolog of NCBI NO: 7488825 NR Description: probable DNA-binding protein - garden pea
  misc_feature (78)..(340): Homolog of NCBI NO: 8809639 NR Description: contains similarity to DNA-binding [Arabidopsis thaliana] >gi|26451694|dbj|BAC42942.1| unknown [Arabidopsis thaliana] >gi|28973553|gb|AAO64101.1| unknown
  misc_feature (17)..(280): Homolog of NCBI NO: 38346715 NR Description: OSJNBa0086O06.13 [Oryza sativa (japonica
  misc_feature (81)..(273): Homolog of NCBI NO: 15225902 NR Description: putative AT-hook DNA-binding protein; protein id: supported by cDNA: gi_14194130, supported by cDNA: gi_16323337, by cDNA: gi_17065245 [Arabidopsis thaliana]
  misc_feature (33)..(280): Homolog of NCBI NO: 37537056 NR Description: putative AT-Hook DNA-binding protein [Oryza
  misc_feature (43)..(280): Homolog of NCBI NO: 14326504 NR Description: At2g33620/F4P9.39 [Arabidopsis thaliana]
  misc_feature (78)..(267): Homolog of NCBI NO: 11281387 NR Description: probable DNA-binding protein - Arabidopsis
MDDKELISQSDLQSFYQQQQQHHRAFGGGGGGQHSPSSLAGMHSVIRPMPNMNMSPSAILNSIGGGSFTGMQFQMDPPPPPLLHTAAMGASAPTSTPGAVPAAPTEPVKRKRGRPRKYGPDGTMKQQQLVAAQPRIGPSGPNMISSAGIEDSSQKKRRGRPPGTAKKHQPSPSQGNAFAGSAGTSFTPHIITASPSEDVAAKIVAFATQSSRAVCVLSAMGSVSRAVLRHPADGSPMARVHASPQPYNNSPAIYEGFYEIMSLTGSYNLAEGSQQEQCQGQGQPSGGLSVTLCSPERNVIGGVLGGPLVAAGTVQVVLGSFHQGGSKSKSKKGGKQQQAPAPAAAFSSDSLTGGQEASPSSGHNQNLTPPPPPPSVTGGWPTSGMFDTSIDINSSRG

SEQ ID NO: 6346 - protein, 356 aa, Zea mays subsp. mays
  peptide (1)..(356): Ceres Seq. ID no. 12353814
  misc_feature (1)..(230): Homolog of NCBI NO: 2213534 NR Description: DNA-binding PD1-like protein [Pisum sativum]
  misc_feature (204)..(342): Homolog of NCBI NO: 2213534 NR Description: DNA-binding PD1-like protein [Pisum sativum]
  misc_feature (1)..(230): Homolog of NCBI NO: 7488825 NR Description: probable DNA-binding protein - garden pea
  misc_feature (204)..(342): Homolog of NCBI NO: 7488825 NR Description: probable DNA-binding protein - garden pea
  misc_feature (37)..(299): Homolog of NCBI NO: 8809639 NR Description: contains similarity to DNA-binding [Arabidopsis thaliana] >gi|26451694|dbj|BAC42942.1| unknown [Arabidopsis thaliana] >gi|28973553|gb|AAO64101.1| unknown
  misc_feature (1)..(239): Homolog of NCBI NO: 38346715 NR Description: OSJNBa0086O06.13 [Oryza sativa (japonica
  misc_feature (40)..(232): Homolog of NCBI NO: 15225902 NR Description: putative AT-hook DNA-binding protein; protein id: supported by cDNA: gi_14194130, supported by cDNA: gi_16323337, by cDNA: gi_17065245 [Arabidopsis thaliana]
  misc_feature (1)..(239): Homolog of NCBI NO: 37537056 NR Description: putative AT-Hook DNA-binding protein [Oryza
  misc_feature (2)..(239): Homolog of NCBI NO: 14326504 NR Description: At2g33620/F4P9.39 [Arabidopsis thaliana]
  misc_feature (37)..(226): Homolog of NCBI NO: 11281387 NR Description: probable DNA-binding protein - Arabidopsis
MHSVIRPMPNMNMSPSAILNSIGGGSFTGMQFQMDPPPPPLLHTAAMGASAPTSTPGAVPAAPTEPVKRKRGRPRKYGPDGTMKQQQLVAAQPRIGPSGPNMISSAGIEDSSQKKRRGRPPGTAKKHQPSPSQGNAFAGSAGTSFTPHIITASPSEDVAAKIVAFATQSSRAVCVLSAMGSVSRAVLRHPADGSPMARVHASPQPYNNSPAIYEGFYEIMSLTGSYNLAEGSQQEQCQGQGQPSGGLSVTLCSPERNVIGGVLGGPLVAAGTVQVVLGSFHQGGSKSKSKKGGKQQQAPAPAAAFSSDSLTGGQEASPSSGHNQNLTPPPPPPSVTGGWPTSGMFDTSIDINSSRG

SEQ ID NO: 6347 - protein, 349 aa, Zea mays subsp. mays
  peptide (1)..(349): Ceres Seq. ID no. 12353815
  misc_feature (1)..(223): Homolog of NCBI NO: 2213534 NR Description: DNA-binding PD1-like protein [Pisum sativum]
  misc_feature (197)..(335): Homolog of NCBI NO: 2213534 NR Description: DNA-binding PD1-like protein [Pisum sativum]
  misc_feature (1)..(223): Homolog of NCBI NO: 7488825 NR Description: probable DNA-binding protein - garden pea
  misc_feature (197)..(335): Homolog of NCBI NO: 7488825 NR Description: probable DNA-binding protein - garden pea
  misc_feature (30)..(292): Homolog of NCBI NO: 8809639 NR Description: contains similarity to DNA-binding [Arabidopsis thaliana] >gi|26451694|dbj|BAC42942.1| unknown [Arabidopsis thaliana] >gi|28973553|gb|AAO64101.1| unknown
  misc_feature (1)..(232): Homolog of NCBI NO: 38346715 NR Description: OSJNBa0086O06.13 [Oryza sativa (japonica
  misc_feature (33)..(225): Homolog of NCBI NO: 15225902 NR Description: putative AT-hook DNA-binding protein; protein id: supported by cDNA: gi_14194130, supported by cDNA: gi_16323337, by cDNA: gi_17065245 [Arabidopsis thaliana]
  misc_feature (1)..(232): Homolog of NCBI NO: 37537056 NR Description: putative AT-Hook DNA-binding protein [Oryza
  misc_feature (1)..(232): Homolog of NCBI NO: 14326504 NR Description: At2g33620/F4P9.39 [Arabidopsis thaliana]
  misc_feature (30)..(219): Homolog of NCBI NO: 11281387 NR Description: probable DNA-binding protein - Arabidopsis
MPNMNMSPSAILNSIGGGSFTGMQFQMDPPPPPLLHTAAMGASAPTSTPGAVPAAPTEPVKRKRGRPRKYGPDGTMKQQQLVAAQPRIGPSGPNMISSAGIEDSSQKKRRGRPPGTAKKHQPSPSQGNAFAGSAGTSFTPHIITASPSEDVAAKIVAFATQSSRAVCVLSAMGSVSRAVLRHPADGSPMARVHASPQPYNNSPAIYEGFYEIMSLTGSYNLAEGSQQEQCQGQGQPSGGLSVTLCSPERNVIGGVLGGPLVAAGTVQVVLGSFHQGGSKSKSKKGGKQQQAPAPAAAFSSDSLTGGQEASPSSGHNQNLTPPPPPPSVTGGWPTSGMFDTSIDINSSRG

SEQ ID NO: 6348 - DNA, 1108 bp, Zea mays subsp. mays
  misc_feature (1)..(1108): Ceres Seq. ID no. 12566751
  misc_feature: MA Experiment ID: 20000477 Result: Down-regulated in Transcription
  misc_feature: MA Experiment 20000477 PARAMETER Experiment Name: Zm_5mM_SA_P Parameter: Age (day) Value: 10
  misc_feature: MA Experiment 20000477 PARAMETER Experiment Name: Zm_5mM_SA_P Parameter: Organism Value: Zea mays
  misc_feature: MA Experiment 20000477 PARAMETER Experiment Name: Zm_5mM_SA_P Parameter: Plant Line Value: 35A19
  misc_feature: MA Experiment 20000477 PARAMETER Experiment Name: Zm_5mM_SA_P Parameter: Timepoint (hr) Value: 48
  misc_feature: MA Experiment 20000477 PARAMETER Experiment Name: Zm_5mM_SA_P Parameter: Tissue Value: Aerial
  misc_feature: MA Experiment 20000477 PARAMETER Experiment Name: Zm_5mM_SA_P Parameter: Treatment Value: 5mM SA vs. No Treatment
  misc_feature: MA Experiment ID: 20000478 Result: Down-regulated in Transcription
  misc_feature: MA Experiment 20000478 PARAMETER Experiment Name: Zm_5mM_SA_P Parameter: Age (day) Value: 11
  misc_feature: MA Experiment 20000478 PARAMETER Experiment Name: Zm_5mM_SA_P Parameter: Organism Value: Zea mays
  misc_feature: MA Experiment 20000478 PARAMETER Experiment Name: Zm_5mM_SA_P Parameter: Plant Line Value: 35A19
  misc_feature: MA Experiment 20000478 PARAMETER Experiment Name: Zm_5mM_SA_P Parameter: Timepoint (hr) Value: 72
  misc_feature: MA Experiment 20000478 PARAMETER Experiment Name: Zm_5mM_SA_P Parameter: Tissue Value: Aerial
  misc_feature: MA Experiment 20000478 PARAMETER Experiment Name: Zm_5mM_SA_P Parameter: Treatment Value: 5mM SA vs. No Treatment
  misc_feature: MA Experiment ID: 20000487 Result: Down-regulated in Transcription
  misc_feature: MA Experiment 20000487 PARAMETER Experiment Name: Zm_50mM_NH4NO3_L_to_H_P Parameter: Organism Value: Zea mays
  misc_feature: MA Experiment 20000487 PARAMETER Experiment Name: Zm_50mM_NH4NO3_L_to_H_P Parameter: Timepoint (hr) Value: 4
  misc_feature: MA Experiment 20000487 PARAMETER Experiment Name: Zm_50mM_NH4NO3_L_to_H_P Parameter: Tissue Value: Leaves
  misc_feature: MA Experiment 20000487 PARAMETER Experiment Name: Zm_50mM_NH4NO3_L_to_H_P Parameter: Treatment Value: 50mM NH4NO3 vs. 100mM Mannitol
  misc_feature: MA Experiment ID: 20000535 Result: Up-regulated in Transcription
  misc_feature: MA Experiment 20000535 PARAMETER Experiment Name: Zm_Hybrid_Seed_Dev_P Parameter: DAP Value: 30 vs. 12
  misc_feature: MA Experiment 20000535 PARAMETER Experiment Name: Zm_Hybrid_Seed_Dev_P Parameter: Organism Value: Zea mays
  misc_feature: MA Experiment 20000535 PARAMETER Experiment Name: Zm_Hybrid_Seed_Dev_P Parameter: Plant Line Value: 35A19
  misc_feature: MA Experiment 20000535 PARAMETER Experiment Name: Zm_Hybrid_Seed_Dev_P Parameter: Tissue Value: Embryo vs. Unfert Floret
  misc_feature: MA Experiment ID: 20000632 Result: Down-regulated in Transcription
  misc_feature: MA Experiment 20000632 PARAMETER Experiment Name: Zm_Herbicide-Treatments_P Parameter: Timepoint (hr) Value: 4
  misc_feature: MA Experiment 20000632 PARAMETER Experiment Name: Zm_Herbicide-Treatments_P Parameter: Tissue Value: Aerial
  misc_feature: MA Experiment 20000632 PARAMETER Experiment Name: Zm_Herbicide-Treatments_P Parameter: Treatment Value: Glean vs. No Treatment
  misc_feature: MA Experiment ID: 20001614 Result: Up-regulated in Transcription
  misc_feature: MA Experiment 20001614 PARAMETER Experiment Name: Zm_50ppm_KNO3_L-to-H_P Parameter: Age (day) Value: 21
  misc_feature: MA Experiment 20001614 PARAMETER Experiment Name: Zm_50ppm_KNO3_L-to-H_P Parameter: Organism Value: Zea mays
  misc_feature: MA Experiment 20001614 PARAMETER Experiment Name: Zm_50ppm_KNO3_L-to-H_P Parameter: Plant Line Value: 35A19
  misc_feature: MA Experiment 20001614 PARAMETER Experiment Name: Zm_50ppm_KNO3_L-to-H_P Parameter: Timepoint (hr) Value: 48
  misc_feature: MA Experiment 20001614 PARAMETER Experiment Name: Zm_50ppm_KNO3_L-to-H_P Parameter: Tissue Value: Roots
  misc_feature: MA Experiment 20001614 PARAMETER Experiment Name: Zm_50ppm_KNO3_L-to-H_P Parameter: Treatment Value: 50ppm KNO3 vs. 50ppm KCl
aatcccctcctccgccctccgcctcctcagtgctccggcgcctagcgacctgctcctgcccccgccgccgccgtgcacgcacagccggagcaggagcagcgctgcccgcctttaccgttgcccatggagaactctgccgccgccgccgccgcccggccgcgcctcacccgcgcagccgccaagcgctcagccgtcgtcacggctgtggccgtcgccgccaagcgcaagcgcgtcgcgctcagccagctgcccacgctccccaacgccgtgctcggcgcgcacgacgacgacgacgacaagcccgtcaggaagcagcgcctcctccccgccgccaagcccaagcccaagcccaaggcagcgcccgcgcctgccgcgcccgccgccgcggatgacacggatgacgacattcagctctgcaagccctacgcttccgacatctactcctacctccgctccatggagtcgcaggccaagcgccgcctcgctgttgactacatcgcggcggtgcagatcgacgtcacgcccaacatgcgtggcatcctcatcgactggctcgtcgaggtcgccgaggagtacaagctcgtctccgacacgctctacctcaccgtctcctacatcgaccgcttcctctctgccaaagttctcaacaggcagaagctgcagctcctcggcgtctccgccatgctcatcgcatccaagtatgaggagatcagcccgcccaacgtggaggatttctgctacatcaccgataacacctacaccaagcaggaggtagttaagatggagagtgatatactgaatgtcctcaagtttgaggtgggcagtcctaccgccaagacgttcctgaggatgttcatcagatctgcccaagaagacaacaagaagtatcctagcctccagttggagttcctggggagctacctttctgagctgagcttgctggattatggcttgattcgctccttgccgtcacttgttgcagcctcagccgtctttgttgcaaggctgaccctggatccacacacccatccctggagcaagaagatgcaaacgctaacaggctataagccatctgagttgaaggactgtgttgctgccatacataatt

SEQ ID NO: 6349 - protein, 328 aa, Zea mays subsp. mays
  peptide (1)..(328): Ceres Seq. ID no. 12566752
  misc_feature (104)..(233): Pfam Name: Cyclin, N-terminal domain Pfam Description: Cyclin, N-terminal domain
  misc_feature (1)..(327): Homolog of NCBI NO: 40538955 NR Description: putative A-type cyclin [Oryza sativa (japonica
  misc_feature (13)..(327): Homolog of NCBI NO: 15220147 NR Description: Cyclin A3;4; protein id: At1g47230.1, supported
  misc_feature (13)..(327): Homolog of NCBI NO: 7438513 NR Description: cyclin A-type (clone 59) - common tobacco
  misc_feature (13)..(327): Homolog of NCBI NO: 7438516 NR Description: cyclin A-type - Madagascar periwinkle
  misc_feature (13)..(327): Homolog of NCBI NO: 30694019 NR Description: cyclin family [Arabidopsis thaliana]
  misc_feature (13)..(327): Homolog of NCBI NO: 15239172 NR Description: Cyclin A3;1; protein id: At5g43080.1 [Arabidopsis
  misc_feature (9)..(327): Homolog of NCBI NO: 7438508 NR Description: mitosis-specific cyclin CYS, A-type - common
  misc_feature (10)..(327): Homolog of NCBI NO: 7438511 NR Description: cyclin A-type (clone 105) - common tobacco
  misc_feature (13)..(315): Homolog of NCBI NO: 7438512 NR Description: cyclin A-type (clone 13) - common tobacco
  misc_feature (13)..(304): Homolog of NCBI NO: 2190263 NR Description: A-type cyclin [Catharanthus roseus]
MENSAAAAAARPRLTRAAAKRSAVVTAVAVAAKRKRVALSQLPTLPNAVLGAHDDDDDKPVRKQRLLPAAKPKPKPKAAPAPAAPAAADDTDDDIQLCKPYASDIYSYLRSMESQAKRRLAVDYIAAVQIDVTPNMRGILIDWLVEVAEEYKLVSDTLYLTVSYIDRFLSAKVLNRQKLQLLGVSAMLIASKYEEISPPNVEDFCYITDNTYTKQEVVKMESDILNVLKFEVGSPTAKTFLRMFIRSAQEDNKKYPSLQLEFLGSYLSELSLLDYGLIRSLPSLVAASAVFVARLTLDPHTHPWSKKMQTLTGYKPSELKDCVAAIHN

SEQ ID NO: 6350 - protein, 257 aa, Zea mays subsp. mays
  peptide (1)..(257): Ceres Seq. ID no. 12566753
  misc_feature (20)..(233): Pfam Name: Formin Homology 2 Domain Pfam Description: Formin Homology 2 Domain
  misc_feature (1)..(256): Homolog of NCBI NO: 38373695 NR Description: WASP-interacting protein [Homo sapiens]
  misc_feature (19)..(157): Homolog of NCBI NO: 38373695 NR Description: WASP-interacting protein [Homo sapiens]
IPSSALRLLSAPAPSDLLLPPPPPCTHSRSRSSAARLYRCPWRTLPPPPPPGRASPAQPPSAQPSSRLWPSPPSASASRSASCPRSPTPCSARTTTTTTSPSGSSASSPPPSPSPSPRQRPRLPRPPPRMTRMTTFSSASPTLPTSTPTSAPWSRRPSAASLLTTSRRCRSTSRPTCVASSSTGSSRSPRSTSSSPTRSTSPSPTSTASSLPKFSTGRSCSSSASPPCSSHPSMRRSARPTWRISATSPITPTPSRR

SEQ ID NO: 6351 - protein, 217 aa, Zea mays subsp. mays
  peptide (1)..(217): Ceres Seq. ID no. 12566754
  misc_feature (1)..(122): Pfam Name: Cyclin, N-terminal domain Pfam Description: Cyclin, N-terminal domain
  misc_feature (1)..(216): Homolog of NCBI NO: 40538955 NR Description: putative A-type cyclin [Oryza sativa (japonica
  misc_feature (1)..(216): Homolog of NCBI NO: 15220147 NR Description: Cyclin A3;4; protein id: At1g47230.1, supported
  misc_feature (1)..(216): Homolog of NCBI NO: 7438513 NR Description: cyclin A-type (clone 59) - common tobacco
  misc_feature (1)..(216): Homolog of NCBI NO: 7438516 NR Description: cyclin A-type - Madagascar periwinkle
  misc_feature (1)..(216): Homolog of NCBI NO: 30694019 NR Description: cyclin family [Arabidopsis thaliana]
  misc_feature (1)..(216): Homolog of NCBI NO: 15239172 NR Description: Cyclin A3;1; protein id: At5g43080.1 [Arabidopsis
  misc_feature (1)..(216): Homolog of NCBI NO: 7438508 NR Description: mitosis-specific cyclin CYS, A-type - common
  misc_feature (1)..(216): Homolog of NCBI NO: 7438511 NR Description: cyclin A-type (clone 105) - common tobacco
  misc_feature (1)..(204): Homolog of NCBI NO: 7438512 NR Description: cyclin A-type (clone 13) - common tobacco
  misc_feature (1)..(193): Homolog of NCBI NO: 2190263 NR Description: A-type cyclin [Catharanthus roseus]
MESQAKRRLAVDYIAAVQIDVTPNMRGILIDWLVEVAEEYKLVSDTLYLTVSYIDRFLSAKVLNRQKLQLLGVSAMLIASKYEEISPPNVEDFCYITDNTYTKQEVVKMESDILNVLKFEVGSPTAKTFLRMFIRSAQEDNKKYPSLQLEFLGSYLSELSLLDYGLIRSLPSLVAASAVFVARLTLDPHTHPWSKKMQTLTGYKPSELKDCVAAIHN

SEQ ID NO: 6352 - DNA, 2219 bp, Zea mays subsp. mays
  misc_feature (1)..(2219): Ceres Seq. ID no. 12409104
  misc_feature: MA Experiment ID: 108544 Result: Up-regulated in Transcription
  misc_feature: MA Experiment ID: 108559 Result: Down-regulated in Transcription
  misc_feature: MA Experiment 108559 PARAMETER Experiment Name: Zm_5mM_NO_P Parameter: Age (day) Value: 8
  misc_feature: MA Experiment 108559 PARAMETER Experiment Name: Zm_5mM_NO_P Parameter: Organism Value: Zea mays
  misc_feature: MA Experiment 108559 PARAMETER Experiment Name: Zm_5mM_NO_P Parameter: Plant Line Value: 35A19
  misc_feature: MA Experiment 108559 PARAMETER Experiment Name: Zm_5mM_NO_P Parameter: Timepoint (hr) Value: 12
  misc_feature: MA Experiment 108559 PARAMETER Experiment Name: Zm_5mM_NO_P Parameter: Tissue Value: Aerial
  misc_feature: MA Experiment 108559 PARAMETER Experiment Name: Zm_5mM_NO_P Parameter: Treatment Value: 5mM NO vs. No Treatment
attcgagccctgaaatcccaaaagcccaaaccaaatccaagcgcaagagggggcaaagccgcaaagggggaggcaccaggcaccggcagccattacttactggtcctcactcccacaccaaccaaccaacctcctctgcctgccgcttctcctgctgcgggcgggcactgctgcaagtactagaggaggacatccgcttccattactgcgcctgcggaggatcggaggaaccagtagcggaggcttcgattttcggcgggcgcaataaatttcccgcatggctcggagggccgcgtcctcgctcgtctcccgctgcctcctggcgagggcccctgccggcgcgccgcccgctgccccctctgcgccgcgcaggacagtgcctgcagatgggatgcacaggctgttgccaggtgtccttcagaggttcagcactgcagcagcagtagaggagcccatcacgccgtcagtccatgtgaactacacaaagctcctcattaatgggaactttgttgattccgcatccggcaagaccttcccaactctggaccctcgtacaggggaggtgattgctcatgtggctgagggtgacgcagaggacattaaccgtgcagtagctgcggctcgcaaggcttttgatgaagggccatggccgaagatgactgcctatgagaggtcccgtatcctactgcggtttgctgatttgatagagaagcacaatgacgagcttgctgctttggagacatgggacaacgggaagccatatgagcaagcagcccagattgaagtacccatggtggcccgtcttatgcgttactatgctggttgggctgataagatccatgggctcattgtgccggctgatggcccacaccatgtacagatcttgcatgagccaattggtgttgcaggtcagatcatcccatggaactttcctcttctgatgtatgcctggaaagttggccctgctttggcatgtggaaatactctcgtgctcaagactgctgaacaaacccctctatcggctttgtatatctccaaattgttgcatgaggctggactacctgagggtgttgtgaatgtcgtttctggttttggccctactgctggtgctgctcttgctagtcacatggatgttgataagatcgcatttactggatctaccgatactggaaaaattattctcgagttggctgcaaagagcaaccttaagacagtgacactggagttaggaggcaagtcccctttcatcataatggacgatgctgatgttgaccatgctgttgagcttgcgcactttgccctgttctttaaccagggacaatgctgctgcgctggatctcgcacgtttgtacatgagcgtgtttatgatgagtttgtggagaaggccaaggctcgtgcattgaagcgcgtcgttggtgatccgttcaggaaaggtgttgaacagggcccgcagattgacgacgagcaattcaacaagatcttgcgctacattaggtatggtgttgacggtggagctacccttgtgacgggtggtgataggttgggtgacaagggtttctacatccagccaacgattttctcagatgtccaggacggcatgaagattgctcaggaggagatatttgggcctgtgcagtcgatcctcaagttcaaagacctcaatgaggttatcaagagggcaaacgcgagccagtatggattggccgccggcgtgttcaccaacagcctggacacggccaacaccctgacgcgcgcgctcagggccgggaccgtctgggtgaactgcttcgacgtcttcgatgctgcgattccgtttggtgggtacaagatgagcggcatcgggagggagaagggcgttgacagcctgaagaactacctgcaggtgaaggcggtcgtcaccccaatcaagaacgccgcgtggttgtagacgctgcaagtgtggccttgtgcacgagaaccacgtatattcatttcctggtcacatccccgaacaatgtgaaggcgttaatcagatagatgacgatgaagaagaacaactataataagatttgccctagcctgggttctcagttatctctaataagttttatggttggtgcctatatattgtgcaatttggttgctcccttttattttgtttctttttgataagactgttctagcaacggatatgcagagttcattatgaaaatgcatttgttagtgtctttgatggttaa

SEQ ID NO: 6353 - protein, 549 aa, Zea mays subsp. mays
  peptide (1)..(549): Ceres Seq. ID no. 12409105
  misc_feature (1)..(549): Homolog of NCBI NO: 7431451 NR Description: rf2 nuclear restorer protein - maize RF2 >gi|12004294|gb|AAG43988.1|AF215823_1 T cytoplasm male
  misc_feature (1)..(549): Homolog of NCBI NO: 14276718 NR Description: T-cytoplasm male sterility restorer factor 2 [Zea
  misc_feature (1)..(549): Homolog of NCBI NO: 20530131 NR Description: mitochondrial aldehyde dehydrogenase [Sorghum
  misc_feature (2)..(549): Homolog of NCBI NO: 8163730 NR Description: aldehyde dehydrogenase [Oryza sativa]
  misc_feature (2)..(549): Homolog of NCBI NO: 11691926 NR Description: aldehyde dehydrogenase ALDH2b [Oryza sativa
  misc_feature (3)..(549): Homolog of NCBI NO: 20530127 NR Description: mitochondrial aldehyde dehydrogenase [Secale
  misc_feature (3)..(549): Homolog of NCBI NO: 15128580 NR Description: mitochondrial aldehyde dehydrogenase ALDH2
  misc_feature (2)..(549): Homolog of NCBI NO: 20530129 NR Description: mitochondrial aldehyde dehydrogenase [Sorghum
  misc_feature (2)..(549): Homolog of NCBI NO: 8574429 NR Description: mitochondrial aldehyde dehydrogenase ALDH2a
  misc_feature (3)..(549): Homolog of NCBI NO: 19850251 NR Description: mitochondrial aldehyde dehydrogenase RF2B [Zea >gi|19850253|gb|AAL99614.1|AF348418_1 mitochondrial aldehyde
MARRAASSLVSRCLLARAPAGAPPAAPSAPRRTVPADGMHRLLPGVLQRFSTAAAVEEPITPSVHVNYTKLLINGNFVDSASGKTFPTLDPRTGEVIAHVAEGDAEDINRAVAAARKAFDEGPWPKMTAYERSRILLRFADLIEKHNDELAALETWDNGKPYEQAAQIEVPMVARLMRYYAGWADKIHGLIVPADGPHHVQILHEPIGVAGQIIPWNFPLLMYAWKVGPALACGNTLVLKTAEQTPLSALYISKLLHEAGLPEGVVNVVSGFGPTAGAALASHMDVDKIAFTGSTDTGKIILELAAKSNLKTVTLELGGKSPFIIMDDADVDHAVELAHFALFFNQGQCCCAGSRTFVHERVYDEFVEKAKARALKRVVGDPFRKGVEQGPQIDDEQFNKILRYIRYGVDGGATLVTGGDRLGDKGFYIQPTIFSDVQDGMKIAQEEIFGPVQSILKFKDLNEVIKRANASQYGLAAGVFTNSLDTANTLTRALRAGTVWVNCFDVFDAAIPFGGYKMSGIGREKGVDSLKNYLQVKAVVTPIKNAAWL

SEQ ID NO: 6354 - protein, 511 aa, Zea mays subsp. mays
  peptide (1)..(511): Ceres Seq. ID no. 12409106
  misc_feature (1)..(511): Homolog of NCBI NO: 7431451 NR Description: rf2 nuclear restorer protein - maize RF2 >gi|12004294|gb|AAG43988.1|AF215823_1 T cytoplasm male
  misc_feature (1)..(511): Homolog of NCBI NO: 14276718 NR Description: T-cytoplasm male sterility restorer factor 2 [Zea
  misc_feature (1)..(511): Homolog of NCBI NO: 20530131 NR Description: mitochondrial aldehyde dehydrogenase [Sorghum
  misc_feature (1)..(511): Homolog of NCBI NO: 8163730 NR Description: aldehyde dehydrogenase [Oryza sativa]
  misc_feature (1)..(511): Homolog of NCBI NO: 11691926 NR Description: aldehyde dehydrogenase ALDH2b [Oryza sativa
  misc_feature (1)..(511): Homolog of NCBI NO: 20530127 NR Description: mitochondrial aldehyde dehydrogenase [Secale
  misc_feature (1)..(511): Homolog of NCBI NO: 15128580 NR Description: mitochondrial aldehyde dehydrogenase ALDH2
  misc_feature (1)..(511): Homolog of NCBI NO: 20530129 NR Description: mitochondrial aldehyde dehydrogenase [Sorghum
  misc_feature (1)..(511): Homolog of NCBI NO: 8574429 NR Description: mitochondrial aldehyde dehydrogenase ALDH2a
  misc_feature (1)..(511): Homolog of NCBI NO: 19850251 NR Description: mitochondrial aldehyde dehydrogenase RF2B [Zea >gi|19850253|gb|AAL99614.1|AF348418_1 mitochondrial aldehyde
MHRLLPGVLQRFSTAAAVEEPITPSVHVNYTKLLINGNFVDSASGKTFPTLDPRTGEVIAHVAEGDAEDINRAVAAARKAFDEGPWPKMTAYERSRILLRFADLIEKHNDELAALETWDNGKPYEQAAQIEVPMVARLMRYYAGWADKIHGLIVPADGPHHVQILHEPIGVAGQIIPWNFPLLMYAWKVGPALACGNTLVLKTAEQTPLSALYISKLLHEAGLPEGVVNVVSGFGPTAGAALASHMDVDKIAFTGSTDTGKIILELAAKSNLKTVTLELGGKSPFIIMDDADVDHAVELAHFALFFNQGQCCCAGSRTFVHERVYDEFVEKAKARALKRVVGDPFRKGVEQGPQIDDEQFNKILRYIRYGVDGGATLVTGGDRLGDKGFYIQPTIFSDVQDGMKIAQEEIFGPVQSILKFKDLNEVIKRANASQYGLAAGVFTNSLDTANTLTRALRAGTVWVNCFDVFDAAIPFGGYKMSGIGREKGVDSLKNYLQVKAVVTPIKNAAWL

SEQ ID NO: 6355 - protein, 423 aa, Zea mays subsp. mays
  peptide (1)..(423): Ceres Seq. ID no. 12409107
  misc_feature (1)..(423): Homolog of NCBI NO: 7431451 NR Description: rf2 nuclear restorer protein - maize RF2 >gi|12004294|gb|AAG43988.1|AF215823_1 T cytoplasm male
  misc_feature (1)..(423): Homolog of NCBI NO: 14276718 NR Description: T-cytoplasm male sterility restorer factor 2 [Zea
  misc_feature (1)..(423): Homolog of NCBI NO: 20530131 NR Description: mitochondrial aldehyde dehydrogenase [Sorghum
  misc_feature (1)..(423): Homolog of NCBI NO: 8163730 NR Description: aldehyde dehydrogenase [Oryza sativa]
  misc_feature (1)..(423): Homolog of NCBI NO: 11691926 NR Description: aldehyde dehydrogenase ALDH2b [Oryza sativa
  misc_feature (1)..(423): Homolog of NCBI NO: 20530127 NR Description: mitochondrial aldehyde dehydrogenase [Secale
  misc_feature (1)..(423): Homolog of NCBI NO: 15128580 NR Description: mitochondrial aldehyde dehydrogenase ALDH2
  misc_feature (1)..(423): Homolog of NCBI NO: 20530129 NR Description: mitochondrial aldehyde dehydrogenase [Sorghum
  misc_feature (1)..(423): Homolog of NCBI NO: 8574429 NR Description: mitochondrial aldehyde dehydrogenase ALDH2a
  misc_feature (1)..(423): Homolog of NCBI NO: 19850251 NR Description: mitochondrial aldehyde dehydrogenase RF2B [Zea >gi|19850253|gb|AAL99614.1|AF348418_1 mitochondrial aldehyde
MTAYERSRILLRFADLIEKHNDELAALETWDNGKPYEQAAQIEVPMVARLMRYYAGWADKIHGLIVPADGPHHVQILHEPIGVAGQIIPWNFPLLMYAWKVGPALACGNTLVLKTAEQTPLSALYISKLLHEAGLPEGVVNVVSGFGPTAGAALASHMDVDKIAFTGSTDTGKIILELAAKSNLKTVTLELGGKSPFIIMDDADVDHAVELAHFALFFNQGQCCCAGSRTFVHERVYDEFVEKAKARALKRVVGDPFRKGVEQGPQIDDEQFNKILRYIRYGVDGGATLVTGGDRLGDKGFYIQPTIFSDVQDGMKIAQEEIFGPVQSILKFKDLNEVIKRANASQYGLAAGVFTNSLDTANTLTRALRAGTVWVNCFDVFDAAIPFGGYKMSGIGREKGVDSLKNYLQVKAVVTPIKNAAWL

SEQ ID NO: 6356 - DNA, 1566 bp, Zea mays subsp. mays
  misc_feature (1)..(1566): Ceres Seq. ID no. 12374418
  misc_feature: MA Experiment ID: 108527 Result: Down-regulated in Transcription
  misc_feature: MA Experiment 108527 PARAMETER Experiment Name: Zm_5mM_NO_P Parameter: Age (day) Value: 8
  misc_feature: MA Experiment 108527 PARAMETER Experiment Name: Zm_5mM_NO_P Parameter: Organism Value: Zea mays
  misc_feature: MA Experiment 108527 PARAMETER Experiment Name: Zm_5mM_NO_P Parameter: Plant Line Value: 35A19
  misc_feature: MA Experiment 108527 PARAMETER Experiment Name: Zm_5mM_NO_P Parameter: Timepoint (hr) Value: 6
  misc_feature: MA Experiment 108527 PARAMETER Experiment Name: Zm_5mM_NO_P Parameter: Tissue Value: Aerial
  misc_feature: MA Experiment 108527 PARAMETER Experiment Name: Zm_5mM_NO_P Parameter: Treatment Value: 5mM NO vs. No Treatment
  misc_feature: MA Experiment ID: 108528 Result: Up-regulated in Transcription
  misc_feature: MA Experiment 108528 PARAMETER Experiment Name: Zm_Imbibed_Seeds_P Parameter: Age (day) Value: 5 vs. 2
  misc_feature: MA Experiment 108528 PARAMETER Experiment Name: Zm_Imbibed_Seeds_P Parameter: Organism Value: Zea mays
  misc_feature: MA Experiment 108528 PARAMETER Experiment Name: Zm_Imbibed_Seeds_P Parameter: Plant Line Value: 35A19
  misc_feature: MA Experiment 108528 PARAMETER Experiment Name: Zm_Imbibed_Seeds_P Parameter: Tissue Value: Aerial vs. Embryo
  misc_feature: MA Experiment ID: 108530 Result: Up-regulated in Transcription
  misc_feature: MA Experiment 108530 PARAMETER Experiment Name: Zm_Imbibed_Seeds_P Parameter: Age (day) Value: 6 vs. 2
  misc_feature: MA Experiment 108530 PARAMETER Experiment Name: Zm_Imbibed_Seeds_P Parameter: Organism Value: Zea mays
  misc_feature: MA Experiment 108530 PARAMETER Experiment Name: Zm_Imbibed_Seeds_P Parameter: Plant Line Value: 35A19
  misc_feature: MA Experiment 108530 PARAMETER Experiment Name: Zm_Imbibed_Seeds_P Parameter: Tissue Value: Aerial vs. Embryo
  misc_feature: MA Experiment ID: 108536 Result: Down-regulated in Transcription
  misc_feature: MA Experiment 108536 PARAMETER Experiment Name: Zm_Meristem_P Parameter: Age (day) Value: 8
  misc_feature: MA Experiment 108536 PARAMETER Experiment Name: Zm_Meristem_P Parameter: Organism Value: Zea mays
  misc_feature: MA Experiment 108536 PARAMETER Experiment Name: Zm_Meristem_P Parameter: Plant Line Value: 35A19
  misc_feature: MA Experiment 108536 PARAMETER Experiment Name: Zm_Meristem_P Parameter: Tissue Value: Shoot Meristem vs. Above Shoot Meristem
  misc_feature: MA Experiment ID: 108543 Result: Up-regulated in Transcription
  misc_feature: MA Experiment ID: 108545 Result: Up-regulated in Transcription
  misc_feature: MA Experiment 108545 PARAMETER Experiment Name: Zm_Imbibed_Seeds_P Parameter: Age (day) Value: 3 vs. 2
  misc_feature: MA Experiment 108545 PARAMETER Experiment Name: Zm_Imbibed_Seeds_P Parameter: Organism Value: Zea mays
  misc_feature: MA Experiment 108545 PARAMETER Experiment Name: Zm_Imbibed_Seeds_P Parameter: Plant Line Value: 35A19
  misc_feature: MA Experiment 108545 PARAMETER Experiment Name: Zm_Imbibed_Seeds_P Parameter: Tissue Value: Aerial vs. Embryo
  misc_feature: MA Experiment ID: 108546 Result: Down-regulated in Transcription
  misc_feature: MA Experiment 108546 PARAMETER Experiment Name: Zm_Imbibed_Seeds_P Parameter: Age (day) Value: 3 vs. 2
  misc_feature: MA Experiment 108546 PARAMETER Experiment Name: Zm_Imbibed_Seeds_P Parameter: Organism Value: Zea mays
  misc_feature: MA Experiment 108546 PARAMETER Experiment Name: Zm_Imbibed_Seeds_P Parameter: Plant Line Value: 35A19
  misc_feature: MA Experiment 108546 PARAMETER Experiment Name: Zm_Imbibed_Seeds_P Parameter: Tissue Value: Roots vs. Embryo
  misc_feature: MA Experiment ID: 108547 Result: Up-regulated in Transcription
  misc_feature: MA Experiment 108547 PARAMETER Experiment Name: Zm_Imbibed_Seeds_P Parameter: Age (day) Value: 4 vs. 2
  misc_feature: MA Experiment 108547 PARAMETER Experiment Name: Zm_Imbibed_Seeds_P Parameter: Organism Value: Zea mays
  misc_feature: MA Experiment 108547 PARAMETER Experiment Name: Zm_Imbibed_Seeds_P Parameter: Plant Line Value: 35A19
  misc_feature: MA Experiment 108547 PARAMETER Experiment Name: Zm_Imbibed_Seeds_P Parameter: Tissue Value: Aerial vs. Embryo
  misc_feature: MA Experiment ID: 108559 Result: Down-regulated in Transcription
  misc_feature: MA Experiment 108559 PARAMETER Experiment Name: Zm_5mM_NO_P Parameter: Age (day) Value: 8
  misc_feature: MA Experiment 108559 PARAMETER Experiment Name: Zm_5mM_NO_P Parameter: Organism Value: Zea mays
  misc_feature: MA Experiment 108559 PARAMETER Experiment Name: Zm_5mM_NO_P Parameter: Plant Line Value: 35A19
  misc_feature: MA Experiment 108559 PARAMETER Experiment Name: Zm_5mM_NO_P Parameter: Timepoint (hr) Value: 12
  misc_feature: MA Experiment 108559 PARAMETER Experiment Name: Zm_5mM_NO_P Parameter: Tissue Value: Aerial
  misc_feature: MA Experiment 108559 PARAMETER Experiment Name: Zm_5mM_NO_P Parameter: Treatment Value: 5mM NO vs. No Treatment
  misc_feature: MA Experiment ID: 108687 Result: Down-regulated in Transcription
  misc_feature: MA Experiment 108687 PARAMETER Experiment Name: Zm_Embryos-Flowers__P Parameter: Tissue Value: Embryo vs. Aerial+
  misc_feature: MA Experiment ID: 108688 Result: Down-regulated in Transcription
  misc_feature: MA Experiment 108688 PARAMETER Experiment Name: Zm_Embryos-Flowers__P Parameter: Tissue Value: Immature Flowers vs. Aerial+
  misc_feature: MA Experiment ID: 20000626 Result: Down-regulated in Transcription
  misc_feature: MA Experiment 20000626 PARAMETER Experiment Name: Zm_Herbicide-Treatments_P Parameter: Timepoint (hr) Value: 12
  misc_feature: MA Experiment 20000626 PARAMETER Experiment Name: Zm_Herbicide-Treatments_P Parameter: Tissue Value: Aerial
  misc_feature: MA Experiment 20000626 PARAMETER Experiment Name: Zm_Herbicide-Treatments_P Parameter: Treatment Value: Roundup vs. No Treatment
ggcactgccattcccgtttcctcgctcgaacacacaccgaagagagagacagagcgagagaggatggcgtccctggcgcagcacgtcgcgggcctaccgtgcccccctctatccggcgcgtcgcgccgtcgccccgcggcgcagaggcggcctccgtcggcgcttgtgtgcggtacctatgcgctgaccaaggacgagcgggagcgggagcggatgcgccaggtgttcgacgacgcctccgagcgctgccgcaccgcgcccatggagggcgtcgccttctcccccgacgacctcgacaccgccgtcgagtccaccgacatagacacggagatcggctcgctcattaaaggaacagtatttatgactacctcaaatggtgcatatatcgacatccaatccaagtctactgcttttttgcccttagatgaggcatgtcttcttgatatcgataatgttgaagaggctggcattcgtcctgggttagtagaagaattcatgataattgatgagaacccaggtgatgaaactttgattctaagtttgcaagcaattcagcaagaacttgcatgggaaaggtgccggcaacttcaggccgaagatgtcgttgtcacgggtaaagtaattggtggaaacaaaggaggtgtagtagctcttgtggatgggcttaagggtttcgttccattttcgcaagtgtcatcgaaaacaaccgccgaagagctgcttgagaaagaattgcctctgaagtttgtagaggtcgatgaggaacaaggcaggcttgtcctcagtaatcgcaaggcaatggcagatagtcaggcccagctaggtattggatcagttgtcttgggaactgtagagagcctaaaaccttatggcgccttcattgacatcggtggaatcaacggccttctccatgtgagccagattagtcatgaccgtgttgcagatatctcaacagttctgcaaccaggagataccctcaaggttatgatactgagccatgaccgtgaaagaggccgagtcagcctttctactaagaagcttgagccaacacctggtgacatgatccgcaatcccaagcttgtgtttgagaaggctgatgagatggctcagatattcaggcagagaatagctcaggcagaggctatggctcgtgctgacatgttgagattccagccagagagtggattgaccctcagttcagagggcatcttaggaccattgtcgtcggatgcaccttcggaggattctgaagaacccacagatgaatagaggcagttgacgaagtgcaccgggtttgagatatgtgatggcagttcatcatgctcattttccttggggtgggggaggcatgacgagagcatgttctgttcagatcgttttccccgttccacttattcttgtcttgtactaggaaatctgaaaatgtaacaaggttctgaagacaccgaaaagaaatgtaattaaatccctctgtgaagttatcccattctcgcaggaacctcaatgtgtagtctgatcgttgagtgtatattttgtaattttgaatgcattttgaatgcgtattcc

SEQ ID NO: 6357 - protein, 422 aa, Zea mays subsp. mays
  peptide (1)..(422): Ceres Seq. ID no. 12374419
  misc_feature (273)..(345): Pfam Name: S1 RNA binding domain Pfam Description: S1 RNA binding domain
  misc_feature (22)..(414): Homolog of NCBI NO: 133872 NR Description: 30S ribosomal protein S1, chloroplast precursor
  misc_feature (22)..(422): Homolog of NCBI NO: 30692346 NR Description: ribosomal protein S1 [Arabidopsis thaliana] putative ribosomal protein S1 [Arabidopsis thaliana] Unknown protein [Arabidopsis thaliana]
  misc_feature (91)..(418): Homolog of NCBI NO: 22299589 NR Description: 30S ribosomal protein S1 [Thermosynechococcus BP- 1] >gi|22295773|dbj|BAC09598.1| 30S ribosomal protein S1
  misc_feature (77)..(380): Homolog of NCBI NO: 33863935 NR Description: 30S ribosomal protein S1, homolog A marinus str. MIT 9313] >gi|33635519|emb|CAE21843.1| 30S ribosomal
  misc_feature (77)..(380): Homolog of NCBI NO: 33866517 NR Description: 30S ribosomal protein S1, homolog A sp. WH 8102] >gi|33633295|emb|CAE08500.1| 30S ribosomal protein
  misc_feature (77)..(380): Homolog of NCBI NO: 33239803 NR Description: Ribosomal protein S1 [Prochlorococcus marinus marinus str. CCMP1375] >gi|33237329|gb|AAP99397.1| Ribosomal
  misc_feature (87)..(382): Homolog of NCBI NO: 1173225 NR Description: 30S ribosomal protein S1 >gi|1075612|pir||S51485
  misc_feature (91)..(382): Homolog of NCBI NO: 16330162 NR Description: 30S ribosomal protein S1 [Synechocystis sp. PCC >gi|2500385|sp|P73530|RS1A_SYNY3 30S ribosomal protein S1 homolog
  misc_feature (91)..(422): Homolog of NCBI NO: 17227632 NR Description: 30S ribosomal protein S1 [Nostoc sp. PCC 7120]
  misc_feature (96)..(393): Homolog of NCBI NO: 40641370 NR Description: ribosomal protein S1 homologue [Chlamydomonas
GTAIPVSSLEHTPKRETERERMASLAQHVAGLPCPPLSGASRRRPAAQRRPPSALVCGTYALTKDERERERMRQVFDDASERCRTAPMEGVAFSPDDLDTAVESTDIDTEIGSLIKGTVFMTTSNGAYIDIQSKSTAFLPLDEACLLDIDNVEEAGIRPGLVEEFMIIDENPGDETLILSLQAIQQELAWERCRQLQAEDVVVTGKVIGGNKGGVVALVDGLKGFVPFSQVSSKTTAEELLEKELPLKFVEVDEEQGRLVLSNRKAMADSQAQLGIGSVVLGTVESLKPYGAFIDIGGINGLLHVSQISHDRVADISTVLQPGDTLKVMILSHDRERGRVSLSTKKLEPTPGDMIRNPKLVFEKADEMAQIFRQRIAQAEAMARADMLRFQPESGLTLSSEGILGPLSSDAPSEDSEEPTDE

SEQ ID NO: 6358 - protein, 401 aa, Zea mays subsp. mays
  peptide (1)..(401): Ceres Seq. ID no. 12374420
  misc_feature (252)..(324): Pfam Name: S1 RNA binding domain Pfam Description: S1 RNA binding domain
  misc_feature (1)..(393): Homolog of NCBI NO: 133872 NR Description: 30S ribosomal protein S1, chloroplast precursor
  misc_feature (1)..(401): Homolog of NCBI NO: 30692346 NR Description: ribosomal protein S1 [Arabidopsis thaliana] putative ribosomal protein S1 [Arabidopsis thaliana] Unknown protein [Arabidopsis thaliana]
  misc_feature (70)..(397): Homolog of NCBI NO: 22299589 NR Description: 30S ribosomal protein S1 [Thermosynechococcus BP- 1] >gi|22295773|dbj|BAC09598.1| 30S ribosomal protein S1
  misc_feature (56)..(359): Homolog of NCBI NO: 33863935 NR Description: 30S ribosomal protein S1, homolog A marinus str. MIT 9313] >gi|33635519|emb|CAE21843.1| 30S ribosomal
  misc_feature (56)..(359): Homolog of NCBI NO: 33866517 NR Description: 30S ribosomal protein S1, homolog A sp. WH 8102] >gi|33633295|emb|CAE08500.1| 30S ribosomal protein
  misc_feature (56)..(359): Homolog of NCBI NO: 33239803 NR Description: Ribosomal protein S1 [Prochlorococcus marinus marinus str. CCMP1375] >gi|33237329|gb|AAP99397.1| Ribosomal
  misc_feature (66)..(361): Homolog of NCBI NO: 1173225 NR Description: 30S ribosomal protein S1 >gi|1075612|pir||S51485
  misc_feature (70)..(361): Homolog of NCBI NO: 16330162 NR Description: 30S ribosomal protein S1 [Synechocystis sp. PCC >gi|2500385|sp|P73530|RS1A_SYNY3 30S ribosomal protein S1 homolog
  misc_feature (70)..(401): Homolog of NCBI NO: 17227632 NR Description: 30S ribosomal protein S1 [Nostoc sp. PCC 7120]
  misc_feature (75)..(372): Homolog of NCBI NO: 40641370 NR Description: ribosomal protein S1 homologue [Chlamydomonas
MASLAQHVAGLPCPPLSGASRRRPAAQRRPPSALVCGTYALTKDERERERMRQVFDDASERCRTAPMEGVAFSPDDLDTAVESTDIDTEIGSLIKGTVFMTTSNGAYIDIQSKSTAFLPLDEACLLDIDNVEEAGIRPGLVEEFMIIDENPGDETLILSLQAIQQELAWERCRQLQAEDVVVTGKVIGGNKGGVVALVDGLKGFVPFSQVSSKTTAEELLEKELPLKFVEVDEEQGRLVLSNRKAMADSQAQLGIGSVVLGTVESLKPYGAFIDIGGINGLLHVSQISHDRVADISTVLQPGDTLKVMILSHDRERGRVSLSTKKLEPTPGDMIRNPKLVFEKADEMAQIFRQRIAQAEAMARADMLRFQPESGLTLSSEGILGPLSSDAPSEDSEEPTDE

SEQ ID NO: 6359 - protein, 351 aa, Zea mays subsp. mays
  peptide (1)..(351): Ceres Seq. ID no. 12374421
  misc_feature (202)..(274): Pfam Name: S1 RNA binding domain Pfam Description: S1 RNA binding domain
  misc_feature (1)..(343): Homolog of NCBI NO: 133872 NR Description: 30S ribosomal protein S1, chloroplast precursor
  misc_feature (1)..(351): Homolog of NCBI NO: 30692346 NR Description: ribosomal protein S1 [Arabidopsis thaliana] putative ribosomal protein S1 [Arabidopsis thaliana] Unknown protein [Arabidopsis thaliana]
  misc_feature (20)..(347): Homolog of NCBI NO: 22299589 NR Description: 30S ribosomal protein S1 [Thermosynechococcus BP- 1] >gi|22295773|dbj|BAC09598.1| 30S ribosomal protein S1
  misc_feature (6)..(309): Homolog of NCBI NO: 33863935 NR Description: 30S ribosomal protein S1, homolog A marinus str. MIT 9313] >gi|33635519|emb|CAE21843.1| 30S ribosomal
  misc_feature (6)..(309): Homolog of NCBI NO: 33866517 NR Description: 30S ribosomal protein S1, homolog A sp. WH 8102] >gi|33633295|emb|CAE08500.1| 30S ribosomal protein
  misc_feature (6)..(309): Homolog of NCBI NO: 33239803 NR Description: Ribosomal protein S1 [Prochlorococcus marinus marinus str. CCMP1375] >gi|33237329|gb|AAP99397.1| Ribosomal
  misc_feature (16)..(311): Homolog of NCBI NO: 1173225 NR Description: 30S ribosomal protein S1 >gi|1075612|pir||S51485
  misc_feature (20)..(311): Homolog of NCBI NO: 16330162 NR Description: 30S ribosomal protein S1 [Synechocystis sp. PCC >gi|2500385|sp|P73530|RS1A_SYNY3 30S ribosomal protein S1 homolog
  misc_feature (20)..(351): Homolog of NCBI NO: 17227632 NR Description: 30S ribosomal protein S1 [Nostoc sp. PCC 7120]
  misc_feature (25)..(322): Homolog of NCBI NO: 40641370 NR Description: ribosomal protein S1 homologue [Chlamydomonas
MRQVFDDASERCRTAPMEGVAFSPDDLDTAVESTDIDTEIGSLIKGTVFMTTSNGAYIDIQSKSTAFLPLDEACLLDIDNVEEAGIRPGLVEEFMIIDENPGDETLILSLQAIQQELAWERCRQLQAEDVVVTGKVIGGNKGGVVALVDGLKGFVPFSQVSSKTTAEELLEKELPLKFVEVDEEQGRLVLSNRKAMADSQAQLGIGSVVLGTVESLKPYGAFIDIGGINGLLHVSQISHDRVADISTVLQPGDTLKVMILSHDRERGRVSLSTKKLEPTPGDMIRNPKLVFEKADEMAQIFRQRIAQAEAMARADMLRFQPESGLTLSSEGILGPLSSDAPSEDSEEPTDE

SEQ ID NO: 6360 - DNA, 1546 bp, Zea mays subsp. mays
  misc_feature (1)..(1546): Ceres Seq. ID no. 12409096
  misc_feature: MA Experiment ID: 108515 Result: Down-regulated in Transcription
  misc_feature: MA Experiment 108515 PARAMETER Experiment Name: Zm_2mM_SA_P Parameter: Age (day) Value: 8
  misc_feature: MA Experiment 108515 PARAMETER Experiment Name: Zm_2mM_SA_P Parameter: Organism Value: Zea mays
  misc_feature: MA Experiment 108515 PARAMETER Experiment Name: Zm_2mM_SA_P Parameter: Plant Line Value: 35A19
  misc_feature: MA Experiment 108515 PARAMETER Experiment Name: Zm_2mM_SA_P Parameter: Timepoint (hr) Value: 12
  misc_feature: MA Experiment 108515 PARAMETER Experiment Name: Zm_2mM_SA_P Parameter: Tissue Value: Aerial
  misc_feature: MA Experiment 108515 PARAMETER Experiment Name: Zm_2mM_SA_P Parameter: Treatment Value: 2mM SA vs. No Treatment
  misc_feature: MA Experiment ID: 108523 Result: Down-regulated in Transcription
  misc_feature: MA Experiment 108523 PARAMETER Experiment Name: Zm_42deg_Heat_P Parameter: Age (day) Value: 8
  misc_feature: MA Experiment 108523 PARAMETER Experiment Name: Zm_42deg_Heat_P Parameter: Organism Value: Zea mays
  misc_feature: MA Experiment 108523 PARAMETER Experiment Name: Zm_42deg_Heat_P Parameter: Plant Line Value: 35A19
  misc_feature: MA Experiment 108523 PARAMETER Experiment Name: Zm_42deg_Heat_P Parameter: Temperature (deg C) Value: 42 vs. 22
  misc_feature: MA Experiment 108523 PARAMETER Experiment Name: Zm_42deg_Heat_P Parameter: Timepoint (hr) Value: 6
  misc_feature: MA Experiment 108523 PARAMETER Experiment Name: Zm_42deg_Heat_P Parameter: Tissue Value: Aerial
  misc_feature: MA Experiment ID: 108527 Result: Down-regulated in Transcription
  misc_feature: MA Experiment 108527 PARAMETER Experiment Name: Zm_5mM_NO_P Parameter: Age (day) Value: 8
  misc_feature: MA Experiment 108527 PARAMETER Experiment Name: Zm_5mM_NO_P Parameter: Organism Value: Zea mays
  misc_feature: MA Experiment 108527 PARAMETER Experiment Name: Zm_5mM_NO_P Parameter: Plant Line Value: 35A19
  misc_feature: MA Experiment 108527 PARAMETER Experiment Name: Zm_5mM_NO_P Parameter: Timepoint (hr) Value: 6
  misc_feature: MA Experiment 108527 PARAMETER Experiment Name: Zm_5mM_NO_P Parameter: Tissue Value: Aerial
  misc_feature: MA Experiment 108527 PARAMETER Experiment Name: Zm_5mM_NO_P Parameter: Treatment Value: 5mM NO vs. No Treatment
  misc_feature: MA Experiment ID: 108528 Result: Down-regulated in Transcription
  misc_feature: MA Experiment 108528 PARAMETER Experiment Name: Zm_Imbibed_Seeds_P Parameter: Age (day) Value: 5 vs. 2
  misc_feature: MA Experiment 108528 PARAMETER Experiment Name: Zm_Imbibed_Seeds_P Parameter: Organism Value: Zea mays
  misc_feature: MA Experiment 108528 PARAMETER Experiment Name: Zm_Imbibed_Seeds_P Parameter: Plant Line Value: 35A19
  misc_feature: MA Experiment 108528 PARAMETER Experiment Name: Zm_Imbibed_Seeds_P Parameter: Tissue Value: Aerial vs. Embryo
  misc_feature: MA Experiment ID: 108530 Result: Down-regulated in Transcription
  misc_feature: MA Experiment 108530 PARAMETER Experiment Name: Zm_Imbibed_Seeds_P Parameter: Age (day) Value: 6 vs. 2
  misc_feature: MA Experiment 108530 PARAMETER Experiment Name: Zm_Imbibed_Seeds_P Parameter: Organism Value: Zea mays
  misc_feature: MA Experiment 108530 PARAMETER Experiment Name: Zm_Imbibed_Seeds_P Parameter: Plant Line Value: 35A19
  misc_feature: MA Experiment 108530 PARAMETER Experiment Name: Zm_Imbibed_Seeds_P Parameter: Tissue Value: Aerial vs. Embryo
  misc_feature: MA Experiment ID: 108535 Result: Up-regulated in Transcription
  misc_feature: MA Experiment 108535 PARAMETER Experiment Name: Zm_Meristem_P Parameter: Age (day) Value: 8
  misc_feature: MA Experiment 108535 PARAMETER Experiment Name: Zm_Meristem_P Parameter: Organism Value: Zea mays
  misc_feature: MA Experiment 108535 PARAMETER Experiment Name: Zm_Meristem_P Parameter: Plant Line Value: 35A19
  misc_feature: MA Experiment 108535 PARAMETER Experiment Name: Zm_Meristem_P Parameter: Tissue Value: Root Meristem vs. Above Root Meristem
  misc_feature: MA Experiment ID: 108536 Result: Down-regulated in Transcription
  misc_feature: MA Experiment 108536 PARAMETER Experiment Name: Zm_Meristem_P Parameter: Age (day) Value: 8
  misc_feature: MA Experiment 108536 PARAMETER Experiment Name: Zm_Meristem_P Parameter: Organism Value: Zea mays
  misc_feature: MA Experiment 108536 PARAMETER Experiment Name: Zm_Meristem_P Parameter: Plant Line Value: 35A19
  misc_feature: MA Experiment 108536 PARAMETER Experiment Name: Zm_Meristem_P Parameter: Tissue Value: Shoot Meristem vs. Above Shoot Meristem
  misc_feature: MA Experiment ID: 108540 Result: Down-regulated in Transcription
  misc_feature: MA Experiment 108540 PARAMETER Experiment Name: Zm_20percent_PEG_P Parameter: Age (day) Value: 8
  misc_feature: MA Experiment 108540 PARAMETER Experiment Name: Zm_20percent_PEG_P Parameter: Organism Value: Zea mays
  misc_feature: MA Experiment 108540 PARAMETER Experiment Name: Zm_20percent_PEG_P Parameter: Plant Line Value: 35A19
  misc_feature: MA Experiment 108540 PARAMETER Experiment Name: Zm_20percent_PEG_P Parameter: Timepoint (hr) Value: 6
  misc_feature: MA Experiment 108540 PARAMETER Experiment Name: Zm_20percent_PEG_P Parameter: Tissue Value: Aerial
  misc_feature: MA Experiment 108540 PARAMETER Experiment Name: Zm_20percent_PEG_P Parameter: Treatment Value: 20percent PEG vs. No Treatment
  misc_feature: MA Experiment ID: 108544 Result: Down-regulated in Transcription
  misc_feature: MA Experiment ID: 108545 Result: Down-regulated in Transcription
  misc_feature: MA Experiment 108545 PARAMETER Experiment Name: Zm_Imbibed_Seeds_P Parameter: Age (day) Value: 3 vs. 2
  misc_feature: MA Experiment 108545 PARAMETER Experiment Name: Zm_Imbibed_Seeds_P Parameter: Organism Value: Zea mays
  misc_feature: MA Experiment 108545 PARAMETER Experiment Name: Zm_Imbibed_Seeds_P Parameter: Plant Line Value: 35A19
  misc_feature: MA Experiment 108545 PARAMETER Experiment Name: Zm_Imbibed_Seeds_P Parameter: Tissue Value: Aerial vs. Embryo
  misc_feature: MA Experiment ID: 108547 Result: Down-regulated in Transcription
  misc_feature: MA Experiment 108547 PARAMETER Experiment Name: Zm_Imbibed_Seeds_P Parameter: Age (day) Value: 4 vs. 2
  misc_feature: MA Experiment 108547 PARAMETER Experiment Name: Zm_Imbibed_Seeds_P Parameter: Organism Value: Zea mays
  misc_feature: MA Experiment 108547 PARAMETER Experiment Name: Zm_Imbibed_Seeds_P Parameter: Plant Line Value: 35A19
  misc_feature: MA Experiment 108547 PARAMETER Experiment Name: Zm_Imbibed_Seeds_P Parameter: Tissue Value: Aerial vs. Embryo
  misc_feature: MA Experiment ID: 108559 Result: Down-regulated in Transcription
  misc_feature: MA Experiment 108559 PARAMETER Experiment Name: Zm_5mM_NO_P Parameter: Age (day) Value: 8
  misc_feature: MA Experiment 108559 PARAMETER Experiment Name: Zm_5mM_NO_P Parameter: Organism Value: Zea mays
  misc_feature: MA Experiment 108559 PARAMETER Experiment Name: Zm_5mM_NO_P Parameter: Plant Line Value: 35A19
  misc_feature: MA Experiment 108559 PARAMETER Experiment Name: Zm_5mM_NO_P Parameter: Timepoint (hr) Value: 12
  misc_feature: MA Experiment 108559 PARAMETER Experiment Name: Zm_5mM_NO_P Parameter: Tissue Value: Aerial
  misc_feature: MA Experiment 108559 PARAMETER Experiment Name: Zm_5mM_NO_P Parameter: Treatment Value: 5mM NO vs. No Treatment
  misc_feature: MA Experiment ID: 108597 Result: Down-regulated in Transcription
  misc_feature: MA Experiment 108597 PARAMETER Experiment Name: Zm_100uM_ABA_P Parameter: Age (day) Value: 9
  misc_feature: MA Experiment 108597 PARAMETER Experiment Name: Zm_100uM_ABA_P Parameter: Organism Value: Zea mays
  misc_feature: MA Experiment 108597 PARAMETER Experiment Name: Zm_100uM_ABA_P Parameter: Plant Line Value: 35A19
  misc_feature: MA Experiment 108597 PARAMETER Experiment Name: Zm_100uM_ABA_P Parameter: Timepoint (hr) Value: 24
  misc_feature: MA Experiment 108597 PARAMETER Experiment Name: Zm_100uM_ABA_P Parameter: Tissue Value: Aerial
  misc_feature: MA Experiment 108597 PARAMETER Experiment Name: Zm_100uM_ABA_P Parameter: Treatment Value: 100uM ABA vs. No Treatment
  misc_feature: MA Experiment ID: 108687 Result: Down-regulated in Transcription
  misc_feature: MA Experiment 108687 PARAMETER Experiment Name: Zm_Embryos-Flowers__P Parameter: Tissue Value: Embryo vs. Aerial+
  misc_feature: MA Experiment ID: 108689 Result: Down-regulated in Transcription
  misc_feature: MA Experiment 108689 PARAMETER Experiment Name: Zm_Drought_Roots_P Parameter: Age (day) Value: 9
  misc_feature: MA Experiment 108689 PARAMETER Experiment Name: Zm_Drought_Roots_P Parameter: Organism Value: Zea mays
  misc_feature: MA Experiment 108689 PARAMETER Experiment Name: Zm_Drought_Roots_P Parameter: Plant Line Value: 35A19
  misc_feature: MA Experiment 108689 PARAMETER Experiment Name: Zm_Drought_Roots_P Parameter: Timepoint (hr) Value: 24
  misc_feature: MA Experiment 108689 PARAMETER Experiment Name: Zm_Drought_Roots_P Parameter: Tissue Value: Roots
  misc_feature: MA Experiment 108689 PARAMETER Experiment Name: Zm_Drought_Roots_P Parameter: Treatment Value: Drought vs. No Drought
  misc_feature: MA Experiment ID: 20000108 Result: Up-regulated in Transcription
  misc_feature: MA Experiment 20000108 PARAMETER Experiment Name: Zm_Root-Tips_P Parameter: Age (day) Value: 12
  misc_feature: MA Experiment 20000108 PARAMETER Experiment Name: Zm_Root-Tips_P Parameter: Organism Value: Zea mays
  misc_feature: MA Experiment 20000108 PARAMETER Experiment Name: Zm_Root-Tips_P Parameter: Tissue Value: Root tips vs. Root mid region    35
  misc_feature: MA Experiment 20000108 PARAMETER Experiment Name: Zm_Root-Tips_P Parameter: Tissue Value: Root tips vs. Root mid region   Sequence Listing-Misc Features (4)
  misc_feature: MA Experiment ID: 20000479 Result: Down-regulated in Transcription
  misc_feature: MA Experiment 20000479 PARAMETER Experiment Name: Zm_Drought_P Parameter: Age (day) Value: 10
  misc_feature: MA Experiment 20000479 PARAMETER Experiment Name: Zm_Drought_P Parameter: Organism Value: Zea mays
  misc_feature: MA Experiment 20000479 PARAMETER Experiment Name: Zm_Drought_P Parameter: Plant Line Value: 35A19
  misc_feature: MA Experiment 20000479 PARAMETER Experiment Name: Zm_Drought_P Parameter: Timepoint (hr) Value: 48
  misc_feature: MA Experiment 20000479 PARAMETER Experiment Name: Zm_Drought_P Parameter: Tissue Value: Aerial
  misc_feature: MA Experiment 20000479 PARAMETER Experiment Name: Zm_Drought_P Parameter: Treatment Value: Drought vs. No Drought
  misc_feature: MA Experiment ID: 20000533 Result: Down-regulated in Transcription
  misc_feature: MA Experiment 20000533 PARAMETER Experiment Name: Zm_0.001percent_MeJA_P Parameter: Age (day) Value: 11
  misc_feature: MA Experiment 20000533 PARAMETER Experiment Name: Zm_0.001percent_MeJA_P Parameter: Organism Value: Zea mays
  misc_feature: MA Experiment 20000533 PARAMETER Experiment Name: Zm_0.001percent_MeJA_P Parameter: Plant Line Value: 35A19
  misc_feature: MA Experiment 20000533 PARAMETER Experiment Name: Zm_0.001percent_MeJA_P Parameter: Timepoint (hr) Value: 72
  misc_feature: MA Experiment 20000533 PARAMETER Experiment Name: Zm_0.001percent_MeJA_P Parameter: Tissue Value: Aerial
  misc_feature: MA Experiment 20000533 PARAMETER Experiment Name: Zm_0.001percent_MeJA_P Parameter: Treatment Value: 0.001percent MeJA vs. No Treatment
  misc_feature: MA Experiment ID: 20000626 Result: Down-regulated in Transcription
  misc_feature: MA Experiment 20000626 PARAMETER Experiment Name: Zm_Herbicide-Treatments_P Parameter: Timepoint (hr) Value: 12
  misc_feature: MA Experiment 20000626 PARAMETER Experiment Name: Zm_Herbicide-Treatments_P Parameter: Tissue Value: Aerial
  misc_feature: MA Experiment 20000626 PARAMETER Experiment Name: Zm_Herbicide-Treatments_P Parameter: Treatment Value: Roundup vs. No Treatment
  misc_feature: MA Experiment ID: 20001608 Result: Up-regulated in Transcription
  misc_feature: MA Experiment 20001608 PARAMETER Experiment Name: Zm_50ppm_KNO3_L-to-H_P Parameter: Age (day) Value: 21
  misc_feature: MA Experiment 20001608 PARAMETER Experiment Name: Zm_50ppm_KNO3_L-to-H_P Parameter: Organism Value: Zea mays
  misc_feature: MA Experiment 20001608 PARAMETER Experiment Name: Zm_50ppm_KNO3_L-to-H_P Parameter: Plant Line Value: 35A19
  misc_feature: MA Experiment 20001608 PARAMETER Experiment Name: Zm_50ppm_KNO3_L-to-H_P Parameter: Timepoint (hr) Value: 48
  misc_feature: MA Experiment 20001608 PARAMETER Experiment Name: Zm_50ppm_KNO3_L-to-H_P Parameter: Tissue Value: Shoots
  misc_feature: MA Experiment 20001608 PARAMETER Experiment Name: Zm_50ppm_KNO3_L-to-H_P Parameter: Treatment Value: 50ppm KNO3 vs. 50ppm KCl
acgtctcattcaagcgctctgccggccagcctagtgctctcggctttctttcatctccctccttttgccacttgctgtagctttaatttgcctggcactttgcacgttgtggccggccggggcctgtgcttccattggtcggcagcaagcaagcaaggctagctagcgtccgtggatcagtcatgggcagccagaggcagaggcaccgagcggtcactggcctcccggcggcgggcgcgcggatgctggccctgctgtgcgcgtcgtcgtgggtgctggtgctcacgacggcgcagaactacagcgccatcttcaacttcggcgactcgatcaccgacaccggcaacctgtgcaccagcggcaggccgtcgcagatcaccttcacgcagcccccctacggcgagacctacttcggcacgccgacgtgccgctgctccgacggccgcgtcgtcgtcgacttcctgagcacccagttcgggctgccgttcctgccgccgtccaagtcgagcagcgcggacttcagtcagggcgccaacatggcgatcacgggcgccactgccatggacgcccccttcttccgctcgctcgggctctccgacaagatctggaacaacgggcccatcagctttcagctgcagtggttccagcagatcgccacctccgtctgcggacagagctgcaagagctacctgggcaactccctgttcgtgttcggcgagttcggcggcaacgactacaacgccatgatcttcggcggctactccatcgagcaggccaggaaatacgtccccaagatcgtcaacaccatctcgaggggcatcgataaactgatcgccatgggcgcgaccgacatcgtcgtccccggggtgcttcccatcgggtgcttccccatctatctgaccatctaccagagctccaacggcagcgactacgacagtctcggctgcctcaacagcttcaacgacctgtccacgtaccacaactccctgctccagaagagggtggacatcatccagagccggcacaggaagacggcgcgcatcatgtacgccgacttctactccgccgtctacgacatggtccgcaacccacagagctacgggttcagctcggtgttcgagacgtgctgcggatcaggcggcggcaagtacaactaccagaacagcgcgcggtgcggcatggcgggcgccgccgcgtgctctagcccggcgtcgcacctcagctgggacggcatccacctcacggaggccgcgtacaagcacatcaccgacgcctggctcaaggggccgtactgccgcccgcccatcctgcacaactaatcctcagtgcatatggacacgctggaccggaggccggcagcgcgttgtcttttttataaataatttatttattattcgtacaagctttggttggatccatcgcggcgggggttattaattatagcattggttggtcctttcgttatatttgaccatatttttttttgtgttcggggtaaggtgtttattatattttgcgttgctcaagaaaaagagctgacgatggc

SEQ ID NO: 6361 - protein, 378 aa, Zea mays subsp. mays
  peptide (1)..(378): Ceres Seq. ID no. 12409097
  misc_feature (43)..(365): Pfam Name: GDSL-like Lipase/Acylhydrolase Pfam Description: GDSL-like Lipase/Acylhydrolase
  misc_feature (14)..(376): Homolog of NCBI NO: 34903958 NR Description: OSJNBa0038J17.24 [Oryza sativa (japonica >gi|7523510|dbj|BAA94238.1| unnamed protein product [Oryza sativa
  misc_feature (37)..(376): Homolog of NCBI NO: 34903978 NR Description: unnamed protein product [Oryza sativa (japonica group)] >gi|7523500|dbj|BAA94228.1| unnamed protein product
  misc_feature (10)..(374): Homolog of NCBI NO: 15218725 NR Description: lipase, putative; protein id: At1g28580.1, by cDNA: gi_13605564, supported by cDNA: gi_15027914, supported cDNA: gi_18491140, supported by cDNA: gi_19310790 [Arabidopsis
  misc_feature (118)..(362): Homolog of NCBI NO: 15237586 NR Description: lipase -like protein; protein id: At5g03980.1
  misc_feature (42)..(365): Homolog of NCBI NO: 18413404 NR Description: putative protein; protein id: At4g10950.1
  misc_feature (23)..(377): Homolog of NCBI NO: 34903956 NR Description: OSJNBa0038J17.23 [Oryza sativa (japonica >gi|7523511|dbj|BAA94239.1| unnamed protein product [Oryza sativa
  misc_feature (42)..(365): Homolog of NCBI NO: 7486718 NR Description: hypothetical protein F8M12.9 - Arabidopsis >gi|3513738|gb|AAC33954.1| similar to the GDSL family of
  misc_feature (42)..(365): Homolog of NCBI NO: 7486138 NR Description: hypothetical protein F25I24.160 - Arabidopsis >gi|4539369|emb|CAB40063.1| putative protein [Arabidopsis >gi|7267793|emb|CAB81196.1| putative protein [Arabidopsis
  misc_feature (39)..(369): Homolog of NCBI NO: 15220995 NR Description: lipase, putative; protein id: At1g53940.1
  misc_feature (40)..(370): Homolog of NCBI NO: 18394825 NR Description: anter-specific proline-rich protein APG putative; protein id: At1g20120.1, supported by cDNA: 22980.
MGSQRQRHRAVTGLPAAGARMLALLCASSWVLVLTTAQNYSAIFNFGDSITDTGNLCTSGRPSQITFTQPPYGETYFGTPTCRCSDGRVVVDFLSTQFGLPFLPPSKSSSADFSQGANMAITGATAMDAPFFRSLGLSDKIWNNGPISFQLQWFQQIATSVCGQSCKSYLGNSLFVFGEFGGNDYNAMIFGGYSIEQARKYVPKIVNTISRGIDKLIAMGATDIVVPGVLPIGCFPIYLTIYQSSNGSDYDSLGCLNSFNDLSTYHNSLLQKRVDIIQSRHRKTARIMYADFYSAVYDMVRNPQSYGFSSVFETCCGSGGGKYNYQNSARCGMAGAAACSSPASHLSWDGIHLTEAAYKHITDAWLKGPYCRPPILHN

SEQ ID NO: 6362 - protein, 358 aa, Zea mays subsp. mays
  peptide (1)..(358): Ceres Seq. ID no. 12409098
  misc_feature (23)..(345): Pfam Name: GDSL-like Lipase/Acylhydrolase Pfam Description: GDSL-like Lipase/Acylhydrolase
  misc_feature (3)..(357): Homolog of NCBI NO: 34903956 NR Description: OSJNBa0038J17.23 [Oryza sativa (japonica >gi|7523511|dbj|BAA94239.1| unnamed protein product [Oryza sativa
  misc_feature (1)..(356): Homolog of NCBI NO: 34903958 NR Description: OSJNBa0038J17.24 [Oryza sativa (japonica >gi|7523510|dbj|BAA94238.1| unnamed protein product [Oryza sativa
  misc_feature (17)..(356): Homolog of NCBI NO: 34903978 NR Description: unnamed protein product [Oryza sativa (japonica group)] >gi|7523500|dbj|BAA94228.1| unnamed protein product
  misc_feature (1)..(354): Homolog of NCBI NO: 15218725 NR Description: lipase, putative; protein id: At1g28580.1, by cDNA: gi_13605564, supported by cDNA: gi_15027914, supported cDNA: gi_18491140, supported by cDNA: gi_19310790 [Arabidopsis
  misc_feature (98)..(342): Homolog of NCBI NO: 15237586 NR Description: lipase -like protein; protein id: At5g03980.1
  misc_feature (22)..(345): Homolog of NCBI NO: 18413404 NR Description: putative protein; protein id: At4g10950.1
  misc_feature (22)..(345): Homolog of NCBI NO: 7486718 NR Description: hypothetical protein F8M12.9 - Arabidopsis >gi|3513738|gb|AAC33954.1| similar to the GDSL family of
  misc_feature (22)..(345): Homolog of NCBI NO: 7486138 NR Description: hypothetical protein F25I24.160 - Arabidopsis >gi|4539369|emb|CAB40063.1| putative protein [Arabidopsis >gi|7267793|emb|CAB81196.1| putative protein [Arabidopsis
  misc_feature (19)..(349): Homolog of NCBI NO: 15220995 NR Description: lipase, putative; protein id: At1g53940.1
  misc_feature (20)..(350): Homolog of NCBI NO: 18394825 NR Description: anter-specific proline-rich protein APG putative; protein id: At1g20120.1, supported by cDNA: 22980.
MLALLCASSWVLVLTTAQNYSAIFNFGDSITDTGNLCTSGRPSQITFTQPPYGETYFGTPTCRCSDGRVVVDFLSTQFGLPFLPPSKSSSADFSQGANMAITGATAMDAPFFRSLGLSDKIWNNGPISFQLQWFQQIATSVCGQSCKSYLGNSLFVFGEFGGNDYNAMIFGGYSIEQARKYVPKIVNTISRGIDKLIAMGATDIVVPGVLPIGCFPIYLTIYQSSNGSDYDSLGCLNSFNDLSTYHNSLLQKRVDIIQSRHRKTARIMYADFYSAVYDMVRNPQSYGFSSVFETCCGSGGGKYNYQNSARCGMAGAAACSSPASHLSWDGIHLTEAAYKHITDAWLKGPYCRPPILHN

SEQ ID NO: 6363 - protein, 260 aa, Zea mays subsp. mays
  peptide (1)..(260): Ceres Seq. ID no. 12409099
  misc_feature (1)..(247): Pfam Name: GDSL-like Lipase/Acylhydrolase Pfam Description: GDSL-like Lipase/Acylhydrolase
  misc_feature (1)..(259): Homolog of NCBI NO: 34903956 NR Description: OSJNBa0038J17.23 [Oryza sativa (japonica >gi|7523511|dbj|BAA94239.1| unnamed protein product [Oryza sativa
  misc_feature (1)..(258): Homolog of NCBI NO: 34903958 NR Description: OSJNBa0038J17.24 [Oryza sativa (japonica >gi|7523510|dbj|BAA94238.1| unnamed protein product [Oryza sativa
  misc_feature (1)..(258): Homolog of NCBI NO: 34903978 NR Description: unnamed protein product [Oryza sativa (japonica group)] >gi|7523500|dbj|BAA94228.1| unnamed protein product
  misc_feature (1)..(256): Homolog of NCBI NO: 15218725 NR Description: lipase, putative; protein id: At1g28580.1, by cDNA: gi_13605564, supported by cDNA: gi_15027914, supported cDNA: gi_18491140, supported by cDNA: gi_19310790 [Arabidopsis
  misc_feature (1)..(244): Homolog of NCBI NO: 15237586 NR Description: lipase -like protein; protein id: At5g03980.1
  misc_feature (1)..(247): Homolog of NCBI NO: 18413404 NR Description: putative protein; protein id: At4g10950.1
  misc_feature (1)..(247): Homolog of NCBI NO: 7486718 NR Description: hypothetical protein F8M12.9 - Arabidopsis >gi|3513738|gb|AAC33954.1| similar to the GDSL family of
  misc_feature (1)..(247): Homolog of NCBI NO: 7486138 NR Description: hypothetical protein F25I24.160 - Arabidopsis >gi|4539369|emb|CAB40063.1| putative protein [Arabidopsis >gi|7267793|emb|CAB81196.1| putative protein [Arabidopsis
  misc_feature (1)..(251): Homolog of NCBI NO: 15220995 NR Description: lipase, putative; protein id: At1g53940.1
  misc_feature (1)..(252): Homolog of NCBI NO: 18394825 NR Description: anter-specific proline-rich protein APG putative; protein id: At1g20120.1, supported by cDNA: 22980.
MAITGATAMDAPFFRSLGLSDKIWNNGPISFQLQWFQQIATSVCGQSCKSYLGNSLFVFGEFGGNDYNAMIFGGYSIEQARKYVPKIVNTISRGIDKLIAMGATDIVVPGVLPIGCFPIYLTIYQSSNGSDYDSLGCLNSFNDLSTYHNSLLQKRVDIIQSRHRKTARIMYADFYSAVYDMVRNPQSYGFSSVFETCCGSGGGKYNYQNSARCGMAGAAACSSPASHLSWDGIHLTEAAYKHITDAWLKGPYCRPPILHN

SEQ ID NO: 6364 - DNA, 1237 bp, Zea mays subsp. mays; identical to SEQ ID NO: 5628
  misc_feature (1)..(1237): Ceres Seq. ID no. 12356266
  misc_feature: MA Experiment ID: 108527 Result: Down-regulated in Transcription
  misc_feature: MA Experiment 108527 PARAMETER Experiment Name: Zm_5mM_NO_P Parameter: Age (day) Value: 8
  misc_feature: MA Experiment 108527 PARAMETER Experiment Name: Zm_5mM_NO_P Parameter: Organism Value: Zea mays
  misc_feature: MA Experiment 108527 PARAMETER Experiment Name: Zm_5mM_NO_P Parameter: Plant Line Value: 35A19
  misc_feature: MA Experiment 108527 PARAMETER Experiment Name: Zm_5mM_NO_P Parameter: Timepoint (hr) Value: 6
  misc_feature: MA Experiment 108527 PARAMETER Experiment Name: Zm_5mM_NO_P Parameter: Tissue Value: Aerial
  misc_feature: MA Experiment 108527 PARAMETER Experiment Name: Zm_5mM_NO_P Parameter: Treatment Value: 5mM NO vs. No Treatment
  misc_feature: MA Experiment ID: 108530 Result: Up-regulated in Transcription
  misc_feature: MA Experiment 108530 PARAMETER Experiment Name: Zm_Imbibed_Seeds_P Parameter: Age (day) Value: 6 vs. 2
  misc_feature: MA Experiment 108530 PARAMETER Experiment Name: Zm_Imbibed_Seeds_P Parameter: Organism Value: Zea mays
  misc_feature: MA Experiment 108530 PARAMETER Experiment Name: Zm_Imbibed_Seeds_P Parameter: Plant Line Value: 35A19
  misc_feature: MA Experiment 108530 PARAMETER Experiment Name: Zm_Imbibed_Seeds_P Parameter: Tissue Value: Aerial vs. Embryo
  misc_feature: MA Experiment ID: 108689 Result: Down-regulated in Transcription
  misc_feature: MA Experiment 108689 PARAMETER Experiment Name: Zm_Drought_Roots_P Parameter: Age (day) Value: 9
  misc_feature: MA Experiment 108689 PARAMETER Experiment Name: Zm_Drought_Roots_P Parameter: Organism Value: Zea mays
  misc_feature: MA Experiment 108689 PARAMETER Experiment Name: Zm_Drought_Roots_P Parameter: Plant Line Value: 35A19
  misc_feature: MA Experiment 108689 PARAMETER Experiment Name: Zm_Drought_Roots_P Parameter: Timepoint (hr) Value: 24
  misc_feature: MA Experiment 108689 PARAMETER Experiment Name: Zm_Drought_Roots_P Parameter: Tissue Value: Roots
  misc_feature: MA Experiment 108689 PARAMETER Experiment Name: Zm_Drought_Roots_P Parameter: Treatment Value: Drought vs. No Drought
  misc_feature: MA Experiment ID: 20000478 Result: Down-regulated in Transcription
  misc_feature: MA Experiment 20000478 PARAMETER Experiment Name: Zm_5mM_SA_P Parameter: Age (day) Value: 11
  misc_feature: MA Experiment 20000478 PARAMETER Experiment Name: Zm_5mM_SA_P Parameter: Organism Value: Zea mays
  misc_feature: MA Experiment 20000478 PARAMETER Experiment Name: Zm_5mM_SA_P Parameter: Plant Line Value: 35A19
  misc_feature: MA Experiment 20000478 PARAMETER Experiment Name: Zm_5mM_SA_P Parameter: Timepoint (hr) Value: 72
  misc_feature: MA Experiment 20000478 PARAMETER Experiment Name: Zm_5mM_SA_P Parameter: Tissue Value: Aerial
  misc_feature: MA Experiment 20000478 PARAMETER Experiment Name: Zm_5mM_SA_P Parameter: Treatment Value: 5mM SA vs. No Treatment
  misc_feature: MA Experiment ID: 20000480 Result: Down-regulated in Transcription
  misc_feature: MA Experiment 20000480 PARAMETER Experiment Name: Zm_Drought_P Parameter: Age (day) Value: 11
  misc_feature: MA Experiment 20000480 PARAMETER Experiment Name: Zm_Drought_P Parameter: Organism Value: Zea mays
  misc_feature: MA Experiment 20000480 PARAMETER Experiment Name: Zm_Drought_P Parameter: Plant Line Value: 35A19
  misc_feature: MA Experiment 20000480 PARAMETER Experiment Name: Zm_Drought_P Parameter: Timepoint (hr) Value: 72
  misc_feature: MA Experiment 20000480 PARAMETER Experiment Name: Zm_Drought_P Parameter: Tissue Value: Aerial
  misc_feature: MA Experiment 20000480 PARAMETER Experiment Name: Zm_Drought_P Parameter: Treatment Value: Drought vs. No Drought
  misc_feature: MA Experiment ID: 20000487 Result: Down-regulated in Transcription
  misc_feature: MA Experiment 20000487 PARAMETER Experiment Name: Zm_50mM_NH4NO3_L_to_H_P Parameter: Organism Value: Zea mays
  misc_feature: MA Experiment 20000487 PARAMETER Experiment Name: Zm_50mM_NH4NO3_L_to_H_P Parameter: Timepoint (hr) Value: 4
  misc_feature: MA Experiment 20000487 PARAMETER Experiment Name: Zm_50mM_NH4NO3_L_to_H_P Parameter: Tissue Value: Leaves
  misc_feature: MA Experiment 20000487 PARAMETER Experiment Name: Zm_50mM_NH4NO3_L_to_H_P Parameter: Treatment Value: 50mM NH4NO3 vs. 100mM Mannitol
  misc_feature: MA Experiment ID: 20000492 Result: Up-regulated in Transcription
  misc_feature: MA Experiment 20000492 PARAMETER Experiment Name: Zm_Hybrid_Seed_Dev_P Parameter: DAP Value: 12
  misc_feature: MA Experiment 20000492 PARAMETER Experiment Name: Zm_Hybrid_Seed_Dev_P Parameter: Organism Value: Zea mays
  misc_feature: MA Experiment 20000492 PARAMETER Experiment Name: Zm_Hybrid_Seed_Dev_P Parameter: Plant Line Value: 35A19
  misc_feature: MA Experiment 20000492 PARAMETER Experiment Name: Zm_Hybrid_Seed_Dev_P Parameter: Tissue Value: Fert Kernel vs. Unfert Floret

SEQ ID NO: 6365 - protein, 374 aa, Zea mays subsp. mays; identical to SEQ ID NO: 5629
  peptide (1)..(374): Ceres Seq. ID no. 12356267
  misc_feature (101)..(368): Homolog of NCBI NO: 15228845 NR Description: putative protein; protein id: At3g62730.1, by cDNA: gi_15294283, supported by cDNA: gi_20147274 [Arabidopsis
  misc_feature (105)..(368): Homolog of NCBI NO: 18401988 NR Description: dessication-related protein, putative; protein
  misc_feature (105)..(368): Homolog of NCBI NO: 25357137 NR Description: hypothetical protein T2J15.11 [imported] -
  misc_feature (105)..(368): Homolog of NCBI NO: 21593191 NR Description: dessication-related protein, putative
  misc_feature (85)..(226): Homolog of NCBI NO: 12083528 NR Description: similar to Arabidopsis thaliana hypothetical
  misc_feature (228)..(367): Homolog of NCBI NO: 12083528 NR Description: similar to Arabidopsis thaliana hypothetical
  misc_feature (101)..(368): Homolog of NCBI NO: 38346151 NR Description: OSJNBb0118P14.11 [Oryza sativa (japonica
  misc_feature (64)..(362): Homolog of NCBI NO: 118926 NR Description: Desiccation-related protein PCC13-62 precursor
  misc_feature (99)..(366): Homolog of NCBI NO: 22984403 NR Description: hypothetical protein [Burkholderia fungorum]
  misc_feature (115)..(363): Homolog of NCBI NO: 16263242 NR Description: Conserved hypothetical protein [Sinorhizobium
  misc_feature (101)..(368): Homolog of NCBI NO: 15228845 NR Description: putative protein; protein id: At3g62730.1, by cDNA: gi_15294283, supported by cDNA: gi_20147274 [Arabidopsis
  misc_feature (105)..(368): Homolog of NCBI NO: 18401988 NR Description: dessication-related protein, putative; protein
  misc_feature (105)..(368): Homolog of NCBI NO: 25357137 NR Description: hypothetical protein T2J15.11 [imported] -
  misc_feature (105)..(368): Homolog of NCBI NO: 21593191 NR Description: dessication-related protein, putative
  misc_feature (85)..(226): Homolog of NCBI NO: 12083528 NR Description: similar to Arabidopsis thaliana hypothetical
  misc_feature (228)..(367): Homolog of NCBI NO: 12083528 NR Description: similar to Arabidopsis thaliana hypothetical
  misc_feature (101)..(368): Homolog of NCBI NO: 38346151 NR Description: OSJNBb0118P14.11 [Oryza sativa (japonica
  misc_feature (64)..(362): Homolog of NCBI NO: 118926 NR Description: Desiccation-related protein PCC13-62 precursor
  misc_feature (99)..(366): Homolog of NCBI NO: 22984403 NR Description: hypothetical protein [Burkholderia fungorum]
  misc_feature (115)..(363): Homolog of NCBI NO: 16263242 NR Description: Conserved hypothetical protein [Sinorhizobium

SEQ ID NO: 6366 - protein, 354 aa, Zea mays subsp. mays; identical to SEQ ID NO: 5630
  peptide (1)..(354): Ceres Seq. ID no. 12356268
  misc_feature (81)..(348): Homolog of NCBI NO: 15228845 NR Description: putative protein; protein id: At3g62730.1, by cDNA: gi_15294283, supported by cDNA: gi_20147274 [Arabidopsis
  misc_feature (85)..(348): Homolog of NCBI NO: 18401988 NR Description: dessication-related protein, putative; protein
  misc_feature (85)..(348): Homolog of NCBI NO: 25357137 NR Description: hypothetical protein T2J15.11 [imported] -
  misc_feature (85)..(348): Homolog of NCBI NO: 21593191 NR Description: dessication-related protein, putative
  misc_feature (65)..(206): Homolog of NCBI NO: 12083528 NR Description: similar to Arabidopsis thaliana hypothetical
  misc_feature (208)..(347): Homolog of NCBI NO: 12083528 NR Description: similar to Arabidopsis thaliana hypothetical
  misc_feature (81)..(348): Homolog of NCBI NO: 38346151 NR Description: OSJNBb0118P14.11 [Oryza sativa (japonica
  misc_feature (44)..(342): Homolog of NCBI NO: 118926 NR Description: Desiccation-related protein PCC13-62 precursor
  misc_feature (79)..(346): Homolog of NCBI NO: 22984403 NR Description: hypothetical protein [Burkholderia fungorum]
  misc_feature (95)..(343): Homolog of NCBI NO: 16263242 NR Description: Conserved hypothetical protein [Sinorhizobium
  misc_feature (81)..(348): Homolog of NCBI NO: 15228845 NR Description: putative protein; protein id: At3g62730.1, by cDNA: gi_15294283, supported by cDNA: gi_20147274 [Arabidopsis
  misc_feature (85)..(348): Homolog of NCBI NO: 18401988 NR Description: dessication-related protein, putative; protein
  misc_feature (85)..(348): Homolog of NCBI NO: 25357137 NR Description: hypothetical protein T2J15.11 [imported] -
  misc_feature (85)..(348): Homolog of NCBI NO: 21593191 NR Description: dessication-related protein, putative
  misc_feature (65)..(206): Homolog of NCBI NO: 12083528 NR Description: similar to Arabidopsis thaliana hypothetical
  misc_feature (208)..(347): Homolog of NCBI NO: 12083528 NR Description: similar to Arabidopsis thaliana hypothetical
  misc_feature (81)..(348): Homolog of NCBI NO: 38346151 NR Description: OSJNBb0118P14.11 [Oryza sativa (japonica
  misc_feature (44)..(342): Homolog of NCBI NO: 118926 NR Description: Desiccation-related protein PCC13-62 precursor
  misc_feature (79)..(346): Homolog of NCBI NO: 22984403 NR Description: hypothetical protein [Burkholderia fungorum]
  misc_feature (95)..(343): Homolog of NCBI NO: 16263242 NR Description: Conserved hypothetical protein [Sinorhizobium

SEQ ID NO: 6367 - protein, 270 aa, Zea mays subsp. mays; identical to SEQ ID NO: 5631
  peptide (1)..(270): Ceres Seq. ID no. 12356269
  misc_feature (1)..(264): Homolog of NCBI NO: 15228845 NR Description: putative protein; protein id: At3g62730.1, by cDNA: gi_15294283, supported by cDNA: gi_20147274 [Arabidopsis
  misc_feature (1)..(264): Homolog of NCBI NO: 18401988 NR Description: dessication-related protein, putative; protein
  misc_feature (1)..(264): Homolog of NCBI NO: 25357137 NR Description: hypothetical protein T2J15.11 [imported] -
  misc_feature (1)..(264): Homolog of NCBI NO: 21593191 NR Description: dessication-related protein, putative
  misc_feature (1)..(122): Homolog of NCBI NO: 12083528 NR Description: similar to Arabidopsis thaliana hypothetical
  misc_feature (124)..(263): Homolog of NCBI NO: 12083528 NR Description: similar to Arabidopsis thaliana hypothetical
  misc_feature (1)..(264): Homolog of NCBI NO: 38346151 NR Description: OSJNBb0118P14.11 [Oryza sativa (japonica
  misc_feature (1)..(258): Homolog of NCBI NO: 118926 NR Description: Desiccation-related protein PCC13-62 precursor
  misc_feature (1)..(262): Homolog of NCBI NO: 22984403 NR Description: hypothetical protein [Burkholderia fungorum]
  misc_feature (11)..(259): Homolog of NCBI NO: 16263242 NR Description: Conserved hypothetical protein [Sinorhizobium
  misc_feature (1)..(264): Homolog of NCBI NO: 15228845 NR Description: putative protein; protein id: At3g62730.1, by cDNA: gi_15294283, supported by cDNA: gi_20147274 [Arabidopsis
  misc_feature (1)..(264): Homolog of NCBI NO: 18401988 NR Description: dessication-related protein, putative; protein
  misc_feature (1)..(264): Homolog of NCBI NO: 25357137 NR Description: hypothetical protein T2J15.11 [imported] -
  misc_feature (1)..(264): Homolog of NCBI NO: 21593191 NR Description: dessication-related protein, putative
  misc_feature (1)..(122): Homolog of NCBI NO: 12083528 NR Description: similar to Arabidopsis thaliana hypothetical
  misc_feature (124)..(263): Homolog of NCBI NO: 12083528 NR Description: similar to Arabidopsis thaliana hypothetical
  misc_feature (1)..(264): Homolog of NCBI NO: 38346151 NR Description: OSJNBb0118P14.11 [Oryza sativa (japonica
  misc_feature (1)..(258): Homolog of NCBI NO: 118926 NR Description: Desiccation-related protein PCC13-62 precursor
  misc_feature (1)..(262): Homolog of NCBI NO: 22984403 NR Description: hypothetical protein [Burkholderia fungorum]
  misc_feature (11)..(259): Homolog of NCBI NO: 16263242 NR Description: Conserved hypothetical protein [Sinorhizobium

SEQ ID NO: 6368 - DNA, 854 bp, Zea mays subsp. mays
  misc_feature (1)..(854): Ceres Seq. ID no. 12409092
  misc_feature: MA Experiment ID: 108534 Result: Down-regulated in Transcription
  misc_feature: MA Experiment 108534 PARAMETER Experiment Name: Zm_4deg_Cold_P Parameter: Age (hr) Value: 8
  misc_feature: MA Experiment 108534 PARAMETER Experiment Name: Zm_4deg_Cold_P Parameter: Organism Value: Zea mays
  misc_feature: MA Experiment 108534 PARAMETER Experiment Name: Zm_4deg_Cold_P Parameter: Plant Line Value: 35A19
  misc_feature: MA Experiment 108534 PARAMETER Experiment Name: Zm_4deg_Cold_P Parameter: Temperature (deg C) Value: 4 vs. 22
  misc_feature: MA Experiment 108534 PARAMETER Experiment Name: Zm_4deg_Cold_P Parameter: Timepoint (hr) Value: 6
  misc_feature: MA Experiment 108534 PARAMETER Experiment Name: Zm_4deg_Cold_P Parameter: Tissue Value: Aerial
  misc_feature: MA Experiment ID: 108535 Result: Up-regulated in Transcription
  misc_feature: MA Experiment 108535 PARAMETER Experiment Name: Zm_Meristem_P Parameter: Age (day) Value: 8
  misc_feature: MA Experiment 108535 PARAMETER Experiment Name: Zm_Meristem_P Parameter: Organism Value: Zea mays
  misc_feature: MA Experiment 108535 PARAMETER Experiment Name: Zm_Meristem_P Parameter: Plant Line Value: 35A19
  misc_feature: MA Experiment 108535 PARAMETER Experiment Name: Zm_Meristem_P Parameter: Tissue Value: Root Meristem vs. Above Root Meristem
  misc_feature: MA Experiment ID: 108544 Result: Down-regulated in Transcription
  misc_feature: MA Experiment ID: 108556 Result: Down-regulated in Transcription
  misc_feature: MA Experiment 108556 PARAMETER Experiment Name: Zm_Drought_P Parameter: Age (day) Value: 9
  misc_feature: MA Experiment 108556 PARAMETER Experiment Name: Zm_Drought_P Parameter: Organism Value: Zea mays
  misc_feature: MA Experiment 108556 PARAMETER Experiment Name: Zm_Drought_P Parameter: Plant Line Value: 35A19
  misc_feature: MA Experiment 108556 PARAMETER Experiment Name: Zm_Drought_P Parameter: Timepoint (hr) Value: 24
  misc_feature: MA Experiment 108556 PARAMETER Experiment Name: Zm_Drought_P Parameter: Tissue Value: Aerial
  misc_feature: MA Experiment 108556 PARAMETER Experiment Name: Zm_Drought_P Parameter: Treatment Value: Drought vs. No Drought
  misc_feature: MA Experiment ID: 20000488 Result: Up-regulated in Transcription
  misc_feature: MA Experiment 20000488 PARAMETER Experiment Name: Zm_50mM_NH4NO3_L_to_H_P Parameter: Organism Value: Zea mays
  misc_feature: MA Experiment 20000488 PARAMETER Experiment Name: Zm_50mM_NH4NO3_L_to_H_P Parameter: Timepoint (hr) Value: 8
  misc_feature: MA Experiment 20000488 PARAMETER Experiment Name: Zm_50mM_NH4NO3_L_to_H_P Parameter: Tissue Value: Leaves
  misc_feature: MA Experiment 20000488 PARAMETER Experiment Name: Zm_50mM_NH4NO3_L_to_H_P Parameter: Treatment Value: 50mM NH4NO3 vs. 100mM Mannitol
  misc_feature: MA Experiment ID: 20000626 Result: Up-regulated in Transcription
  misc_feature: MA Experiment 20000626 PARAMETER Experiment Name: Zm_Herbicide-Treatments_P Parameter: Timepoint (hr) Value: 12
  misc_feature: MA Experiment 20000626 PARAMETER Experiment Name: Zm_Herbicide-Treatments_P Parameter: Tissue Value: Aerial
  misc_feature: MA Experiment 20000626 PARAMETER Experiment Name: Zm_Herbicide-Treatments_P Parameter: Treatment Value: Roundup vs. No Treatment
  misc_feature: MA Experiment ID: 20000632 Result: Down-regulated in Transcription
  misc_feature: MA Experiment 20000632 PARAMETER Experiment Name: Zm_Herbicide-Treatments_P Parameter: Timepoint (hr) Value: 4
  misc_feature: MA Experiment 20000632 PARAMETER Experiment Name: Zm_Herbicide-Treatments_P Parameter: Tissue Value: Aerial
  misc_feature: MA Experiment 20000632 PARAMETER Experiment Name: Zm_Herbicide-Treatments_P Parameter: Treatment Value: Glean vs. No Treatment
acatcgccccagccccaagtccaaagccgcgagaggcaagggcgcagcaaaaccctagccgccttcccgtccttttcctttcataaaccccaagccgcgccgcaatagctcgccccctcgttcgccgcctctcctgctcctaccgcagctctccctcaggtttagtgttcgcaatggcggccttcaacaagcttggtggccttctaaggcacagtgctctggtgagcggtatcactggtggctcttctcctgcagtgttcaatgctgcacggctcatgtctaccaagctatttattggtggtcttgactggggtgttgatgacgtgaaactaagagaagcatttagcagctttggagaggttactgaagcgagggtgatcacagacagggagactgggaggtcaagaggctttggctttgtgaactactccgacagtgatgctgccaaggaagctatttctgcaatggatggcaaggaaattgatgggcggcaggtacgtgtcaacatggctaatgagagacctgctgggaaccgtggtggtggtggctatggcggcggcggctatggaggtggtggctacggaggtggcggcggctacggaggtggtggctatggtggtggcagccaaagctatgatgcttgaggggggcaggatcctattaggtgcattatcaaccaagatatttgaaataatgaactttaggacttggtatgacgttttatgttaagcgttgtcaggttttgctattcgtgttatgctgaattgttggaactcctagatgcagaatcttacgtattggttttggttccttcgagaagtgcaaatgcaagacgcatctattcccattgagtg

SEQ ID NO: 6369 - protein, 156 aa, Zea mays subsp. mays
  peptide (1)..(156): Ceres Seq. ID no. 12409093
  misc_feature (39)..(110): Pfam Name: RNA recognition motif. (a.k.a. RRM, RBD, or RNP domain) Pfam Description: RNA recognition motif. (a.k.a. RRM, RBD, or RNP
  misc_feature (1)..(149): Homolog of NCBI NO: 34906972 NR Description: putative glycine-rich RNA-binding protein 2
  misc_feature (1)..(150): Homolog of NCBI NO: 15236359 NR Description: glycine-rich RNA-binding protein AtGRP2; protein At4g13850.1, supported by cDNA: 16314., supported by cDNA:
  misc_feature (1)..(150): Homolog of NCBI NO: 30682622 NR Description: glycine-rich RNA-binding protein (AtGRP2)
  misc_feature (1)..(150): Homolog of NCBI NO: 2826811 NR Description: AtGRP2 [Arabidopsis thaliana]
  misc_feature (27)..(150): Homolog of NCBI NO: 322514 NR Description: glycine-rich RNA-binding protein (clone A81) -
  misc_feature (1)..(156): Homolog of NCBI NO: 15239505 NR Description: glycine-rich RNA-binding protein; protein id: supported by cDNA: gi_16974555 [Arabidopsis thaliana] contains similarity to RNA binding protein~gene_id:MAF19.4
  misc_feature (1)..(147): Homolog of NCBI NO: 7439994 NR Description: glycine-rich RNA-binding protein - garden pea
  misc_feature (1)..(137): Homolog of NCBI NO: 7439995 NR Description: RNA binding protein 3 - wood tobacco
  misc_feature (1)..(142): Homolog of NCBI NO: 15229525 NR Description: glycine-rich RNA-binding protein; protein id: supported by cDNA: 18903., supported by cDNA: gi_17979515,
  misc_feature (1)..(142): Homolog of NCBI NO: 21553972 NR Description: glycine-rich RNA binding protein, putative
MAAFNKLGGLLRHSALVSGITGGSSPAVFNAARLMSTKLFIGGLDWGVDDVKLREAFSSFGEVTEARVITDRETGRSRGFGFVNYSDSDAAKEAISAMDGKEIDGRQVRVNMANERPAGNRGGGGYGGGGYGGGGYGGGGGYGGGGYGGGSQSYDA

SEQ ID NO: 6370 - protein, 122 aa, Zea mays subsp. mays
  peptide (1)..(122): Ceres Seq. ID no. 12409094
  misc_feature (5)..(76): Pfam Name: RNA recognition motif. (a.k.a. RRM, RBD, or RNP domain) Pfam Description: RNA recognition motif. (a.k.a. RRM, RBD, or RNP
  misc_feature (1)..(115): Homolog of NCBI NO: 34906972 NR Description: putative glycine-rich RNA-binding protein 2
  misc_feature (1)..(116): Homolog of NCBI NO: 15236359 NR Description: glycine-rich RNA-binding protein AtGRP2; protein At4g13850.1, supported by cDNA: 16314., supported by cDNA:
  misc_feature (1)..(116): Homolog of NCBI NO: 30682622 NR Description: glycine-rich RNA-binding protein (AtGRP2)
  misc_feature (1)..(116): Homolog of NCBI NO: 2826811 NR Description: AtGRP2 [Arabidopsis thaliana]
  misc_feature (1)..(116): Homolog of NCBI NO: 322514 NR Description: glycine-rich RNA-binding protein (clone A81) -
  misc_feature (1)..(122): Homolog of NCBI NO: 15239505 NR Description: glycine-rich RNA-binding protein; protein id: supported by cDNA: gi_16974555 [Arabidopsis thaliana] contains similarity to RNA binding protein~gene_id:MAF19.4
  misc_feature (1)..(113): Homolog of NCBI NO: 7439994 NR Description: glycine-rich RNA-binding protein - garden pea
  misc_feature (1)..(103): Homolog of NCBI NO: 7439995 NR Description: RNA binding protein 3 - wood tobacco
  misc_feature (1)..(108): Homolog of NCBI NO: 15229525 NR Description: glycine-rich RNA-binding protein; protein id: supported by cDNA: 18903., supported by cDNA: gi_17979515,
  misc_feature (1)..(108): Homolog of NCBI NO: 21553972 NR Description: glycine-rich RNA binding protein, putative
MSTKLFIGGLDWGVDDVKLREAFSSFGEVTEARVITDRETGRSRGFGFVNYSDSDAAKEAISAMDGKEIDGRQVRVNMANERPAGNRGGGGYGGGGYGGGGYGGGGGYGGGGYGGGSQSYDA

SEQ ID NO: 6371 - protein, 96 aa, Zea mays subsp. mays
  peptide (1)..(96): Ceres Seq. ID no. 12409095
MLPRKLFLQWMARKLMGGRYVSTWLMRDLLGTVVVVAMAAAAMEVVATEVAAATEVVAMVVAAKAMMLEGGRILLGALSTKIFEIMNFRTWYDVLC

SEQ ID NO: 6372 - DNA, 620 bp, Zea mays subsp. mays
  misc_feature (1)..(620): Ceres Seq. ID no. 12367118
  misc_feature: MA Experiment ID: 108556 Result: Up-regulated in Transcription
  misc_feature: MA Experiment 108556 PARAMETER Experiment Name: Zm_Drought_P Parameter: Age (day) Value: 9
  misc_feature: MA Experiment 108556 PARAMETER Experiment Name: Zm_Drought_P Parameter: Organism Value: Zea mays
  misc_feature: MA Experiment 108556 PARAMETER Experiment Name: Zm_Drought_P Parameter: Plant Line Value: 35A19
  misc_feature: MA Experiment 108556 PARAMETER Experiment Name: Zm_Drought_P Parameter: Timepoint (hr) Value: 24
  misc_feature: MA Experiment 108556 PARAMETER Experiment Name: Zm_Drought_P Parameter: Tissue Value: Aerial
  misc_feature: MA Experiment 108556 PARAMETER Experiment Name: Zm_Drought_P Parameter: Treatment Value: Drought vs. No Drought
  misc_feature: MA Experiment ID: 20000108 Result: Up-regulated in Transcription
  misc_feature: MA Experiment 20000108 PARAMETER Experiment Name: Zm_Root-Tips_P Parameter: Age (day) Value: 12
  misc_feature: MA Experiment 20000108 PARAMETER Experiment Name: Zm_Root-Tips_P Parameter: Organism Value: Zea mays
  misc_feature: MA Experiment 20000108 PARAMETER Experiment Name: Zm_Root-Tips_P Parameter: Tissue Value: Root tips vs. Root mid region    35
  misc_feature: MA Experiment 20000108 PARAMETER Experiment Name: Zm_Root-Tips_P Parameter: Tissue Value: Root tips vs. Root mid region   Sequence Listing-Misc Features (4)
  misc_feature: MA Experiment ID: 20000480 Result: Up-regulated in Transcription
  misc_feature: MA Experiment 20000480 PARAMETER Experiment Name: Zm_Drought_P Parameter: Age (day) Value: 11
  misc_feature: MA Experiment 20000480 PARAMETER Experiment Name: Zm_Drought_P Parameter: Organism Value: Zea mays
  misc_feature: MA Experiment 20000480 PARAMETER Experiment Name: Zm_Drought_P Parameter: Plant Line Value: 35A19
  misc_feature: MA Experiment 20000480 PARAMETER Experiment Name: Zm_Drought_P Parameter: Timepoint (hr) Value: 72
  misc_feature: MA Experiment 20000480 PARAMETER Experiment Name: Zm_Drought_P Parameter: Tissue Value: Aerial
  misc_feature: MA Experiment 20000480 PARAMETER Experiment Name: Zm_Drought_P Parameter: Treatment Value: Drought vs. No Drought
  misc_feature: MA Experiment ID: 20000535 Result: Up-regulated in Transcription
  misc_feature: MA Experiment 20000535 PARAMETER Experiment Name: Zm_Hybrid_Seed_Dev_P Parameter: DAP Value: 30 vs. 12
  misc_feature: MA Experiment 20000535 PARAMETER Experiment Name: Zm_Hybrid_Seed_Dev_P Parameter: Organism Value: Zea mays
  misc_feature: MA Experiment 20000535 PARAMETER Experiment Name: Zm_Hybrid_Seed_Dev_P Parameter: Plant Line Value: 35A19
  misc_feature: MA Experiment 20000535 PARAMETER Experiment Name: Zm_Hybrid_Seed_Dev_P Parameter: Tissue Value: Embryo vs. Unfert Floret
aaatcccccaaacatttcgtcgaatccgccgtgagatccgcccgactctcgctccgttccggcgctctcggtcgggcgaaggctccaccttcctccgacaagatggcggggaagggagccaaggccacggccgccaagtcggcggacaaggacaaggggaagaagaccggcggccccgtctcgcgctcctcccgcgccgcaccccaggagaagtcagctccgaagaaagatgtttatcaattgttcgctgagaaggtcagggataacaaacaactggaatcaagatgggcgatcatgcaagaaacccgcgtggagtatttccgtggaaaagatttcaataccttcgtcaaaaatcatccagaagtcagggaaattttggggccagataaggatttagaggtggaagacattgttaacactttgctgaccaagaaccttgtgataaggtgtgatcgagtcatgaaaactgtgaggcctggcaagaaaaagctatcgtcatggcctgctcatttggagatacataatgaacaagtgtttactgaaaatgatgggttttttgcttggatgtttctgaaaagaaggaccttgtggcagacaattccttcttttcagaaacatcc

SEQ ID NO: 6373 - protein, 206 aa, Zea mays subsp. mays
  peptide (1)..(206): Ceres Seq. ID no. 12367119
  misc_feature (101)..(203): Pfam Name: Translocation protein Sec62 Pfam Description: Translocation protein Sec62
  misc_feature (101)..(203): Pfam Name: Translocation protein Sec62 Pfam Description: Translocation protein Sec62
  misc_feature (48)..(203): Homolog of NCBI NO: 18402801 NR Description: expressed protein; protein id: At3g20920.1, by cDNA: 41717., supported by cDNA: gi_15810582, supported by gi_21280984 [Arabidopsis thaliana] >gi|9293998|dbj|BAB01901.1|
  misc_feature (48)..(203): Homolog of NCBI NO: 21593719 NR Description: unknown [Arabidopsis thaliana]
  misc_feature (48)..(203): Homolog of NCBI NO: 18402801 NR Description: expressed protein; protein id: At3g20920.1, by cDNA: 41717., supported by cDNA: gi_15810582, supported by gi_21280984 [Arabidopsis thaliana] >gi|9293998|dbj|BAB01901.1|
  misc_feature (48)..(203): Homolog of NCBI NO: 21593719 NR Description: unknown [Arabidopsis thaliana]
KSPKHFVESAVRSARLSLRSGALGRAKAPPSSDKMAGKGAKATAAKSADKDKGKKTGGPVSRSSRAAPQEKSAPKKDVYQLFAEKVRDNKQLESRWAIMQETRVEYFRGKDFNTFVKNHPEVREILGPDKDLEVEDIVNTLLTKNLVIRCDRVMKTVRPGKKKLSSWPAHLEIHNEQVFTENDGFFAWMFLKRRTLWQTIPSFQKH

SEQ ID NO: 6374 - protein, 172 aa, Zea mays subsp. mays
  peptide (1)..(172): Ceres Seq. ID no. 12367120
  misc_feature (67)..(169): Pfam Name: Translocation protein Sec62 Pfam Description: Translocation protein Sec62
  misc_feature (67)..(169): Pfam Name: Translocation protein Sec62 Pfam Description: Translocation protein Sec62
  misc_feature (14)..(169): Homolog of NCBI NO: 18402801 NR Description: expressed protein; protein id: At3g20920.1, by cDNA: 41717., supported by cDNA: gi_15810582, supported by gi_21280984 [Arabidopsis thaliana] >gi|9293998|dbj|BAB01901.1|
  misc_feature (14)..(169): Homolog of NCBI NO: 21593719 NR Description: unknown [Arabidopsis thaliana]
  misc_feature (14)..(169): Homolog of NCBI NO: 18402801 NR Description: expressed protein; protein id: At3g20920.1, by cDNA: 41717., supported by cDNA: gi_15810582, supported by gi_21280984 [Arabidopsis thaliana] >gi|9293998|dbj|BAB01901.1|
  misc_feature (14)..(169): Homolog of NCBI NO: 21593719 NR Description: unknown [Arabidopsis thaliana]
MAGKGAKATAAKSADKDKGKKTGGPVSRSSRAAPQEKSAPKKDVYQLFAEKVRDNKQLESRWAIMQETRVEYFRGKDFNTFVKNHPEVREILGPDKDLEVEDIVNTLLTKNLVIRCDRVMKTVRPGKKKLSSWPAHLEIHNEQVFTENDGFFAWMFLKRRTLWQTIPSFQKH

SEQ ID NO: 6375 - protein, 108 aa, Zea mays subsp. mays
  peptide (1)..(108): Ceres Seq. ID no. 12367121
  misc_feature (3)..(105): Pfam Name: Translocation protein Sec62 Pfam Description: Translocation protein Sec62
  misc_feature (3)..(105): Pfam Name: Translocation protein Sec62 Pfam Description: Translocation protein Sec62
  misc_feature (1)..(105): Homolog of NCBI NO: 18402801 NR Description: expressed protein; protein id: At3g20920.1, by cDNA: 41717., supported by cDNA: gi_15810582, supported by gi_21280984 [Arabidopsis thaliana] >gi|9293998|dbj|BAB01901.1|
  misc_feature (1)..(105): Homolog of NCBI NO: 21593719 NR Description: unknown [Arabidopsis thaliana]
  misc_feature (1)..(105): Homolog of NCBI NO: 18402801 NR Description: expressed protein; protein id: At3g20920.1, by cDNA: 41717., supported by cDNA: gi_15810582, supported by gi_21280984 [Arabidopsis thaliana] >gi|9293998|dbj|BAB01901.1|
  misc_feature (1)..(105): Homolog of NCBI NO: 21593719 NR Description: unknown [Arabidopsis thaliana]
MQETRVEYFRGKDFNTFVKNHPEVREILGPDKDLEVEDIVNTLLTKNLVIRCDRVMKTVRPGKKKLSSWPAHLEIHNEQVFTENDGFFAWMFLKRRTLWQTIPSFQKH

SEQ ID NO: 6376 - DNA, 1403 bp, Zea mays subsp. mays
  misc_feature (1)..(1403): Ceres Seq. ID no. 13498720
  misc_feature: MA Experiment ID: 20000480 Result: Up-regulated in Transcription
  misc_feature: MA Experiment 20000480 PARAMETER Experiment Name: Zm_Drought_P Parameter: Age (day) Value: 11
  misc_feature: MA Experiment 20000480 PARAMETER Experiment Name: Zm_Drought_P Parameter: Organism Value: Zea mays
  misc_feature: MA Experiment 20000480 PARAMETER Experiment Name: Zm_Drought_P Parameter: Plant Line Value: 35A19
  misc_feature: MA Experiment 20000480 PARAMETER Experiment Name: Zm_Drought_P Parameter: Timepoint (hr) Value: 72
  misc_feature: MA Experiment 20000480 PARAMETER Experiment Name: Zm_Drought_P Parameter: Tissue Value: Aerial
  misc_feature: MA Experiment 20000480 PARAMETER Experiment Name: Zm_Drought_P Parameter: Treatment Value: Drought vs. No Drought
gtcttccctgatcccttcgctccccgaagcaaaagcgcagagcgcatcagcgcagagtaggacagccatggcgacggcggcggcgcagtcccatccggcatcgatggacgcgcgccggtgggacgagtcatcgtaccgccgcggcatcctccgtgcccgcgacctctcgtcccgcaccctcttccgtgccgtcttctttgaccacagcgacgacccggataccgacatcctactcgccgccgcctccagcgacggctccctcgcttccttctccctttcatcctgcatctccgcatgttccgctacctcccaggtggagaccgccgccactctggtagatcctgtctgcatcgtgcaagcgcacagcggacctgcctacgacgtcaggttttaccccgatcaacagcagccgctgctcttcagctgcggggacgatggccgcatcaagggttggaggtggcacgagatgcagagctgccttgtcccgctctccctgcaaggggatcatctggaaccagcacttgacttggtcaaccctcagcacgagggtccttggggtgctcgatctccagtacctgaaaacaatgccattgcaattaataaacaggatggatccattttggcagcagcgggtgatgcatgtgcttactgctgggatgtggagaccagtaaatgtaaaatcacattcaaggggcatgctgattatttgcacagcattgcagttcgtgagtcaaaccgccaggttgtaacaggatcagaggatgggacagctcgtatctgggattgcagaagtgggaagtgcactcgggttatacagccaggaaagagcaaggcatttgaaagctcatgggtcagctgtgttgctattgatccaagtgaaagttggctggcttgtggcacgtctagcggtatatcagtttggagtcttctctcaaatgagtgcatctttaatttggactgtcatgctcctgttcaagatttattgtttgacaagaatcatattttagcagttggcgctgaacctctgctctcccgtctcacaataaacgggacagtcctttcacaagtaaaatgtgcccctcagtcggcgttttctgtctccatccactcaactgggatagcagctgttgctggatacggaggtctggtggatgtgatctcagaagttgggagccatctgtgcacattcggtagccggggcctagacaagtaaatgacccatgagcattccttgcgaacagcgcgcggagaatgcgagggctgtatctctttgcactgcagttgcacaagtttcatggaacgttgtcgctgacaatgctctactgaacaaagatagctagacggtaaaaaaaaacatttgatactagttcgagctaaacaaagttctgctctgacatctcttc

SEQ ID NO: 6377 - protein, 403 aa, Zea mays subsp. mays
  peptide (1)..(403): Ceres Seq. ID no. 13498721
  misc_feature (36)..(401): Homolog of NCBI NO: 30680669 NR Description: transducin / WD-40 repeat protein family
  misc_feature (36)..(338): Homolog of NCBI NO: 7486245 NR Description: probable WD-40 repeat protein [imported] -
  misc_feature (139)..(338): Homolog of NCBI NO: 22761350 NR Description: unnamed protein product [Homo sapiens]
  misc_feature (191)..(388): Homolog of NCBI NO: 21358289 NR Description: CG5632-PA [Drosophila melanogaster]
  misc_feature (195)..(400): Homolog of NCBI NO: 17230958 NR Description: WD-40 repeat protein [Nostoc sp. PCC 7120]
  misc_feature (195)..(346): Homolog of NCBI NO: 17230958 NR Description: WD-40 repeat protein [Nostoc sp. PCC 7120]
  misc_feature (203)..(340): Homolog of NCBI NO: 37520744 NR Description: WD-repeat protein [Gloeobacter violaceus]
  misc_feature (195)..(400): Homolog of NCBI NO: 17230958 NR Description: WD-40 repeat protein [Nostoc sp. PCC 7120]
  misc_feature (196)..(377): Homolog of NCBI NO: 17230958 NR Description: WD-40 repeat protein [Nostoc sp. PCC 7120]
  misc_feature (196)..(329): Homolog of NCBI NO: 17225210 NR Description: beta transducin-like protein HET-D2Y [Podospora
SSLIPSLPEAKAQSASAQSRTAMATAAAQSHPASMDARRWDESSYRRGILRARDLSSRTLFRAVFFDHSDDPDTDILLAAASSDGSLASFSLSSCISACSATSQVETAATLVDPVCIVQAHSGPAYDVRFYPDQQQPLLFSCGDDGRIKGWRWHEMQSCLVPLSLQGDHLEPALDLVNPQHEGPWGARSPVPENNAIAINKQDGSILAAAGDACAYCWDVETSKCKITFKGHADYLHSIAVRESNRQVVTGSEDGTARIWDCRSGKCTRVIQPGKSKAFESSWVSCVAIDPSESWLACGTSSGISVWSLLSNECIFNLDCHAPVQDLLFDKNHILAVGAEPLLSRLTINGTVLSQVKCAPQSAFSVSIHSTGIAAVAGYGGLVDVISEVGSHLCTFGSRGLDK

SEQ ID NO: 6378 - protein, 381 aa, Zea mays subsp. mays
  peptide (1)..(381): Ceres Seq. ID no. 13498722
  misc_feature (14)..(379): Homolog of NCBI NO: 30680669 NR Description: transducin / WD-40 repeat protein family
  misc_feature (14)..(316): Homolog of NCBI NO: 7486245 NR Description: probable WD-40 repeat protein [imported] -
  misc_feature (117)..(316): Homolog of NCBI NO: 22761350 NR Description: unnamed protein product [Homo sapiens]
  misc_feature (169)..(366): Homolog of NCBI NO: 21358289 NR Description: CG5632-PA [Drosophila melanogaster]
  misc_feature (173)..(378): Homolog of NCBI NO: 17230958 NR Description: WD-40 repeat protein [Nostoc sp. PCC 7120]
  misc_feature (173)..(324): Homolog of NCBI NO: 17230958 NR Description: WD-40 repeat protein [Nostoc sp. PCC 7120]
  misc_feature (181)..(318): Homolog of NCBI NO: 37520744 NR Description: WD-repeat protein [Gloeobacter violaceus]
  misc_feature (173)..(378): Homolog of NCBI NO: 17230958 NR Description: WD-40 repeat protein [Nostoc sp. PCC 7120]
  misc_feature (174)..(355): Homolog of NCBI NO: 17230958 NR Description: WD-40 repeat protein [Nostoc sp. PCC 7120]
  misc_feature (174)..(307): Homolog of NCBI NO: 17225210 NR Description: beta transducin-like protein HET-D2Y [Podospora
MATAAAQSHPASMDARRWDESSYRRGILRARDLSSRTLFRAVFFDHSDDPDTDILLAAASSDGSLASFSLSSCISACSATSQVETAATLVDPVCIVQAHSGPAYDVRFYPDQQQPLLFSCGDDGRIKGWRWHEMQSCLVPLSLQGDHLEPALDLVNPQHEGPWGARSPVPENNAIAINKQDGSILAAAGDACAYCWDVETSKCKITFKGHADYLHSIAVRESNRQVVTGSEDGTARIWDCRSGKCTRVIQPGKSKAFESSWVSCVAIDPSESWLACGTSSGISVWSLLSNECIFNLDCHAPVQDLLFDKNHILAVGAEPLLSRLTINGTVLSQVKCAPQSAFSVSIHSTGIAAVAGYGGLVDVISEVGSHLCTFGSRGLDK

SEQ ID NO: 6379 - protein, 369 aa, Zea mays subsp. mays
  peptide (1)..(369): Ceres Seq. ID no. 13498723
  misc_feature (161)..(366): Homolog of NCBI NO: 17230958 NR Description: WD-40 repeat protein [Nostoc sp. PCC 7120]
  misc_feature (162)..(343): Homolog of NCBI NO: 17230958 NR Description: WD-40 repeat protein [Nostoc sp. PCC 7120]
  misc_feature (162)..(295): Homolog of NCBI NO: 17225210 NR Description: beta transducin-like protein HET-D2Y [Podospora
  misc_feature (161)..(312): Homolog of NCBI NO: 17230958 NR Description: WD-40 repeat protein [Nostoc sp. PCC 7120]
  misc_feature (169)..(306): Homolog of NCBI NO: 37520744 NR Description: WD-repeat protein [Gloeobacter violaceus]
  misc_feature (2)..(367): Homolog of NCBI NO: 30680669 NR Description: transducin / WD-40 repeat protein family
  misc_feature (2)..(304): Homolog of NCBI NO: 7486245 NR Description: probable WD-40 repeat protein [imported] -
  misc_feature (105)..(304): Homolog of NCBI NO: 22761350 NR Description: unnamed protein product [Homo sapiens]
  misc_feature (157)..(354): Homolog of NCBI NO: 21358289 NR Description: CG5632-PA [Drosophila melanogaster]
  misc_feature (161)..(366): Homolog of NCBI NO: 17230958 NR Description: WD-40 repeat protein [Nostoc sp. PCC 7120]
MDARRWDESSYRRGILRARDLSSRTLFRAVFFDHSDDPDTDILLAAASSDGSLASFSLSSCISACSATSQVETAATLVDPVCIVQAHSGPAYDVRFYPDQQQPLLFSCGDDGRIKGWRWHEMQSCLVPLSLQGDHLEPALDLVNPQHEGPWGARSPVPENNAIAINKQDGSILAAAGDACAYCWDVETSKCKITFKGHADYLHSIAVRESNRQVVTGSEDGTARIWDCRSGKCTRVIQPGKSKAFESSWVSCVAIDPSESWLACGTSSGISVWSLLSNECIFNLDCHAPVQDLLFDKNHILAVGAEPLLSRLTINGTVLSQVKCAPQSAFSVSIHSTGIAAVAGYGGLVDVISEVGSHLCTFGSRGLDK

SEQ ID NO: 6380 - DNA, 1495 bp, Zea mays subsp. mays
  misc_feature (1)..(1495): Ceres Seq. ID no. 12366927
  misc_feature: MA Experiment ID: 108522 Result: Down-regulated in Transcription
  misc_feature: MA Experiment 108522 PARAMETER Experiment Name: Zm_42deg_Heat_P Parameter: Age (day) Value: 8
  misc_feature: MA Experiment 108522 PARAMETER Experiment Name: Zm_42deg_Heat_P Parameter: Organism Value: Zea mays
  misc_feature: MA Experiment 108522 PARAMETER Experiment Name: Zm_42deg_Heat_P Parameter: Plant Line Value: 35A19
  misc_feature: MA Experiment 108522 PARAMETER Experiment Name: Zm_42deg_Heat_P Parameter: Temperature (deg C) Value: 42 vs. 22
  misc_feature: MA Experiment 108522 PARAMETER Experiment Name: Zm_42deg_Heat_P Parameter: Timepoint (hr) Value: 1
  misc_feature: MA Experiment 108522 PARAMETER Experiment Name: Zm_42deg_Heat_P Parameter: Tissue Value: Aerial
  misc_feature: MA Experiment ID: 108528 Result: Up-regulated in Transcription
  misc_feature: MA Experiment 108528 PARAMETER Experiment Name: Zm_Imbibed_Seeds_P Parameter: Age (day) Value: 5 vs. 2
  misc_feature: MA Experiment 108528 PARAMETER Experiment Name: Zm_Imbibed_Seeds_P Parameter: Organism Value: Zea mays
  misc_feature: MA Experiment 108528 PARAMETER Experiment Name: Zm_Imbibed_Seeds_P Parameter: Plant Line Value: 35A19
  misc_feature: MA Experiment 108528 PARAMETER Experiment Name: Zm_Imbibed_Seeds_P Parameter: Tissue Value: Aerial vs. Embryo
  misc_feature: MA Experiment ID: 108529 Result: Up-regulated in Transcription
  misc_feature: MA Experiment 108529 PARAMETER Experiment Name: Zm_Imbibed_Seeds_P Parameter: Age (day) Value: 5 vs. 2
  misc_feature: MA Experiment 108529 PARAMETER Experiment Name: Zm_Imbibed_Seeds_P Parameter: Organism Value: Zea mays
  misc_feature: MA Experiment 108529 PARAMETER Experiment Name: Zm_Imbibed_Seeds_P Parameter: Plant Line Value: 35A19
  misc_feature: MA Experiment 108529 PARAMETER Experiment Name: Zm_Imbibed_Seeds_P Parameter: Tissue Value: Roots vs. Embryo
  misc_feature: MA Experiment ID: 108530 Result: Up-regulated in Transcription
  misc_feature: MA Experiment 108530 PARAMETER Experiment Name: Zm_Imbibed_Seeds_P Parameter: Age (day) Value: 6 vs. 2
  misc_feature: MA Experiment 108530 PARAMETER Experiment Name: Zm_Imbibed_Seeds_P Parameter: Organism Value: Zea mays
  misc_feature: MA Experiment 108530 PARAMETER Experiment Name: Zm_Imbibed_Seeds_P Parameter: Plant Line Value: 35A19
  misc_feature: MA Experiment 108530 PARAMETER Experiment Name: Zm_Imbibed_Seeds_P Parameter: Tissue Value: Aerial vs. Embryo
  misc_feature: MA Experiment ID: 108535 Result: Down-regulated in Transcription
  misc_feature: MA Experiment 108535 PARAMETER Experiment Name: Zm_Meristem_P Parameter: Age (day) Value: 8
  misc_feature: MA Experiment 108535 PARAMETER Experiment Name: Zm_Meristem_P Parameter: Organism Value: Zea mays
  misc_feature: MA Experiment 108535 PARAMETER Experiment Name: Zm_Meristem_P Parameter: Plant Line Value: 35A19
  misc_feature: MA Experiment 108535 PARAMETER Experiment Name: Zm_Meristem_P Parameter: Tissue Value: Root Meristem vs. Above Root Meristem
  misc_feature: MA Experiment ID: 108543 Result: Up-regulated in Transcription
  misc_feature: MA Experiment ID: 108545 Result: Up-regulated in Transcription
  misc_feature: MA Experiment 108545 PARAMETER Experiment Name: Zm_Imbibed_Seeds_P Parameter: Age (day) Value: 3 vs. 2
  misc_feature: MA Experiment 108545 PARAMETER Experiment Name: Zm_Imbibed_Seeds_P Parameter: Organism Value: Zea mays
  misc_feature: MA Experiment 108545 PARAMETER Experiment Name: Zm_Imbibed_Seeds_P Parameter: Plant Line Value: 35A19
  misc_feature: MA Experiment 108545 PARAMETER Experiment Name: Zm_Imbibed_Seeds_P Parameter: Tissue Value: Aerial vs. Embryo
  misc_feature: MA Experiment ID: 108546 Result: Up-regulated in Transcription
  misc_feature: MA Experiment 108546 PARAMETER Experiment Name: Zm_Imbibed_Seeds_P Parameter: Age (day) Value: 3 vs. 2
  misc_feature: MA Experiment 108546 PARAMETER Experiment Name: Zm_Imbibed_Seeds_P Parameter: Organism Value: Zea mays
  misc_feature: MA Experiment 108546 PARAMETER Experiment Name: Zm_Imbibed_Seeds_P Parameter: Plant Line Value: 35A19
  misc_feature: MA Experiment 108546 PARAMETER Experiment Name: Zm_Imbibed_Seeds_P Parameter: Tissue Value: Roots vs. Embryo
  misc_feature: MA Experiment ID: 108547 Result: Up-regulated in Transcription
  misc_feature: MA Experiment 108547 PARAMETER Experiment Name: Zm_Imbibed_Seeds_P Parameter: Age (day) Value: 4 vs. 2
  misc_feature: MA Experiment 108547 PARAMETER Experiment Name: Zm_Imbibed_Seeds_P Parameter: Organism Value: Zea mays
  misc_feature: MA Experiment 108547 PARAMETER Experiment Name: Zm_Imbibed_Seeds_P Parameter: Plant Line Value: 35A19
  misc_feature: MA Experiment 108547 PARAMETER Experiment Name: Zm_Imbibed_Seeds_P Parameter: Tissue Value: Aerial vs. Embryo
  misc_feature: MA Experiment ID: 108556 Result: Up-regulated in Transcription
  misc_feature: MA Experiment 108556 PARAMETER Experiment Name: Zm_Drought_P Parameter: Age (day) Value: 9
  misc_feature: MA Experiment 108556 PARAMETER Experiment Name: Zm_Drought_P Parameter: Organism Value: Zea mays
  misc_feature: MA Experiment 108556 PARAMETER Experiment Name: Zm_Drought_P Parameter: Plant Line Value: 35A19
  misc_feature: MA Experiment 108556 PARAMETER Experiment Name: Zm_Drought_P Parameter: Timepoint (hr) Value: 24
  misc_feature: MA Experiment 108556 PARAMETER Experiment Name: Zm_Drought_P Parameter: Tissue Value: Aerial
  misc_feature: MA Experiment 108556 PARAMETER Experiment Name: Zm_Drought_P Parameter: Treatment Value: Drought vs. No Drought
  misc_feature: MA Experiment ID: 108559 Result: Down-regulated in Transcription
  misc_feature: MA Experiment 108559 PARAMETER Experiment Name: Zm_5mM_NO_P Parameter: Age (day) Value: 8
  misc_feature: MA Experiment 108559 PARAMETER Experiment Name: Zm_5mM_NO_P Parameter: Organism Value: Zea mays
  misc_feature: MA Experiment 108559 PARAMETER Experiment Name: Zm_5mM_NO_P Parameter: Plant Line Value: 35A19
  misc_feature: MA Experiment 108559 PARAMETER Experiment Name: Zm_5mM_NO_P Parameter: Timepoint (hr) Value: 12
  misc_feature: MA Experiment 108559 PARAMETER Experiment Name: Zm_5mM_NO_P Parameter: Tissue Value: Aerial
  misc_feature: MA Experiment 108559 PARAMETER Experiment Name: Zm_5mM_NO_P Parameter: Treatment Value: 5mM NO vs. No Treatment
  misc_feature: MA Experiment ID: 20000108 Result: Down-regulated in Transcription
  misc_feature: MA Experiment 20000108 PARAMETER Experiment Name: Zm_Root-Tips_P Parameter: Age (day) Value: 12
  misc_feature: MA Experiment 20000108 PARAMETER Experiment Name: Zm_Root-Tips_P Parameter: Organism Value: Zea mays
  misc_feature: MA Experiment 20000108 PARAMETER Experiment Name: Zm_Root-Tips_P Parameter: Tissue Value: Root tips vs. Root mid region    35
  misc_feature: MA Experiment 20000108 PARAMETER Experiment Name: Zm_Root-Tips_P Parameter: Tissue Value: Root tips vs. Root mid region   Sequence Listing-Misc Features (4)
  misc_feature: MA Experiment ID: 20000478 Result: Down-regulated in Transcription
  misc_feature: MA Experiment 20000478 PARAMETER Experiment Name: Zm_5mM_SA_P Parameter: Age (day) Value: 11
  misc_feature: MA Experiment 20000478 PARAMETER Experiment Name: Zm_5mM_SA_P Parameter: Organism Value: Zea mays
  misc_feature: MA Experiment 20000478 PARAMETER Experiment Name: Zm_5mM_SA_P Parameter: Plant Line Value: 35A19
  misc_feature: MA Experiment 20000478 PARAMETER Experiment Name: Zm_5mM_SA_P Parameter: Timepoint (hr) Value: 72
  misc_feature: MA Experiment 20000478 PARAMETER Experiment Name: Zm_5mM_SA_P Parameter: Tissue Value: Aerial
  misc_feature: MA Experiment 20000478 PARAMETER Experiment Name: Zm_5mM_SA_P Parameter: Treatment Value: 5mM SA vs. No Treatment
  misc_feature: MA Experiment ID: 20000479 Result: Down-regulated in Transcription
  misc_feature: MA Experiment 20000479 PARAMETER Experiment Name: Zm_Drought_P Parameter: Age (day) Value: 10
  misc_feature: MA Experiment 20000479 PARAMETER Experiment Name: Zm_Drought_P Parameter: Organism Value: Zea mays
  misc_feature: MA Experiment 20000479 PARAMETER Experiment Name: Zm_Drought_P Parameter: Plant Line Value: 35A19
  misc_feature: MA Experiment 20000479 PARAMETER Experiment Name: Zm_Drought_P Parameter: Timepoint (hr) Value: 48
  misc_feature: MA Experiment 20000479 PARAMETER Experiment Name: Zm_Drought_P Parameter: Tissue Value: Aerial
  misc_feature: MA Experiment 20000479 PARAMETER Experiment Name: Zm_Drought_P Parameter: Treatment Value: Drought vs. No Drought
  misc_feature: MA Experiment ID: 20000535 Result: Down-regulated in Transcription
  misc_feature: MA Experiment 20000535 PARAMETER Experiment Name: Zm_Hybrid_Seed_Dev_P Parameter: DAP Value: 30 vs. 12
  misc_feature: MA Experiment 20000535 PARAMETER Experiment Name: Zm_Hybrid_Seed_Dev_P Parameter: Organism Value: Zea mays
  misc_feature: MA Experiment 20000535 PARAMETER Experiment Name: Zm_Hybrid_Seed_Dev_P Parameter: Plant Line Value: 35A19
  misc_feature: MA Experiment 20000535 PARAMETER Experiment Name: Zm_Hybrid_Seed_Dev_P Parameter: Tissue Value: Embryo vs. Unfert Floret
  misc_feature: MA Experiment ID: 20001608 Result: Down-regulated in Transcription
  misc_feature: MA Experiment 20001608 PARAMETER Experiment Name: Zm_50ppm_KNO3_L-to-H_P Parameter: Age (day) Value: 21
  misc_feature: MA Experiment 20001608 PARAMETER Experiment Name: Zm_50ppm_KNO3_L-to-H_P Parameter: Organism Value: Zea mays
  misc_feature: MA Experiment 20001608 PARAMETER Experiment Name: Zm_50ppm_KNO3_L-to-H_P Parameter: Plant Line Value: 35A19
  misc_feature: MA Experiment 20001608 PARAMETER Experiment Name: Zm_50ppm_KNO3_L-to-H_P Parameter: Timepoint (hr) Value: 48
  misc_feature: MA Experiment 20001608 PARAMETER Experiment Name: Zm_50ppm_KNO3_L-to-H_P Parameter: Tissue Value: Shoots
  misc_feature: MA Experiment 20001608 PARAMETER Experiment Name: Zm_50ppm_KNO3_L-to-H_P Parameter: Treatment Value: 50ppm KNO3 vs. 50ppm KCl
acaacacctcatcacaaacacaaagacagccagccagagccagccagagccagccatcactgatcatagcatcagcagcttagtataccgtaccgctccacatccgagctagaagaagaagcccgcgcggccagtacctgcctagcggcgcgagcgaagcagagatggcgagagcgctgccgctggtgctcgcggcgtccgtcctgctggcggccgccgcgctgctgctggccgcggcgccggcgccggcggccgcggtcgacttcggcgcggaggacctggcgtcggaggaggcgctgtgggcgctgtacgagcgctggcgcggccgccacgcggtggcgcgggacctgggcgacaaggcgcgccgcttcaacgtcttcaaggccaacgtgcgcctcatccacgagttcaaccgccgggacgagccctacaagctccgcctcaaccgcttcggcgacatgaccgccgacgagttccgacgccactacgcgggctccagggtcgcgcaccaccgcatgttccgcggcgacaggcagggctcctcggcgtcggcgtcgttcatgtacgccgacgcgcgcgacgtcccggcctccgtcgactggaggcagaagggcgccgtcaccgacgtcaaggaccagggccagtgcggtagctgctgggcgttctcgacgatcgccgccgtggagggcatcaacgcgatcaagaccaagaacctgacgtcgctgtcggagcagcagctggtggactgcgacaccaaggccaacgccggctgcaacgggggcctcatggactacgcgttccagtacatcgccaagcacggcggggtggcggcggaggacgcgtacccgtacagagcgcgccaggcgtcctgcaagaagtcgccggccccggtcgtcaccatcgacggctacgaggacgtgccggccaacgacgagtcggcgctcaagaaggcggtggcgcaccagcccgtgtccgtcgccatcgaggccagtggctcgcacttccagttctactccgagggggtcttctccggcaggtgcgggacggagctggaccacggcgtcgcggcggtcggctacggggtcaccgcggacggcaccaagtactggctggtcaagaactcgtggggccccgagtggggcgagaaggggtacatccgcatggcgcgcgacgtggccgccaaggagggacactgcggcatcgccatggaggcatcctaccccgtcaagacctcgcccaaccccaaggtccacgccgtcgtcgacgaggacggctccagccacgacgagctctgaattgcgcactacactactacgtactagctatagcctatatagctatactatgattgatccatgtatgctcggacaggaacatcgccgactgtgaatgtctgaatggcatacgcacatcttacacctgcattcatgtaataccagtcgagagttgatcttccagcaactttcatttcattcggttattattatattatttg

SEQ ID NO: 6381 - protein, 376 aa, Zea mays subsp. mays
  peptide (1)..(376): Ceres Seq. ID no. 12366928
  misc_feature (140)..(354): Pfam Name: Papain family cysteine protease Pfam Description: Papain family cysteine protease
  misc_feature (9)..(361): Homolog of NCBI NO: 40806500 NR Description: putative cysteine protease 2 [Iris hollandica]
  misc_feature (12)..(368): Homolog of NCBI NO: 537437 NR Description: cysteine proteinase [Hemerocallis hybrid cultivar]
  misc_feature (20)..(368): Homolog of NCBI NO: 4731374 NR Description: papain-like cysteine protease [Sandersonia
  misc_feature (13)..(376): Homolog of NCBI NO: 7435798 NR Description: probable cysteine proteinase (EC 3.4.22.-)
  misc_feature (17)..(368): Homolog of NCBI NO: 1169186 NR Description: Thiol protease SEN102 precursor
  misc_feature (14)..(368): Homolog of NCBI NO: 1173630 NR Description: cysteine proteinase
  misc_feature (19)..(360): Homolog of NCBI NO: 18423124 NR Description: cysteine proteinase; protein id: At5g50260.1, by cDNA: gi_20258849 [Arabidopsis thaliana] cysteine endopeptidase [Arabidopsis thaliana]
  misc_feature (19)..(359): Homolog of NCBI NO: 7435817 NR Description: cysteine endopeptidase (EC 3.4.22.-) precursor - bean >gi|2944446|gb|AAC62396.1| cysteine endopeptidase precursor
  misc_feature (13)..(376): Homolog of NCBI NO: 7435797 NR Description: cysteine proteinase (EC 3.4.22.-) - barley
  misc_feature (13)..(376): Homolog of NCBI NO: 4100157 NR Description: cysteine proteinase precursor [Hordeum vulgare]
MARALPLVLAASVLLAAAALLLAAAPAPAAAVDFGAEDLASEEALWALYERWRGRHAVARDLGDKARRFNVFKANVRLIHEFNRRDEPYKLRLNRFGDMTADEFRRHYAGSRVAHHRMFRGDRQGSSASASFMYADARDVPASVDWRQKGAVTDVKDQGQCGSCWAFSTIAAVEGINAIKTKNLTSLSEQQLVDCDTKANAGCNGGLMDYAFQYIAKHGGVAAEDAYPYRARQASCKKSPAPVVTIDGYEDVPANDESALKKAVAHQPVSVAIEASGSHFQFYSEGVFSGRCGTELDHGVAAVGYGVTADGTKYWLVKNSWGPEWGEKGYIRMARDVAAKEGHCGIAMEASYPVKTSPNPKVHAVVDEDGSSHDEL

SEQ ID NO: 6382 - protein, 278 aa, Zea mays subsp. mays
  peptide (1)..(278): Ceres Seq. ID no. 12366929
  misc_feature (42)..(256): Pfam Name: Papain family cysteine protease Pfam Description: Papain family cysteine protease
  misc_feature (1)..(263): Homolog of NCBI NO: 40806500 NR Description: putative cysteine protease 2 [Iris hollandica]
  misc_feature (1)..(270): Homolog of NCBI NO: 537437 NR Description: cysteine proteinase [Hemerocallis hybrid cultivar]
  misc_feature (1)..(270): Homolog of NCBI NO: 4731374 NR Description: papain-like cysteine protease [Sandersonia
  misc_feature (1)..(278): Homolog of NCBI NO: 7435798 NR Description: probable cysteine proteinase (EC 3.4.22.-)
  misc_feature (1)..(270): Homolog of NCBI NO: 1169186 NR Description: Thiol protease SEN102 precursor
  misc_feature (1)..(270): Homolog of NCBI NO: 1173630 NR Description: cysteine proteinase
  misc_feature (1)..(262): Homolog of NCBI NO: 18423124 NR Description: cysteine proteinase; protein id: At5g50260.1, by cDNA: gi_20258849 [Arabidopsis thaliana] cysteine endopeptidase [Arabidopsis thaliana]
  misc_feature (1)..(261): Homolog of NCBI NO: 7435817 NR Description: cysteine endopeptidase (EC 3.4.22.-) precursor - bean >gi|2944446|gb|AAC62396.1| cysteine endopeptidase precursor
  misc_feature (1)..(278): Homolog of NCBI NO: 7435797 NR Description: cysteine proteinase (EC 3.4.22.-) - barley
  misc_feature (1)..(278): Homolog of NCBI NO: 4100157 NR Description: cysteine proteinase precursor [Hordeum vulgare]
MTADEFRRHYAGSRVAHHRMFRGDRQGSSASASFMYADARDVPASVDWRQKGAVTDVKDQGQCGSCWAFSTIAAVEGINAIKTKNLTSLSEQQLVDCDTKANAGCNGGLMDYAFQYIAKHGGVAAEDAYPYRARQASCKKSPAPVVTIDGYEDVPANDESALKKAVAHQPVSVAIEASGSHFQFYSEGVFSGRCGTELDHGVAAVGYGVTADGTKYWLVKNSWGPEWGEKGYIRMARDVAAKEGHCGIAMEASYPVKTSPNPKVHAVVDEDGSSHDEL

SEQ ID NO: 6383 - protein, 259 aa, Zea mays subsp. mays
  peptide (1)..(259): Ceres Seq. ID no. 12366930
  misc_feature (23)..(237): Pfam Name: Papain family cysteine protease Pfam Description: Papain family cysteine protease
  misc_feature (1)..(244): Homolog of NCBI NO: 40806500 NR Description: putative cysteine protease 2 [Iris hollandica]
  misc_feature (1)..(251): Homolog of NCBI NO: 537437 NR Description: cysteine proteinase [Hemerocallis hybrid cultivar]
  misc_feature (1)..(251): Homolog of NCBI NO: 4731374 NR Description: papain-like cysteine protease [Sandersonia
  misc_feature (1)..(259): Homolog of NCBI NO: 7435798 NR Description: probable cysteine proteinase (EC 3.4.22.-)
  misc_feature (1)..(251): Homolog of NCBI NO: 1169186 NR Description: Thiol protease SEN102 precursor
  misc_feature (1)..(251): Homolog of NCBI NO: 1173630 NR Description: cysteine proteinase
  misc_feature (1)..(243): Homolog of NCBI NO: 18423124 NR Description: cysteine proteinase; protein id: At5g50260.1, by cDNA: gi_20258849 [Arabidopsis thaliana] cysteine endopeptidase [Arabidopsis thaliana]
  misc_feature (1)..(242): Homolog of NCBI NO: 7435817 NR Description: cysteine endopeptidase (EC 3.4.22.-) precursor - bean >gi|2944446|gb|AAC62396.1| cysteine endopeptidase precursor
  misc_feature (1)..(259): Homolog of NCBI NO: 7435797 NR Description: cysteine proteinase (EC 3.4.22.-) - barley
  misc_feature (1)..(259): Homolog of NCBI NO: 4100157 NR Description: cysteine proteinase precursor [Hordeum vulgare]
MFRGDRQGSSASASFMYADARDVPASVDWRQKGAVTDVKDQGQCGSCWAFSTIAAVEGINAIKTKNLTSLSEQQLVDCDTKANAGCNGGLMDYAFQYIAKHGGVAAEDAYPYRARQASCKKSPAPVVTIDGYEDVPANDESALKKAVAHQPVSVAIEASGSHFQFYSEGVFSGRCGTELDHGVAAVGYGVTADGTKYWLVKNSWGPEWGEKGYIRMARDVAAKEGHCGIAMEASYPVKTSPNPKVHAVVDEDGSSHDEL

SEQ ID NO: 6384 - DNA, 1060 bp, Zea mays subsp. mays
  misc_feature (1)..(1060): Ceres Seq. ID no. 12344755
  misc_feature: MA Experiment ID: 108527 Result: Down-regulated in Transcription
  misc_feature: MA Experiment 108527 PARAMETER Experiment Name: Zm_5mM_NO_P Parameter: Age (day) Value: 8
  misc_feature: MA Experiment 108527 PARAMETER Experiment Name: Zm_5mM_NO_P Parameter: Organism Value: Zea mays
  misc_feature: MA Experiment 108527 PARAMETER Experiment Name: Zm_5mM_NO_P Parameter: Plant Line Value: 35A19
  misc_feature: MA Experiment 108527 PARAMETER Experiment Name: Zm_5mM_NO_P Parameter: Timepoint (hr) Value: 6
  misc_feature: MA Experiment 108527 PARAMETER Experiment Name: Zm_5mM_NO_P Parameter: Tissue Value: Aerial
  misc_feature: MA Experiment 108527 PARAMETER Experiment Name: Zm_5mM_NO_P Parameter: Treatment Value: 5mM NO vs. No Treatment
  misc_feature: MA Experiment ID: 108528 Result: Up-regulated in Transcription
  misc_feature: MA Experiment 108528 PARAMETER Experiment Name: Zm_Imbibed_Seeds_P Parameter: Age (day) Value: 5 vs. 2
  misc_feature: MA Experiment 108528 PARAMETER Experiment Name: Zm_Imbibed_Seeds_P Parameter: Organism Value: Zea mays
  misc_feature: MA Experiment 108528 PARAMETER Experiment Name: Zm_Imbibed_Seeds_P Parameter: Plant Line Value: 35A19
  misc_feature: MA Experiment 108528 PARAMETER Experiment Name: Zm_Imbibed_Seeds_P Parameter: Tissue Value: Aerial vs. Embryo
  misc_feature: MA Experiment ID: 108529 Result: Down-regulated in Transcription
  misc_feature: MA Experiment 108529 PARAMETER Experiment Name: Zm_Imbibed_Seeds_P Parameter: Age (day) Value: 5 vs. 2
  misc_feature: MA Experiment 108529 PARAMETER Experiment Name: Zm_Imbibed_Seeds_P Parameter: Organism Value: Zea mays
  misc_feature: MA Experiment 108529 PARAMETER Experiment Name: Zm_Imbibed_Seeds_P Parameter: Plant Line Value: 35A19
  misc_feature: MA Experiment 108529 PARAMETER Experiment Name: Zm_Imbibed_Seeds_P Parameter: Tissue Value: Roots vs. Embryo
  misc_feature: MA Experiment ID: 108530 Result: Up-regulated in Transcription
  misc_feature: MA Experiment 108530 PARAMETER Experiment Name: Zm_Imbibed_Seeds_P Parameter: Age (day) Value: 6 vs. 2
  misc_feature: MA Experiment 108530 PARAMETER Experiment Name: Zm_Imbibed_Seeds_P Parameter: Organism Value: Zea mays
  misc_feature: MA Experiment 108530 PARAMETER Experiment Name: Zm_Imbibed_Seeds_P Parameter: Plant Line Value: 35A19
  misc_feature: MA Experiment 108530 PARAMETER Experiment Name: Zm_Imbibed_Seeds_P Parameter: Tissue Value: Aerial vs. Embryo
  misc_feature: MA Experiment ID: 108536 Result: Down-regulated in Transcription
  misc_feature: MA Experiment 108536 PARAMETER Experiment Name: Zm_Meristem_P Parameter: Age (day) Value: 8
  misc_feature: MA Experiment 108536 PARAMETER Experiment Name: Zm_Meristem_P Parameter: Organism Value: Zea mays
  misc_feature: MA Experiment 108536 PARAMETER Experiment Name: Zm_Meristem_P Parameter: Plant Line Value: 35A19
  misc_feature: MA Experiment 108536 PARAMETER Experiment Name: Zm_Meristem_P Parameter: Tissue Value: Shoot Meristem vs. Above Shoot Meristem
  misc_feature: MA Experiment ID: 108545 Result: Up-regulated in Transcription
  misc_feature: MA Experiment 108545 PARAMETER Experiment Name: Zm_Imbibed_Seeds_P Parameter: Age (day) Value: 3 vs. 2
  misc_feature: MA Experiment 108545 PARAMETER Experiment Name: Zm_Imbibed_Seeds_P Parameter: Organism Value: Zea mays
  misc_feature: MA Experiment 108545 PARAMETER Experiment Name: Zm_Imbibed_Seeds_P Parameter: Plant Line Value: 35A19
  misc_feature: MA Experiment 108545 PARAMETER Experiment Name: Zm_Imbibed_Seeds_P Parameter: Tissue Value: Aerial vs. Embryo
  misc_feature: MA Experiment ID: 108547 Result: Up-regulated in Transcription
  misc_feature: MA Experiment 108547 PARAMETER Experiment Name: Zm_Imbibed_Seeds_P Parameter: Age (day) Value: 4 vs. 2
  misc_feature: MA Experiment 108547 PARAMETER Experiment Name: Zm_Imbibed_Seeds_P Parameter: Organism Value: Zea mays
  misc_feature: MA Experiment 108547 PARAMETER Experiment Name: Zm_Imbibed_Seeds_P Parameter: Plant Line Value: 35A19
  misc_feature: MA Experiment 108547 PARAMETER Experiment Name: Zm_Imbibed_Seeds_P Parameter: Tissue Value: Aerial vs. Embryo
  misc_feature: MA Experiment ID: 20000626 Result: Down-regulated in Transcription
  misc_feature: MA Experiment 20000626 PARAMETER Experiment Name: Zm_Herbicide-Treatments_P Parameter: Timepoint (hr) Value: 12
  misc_feature: MA Experiment 20000626 PARAMETER Experiment Name: Zm_Herbicide-Treatments_P Parameter: Tissue Value: Aerial
  misc_feature: MA Experiment 20000626 PARAMETER Experiment Name: Zm_Herbicide-Treatments_P Parameter: Treatment Value: Roundup vs. No Treatment
  misc_feature: MA Experiment ID: 20000630 Result: Down-regulated in Transcription
  misc_feature: MA Experiment 20000630 PARAMETER Experiment Name: Zm_Herbicide-Treatments_P Parameter: Timepoint (hr) Value: 4
  misc_feature: MA Experiment 20000630 PARAMETER Experiment Name: Zm_Herbicide-Treatments_P Parameter: Tissue Value: Aerial
  misc_feature: MA Experiment 20000630 PARAMETER Experiment Name: Zm_Herbicide-Treatments_P Parameter: Treatment Value: Roundup vs. No Treatment
gtcagctcttgcgagaagcacccaaattggagtactgtgaagtctgaaccggctggcctggccgttgctgagggagaggataaaagaacaccgaaatgccactcctgctgctcccaccaccggcgtgcaccacggcagcgacgtcgctcgctttcttgcggccccggccttcgcgggcgcgttgggccaacctctcttacgcgttcccccgcctgaggaaatacgggcgtcgccaccgcgagcccgtggccggccccagcctcgatgatgatggcggcgaggaggatgagacggaggcagaggactgggagtccgacgagggcgaggaagagatggaggtagacgaggaggagtttctggcgatgcggcccaaaccggcgggatttggcgaggggaaaacatattccactgacattgaggagcagcttctccgggagatgggctttggtgggggcgcggcgcggcgaggagaggcggccccggccaatcgccgcgccggggatagttccaccaaagtagctgccgcagatgtcagtgccgatggtgttcaagttcgtgtttggaacctcccaaaaaagaaaaacatacacaaggacctgaagcaagcttttaaagggtttcatggccttttatccattgatccagcagtttccgcaaataagaaaacccgtgatcctatttgtaagggttttgcatatctcaaactagagtctgctgaggctgcaacaaggttcgtggagatatactctcatcaaactgtgtcatttggcaagattcagaagccaatcagttgcggtatcatcgataaacgcagctctgttgagcattcaaataagcatccagtagtcaggcaatccctcaattaatgtccaagcaccaaaacttggtagcggcaagttgagtaacacatatctgtcatctagcacaagtaatcacgcacttctagggatctcaagttttacgaaaaagctttgataaacagatagattagacagttctctgtattccaaataactgtttgtatcaagcaatttggtagtttggtcttgtttttttaggg

SEQ ID NO: 6385 - protein, 256 aa, Zea mays subsp. mays
  peptide (1)..(256): Ceres Seq. ID no. 12344756
  misc_feature (45)..(237): Homolog of NCBI NO: 25406039 NR Description: F20P5.8 [imported] - Arabidopsis thaliana
  misc_feature (45)..(237): Homolog of NCBI NO: 30698005 NR Description: RNA recognition motif (RRM)-containing protein thaliana] >gi|28392945|gb|AAO41908.1| unknown protein thaliana] >gi|28827688|gb|AAO50688.1| unknown protein
MPLLLLPPPACTTAATSLAFLRPRPSRARWANLSYAFPRLRKYGRRHREPVAGPSLDDDGGEEDETEAEDWESDEGEEEMEVDEEEFLAMRPKPAGFGEGKTYSTDIEEQLLREMGFGGGAARRGEAAPANRRAGDSSTKVAAADVSADGVQVRVWNLPKKKNIHKDLKQAFKGFHGLLSIDPAVSANKKTRDPICKGFAYLKLESAEAATRFVEIYSHQTVSFGKIQKPISCGIIDKRSSVEHSNKHPVVRQSLN

SEQ ID NO: 6386 - protein, 177 aa, Zea mays subsp. mays
  peptide (1)..(177): Ceres Seq. ID no. 12344757
  misc_feature (1)..(158): Homolog of NCBI NO: 25406039 NR Description: F20P5.8 [imported] - Arabidopsis thaliana
  misc_feature (1)..(158): Homolog of NCBI NO: 30698005 NR Description: RNA recognition motif (RRM)-containing protein thaliana] >gi|28392945|gb|AAO41908.1| unknown protein thaliana] >gi|28827688|gb|AAO50688.1| unknown protein
MEVDEEEFLAMRPKPAGFGEGKTYSTDIEEQLLREMGFGGGAARRGEAAPANRRAGDSSTKVAAADVSADGVQVRVWNLPKKKNIHKDLKQAFKGFHGLLSIDPAVSANKKTRDPICKGFAYLKLESAEAATRFVEIYSHQTVSFGKIQKPISCGIIDKRSSVEHSNKHPVVRQSLN

SEQ ID NO: 6387 - protein, 167 aa, Zea mays subsp. mays
  peptide (1)..(167): Ceres Seq. ID no. 12344758
  misc_feature (1)..(148): Homolog of NCBI NO: 25406039 NR Description: F20P5.8 [imported] - Arabidopsis thaliana
  misc_feature (1)..(148): Homolog of NCBI NO: 30698005 NR Description: RNA recognition motif (RRM)-containing protein thaliana] >gi|28392945|gb|AAO41908.1| unknown protein thaliana] >gi|28827688|gb|AAO50688.1| unknown protein
MRPKPAGFGEGKTYSTDIEEQLLREMGFGGGAARRGEAAPANRRAGDSSTKVAAADVSADGVQVRVWNLPKKKNIHKDLKQAFKGFHGLLSIDPAVSANKKTRDPICKGFAYLKLESAEAATRFVEIYSHQTVSFGKIQKPISCGIIDKRSSVEHSNKHPVVRQSLN

SEQ ID NO: 6388 - DNA, 1320 bp, Zea mays subsp. mays
  misc_feature (1)..(1320): Ceres Seq. ID no. 12407729
  misc_feature: MA Experiment ID: 108523 Result: Down-regulated in Transcription
  misc_feature: MA Experiment 108523 PARAMETER Experiment Name: Zm_42deg_Heat_P Parameter: Age (day) Value: 8
  misc_feature: MA Experiment 108523 PARAMETER Experiment Name: Zm_42deg_Heat_P Parameter: Organism Value: Zea mays
  misc_feature: MA Experiment 108523 PARAMETER Experiment Name: Zm_42deg_Heat_P Parameter: Plant Line Value: 35A19
  misc_feature: MA Experiment 108523 PARAMETER Experiment Name: Zm_42deg_Heat_P Parameter: Temperature (deg C) Value: 42 vs. 22
  misc_feature: MA Experiment 108523 PARAMETER Experiment Name: Zm_42deg_Heat_P Parameter: Timepoint (hr) Value: 6
  misc_feature: MA Experiment 108523 PARAMETER Experiment Name: Zm_42deg_Heat_P Parameter: Tissue Value: Aerial
  misc_feature: MA Experiment ID: 108528 Result: Down-regulated in Transcription
  misc_feature: MA Experiment 108528 PARAMETER Experiment Name: Zm_Imbibed_Seeds_P Parameter: Age (day) Value: 5 vs. 2
  misc_feature: MA Experiment 108528 PARAMETER Experiment Name: Zm_Imbibed_Seeds_P Parameter: Organism Value: Zea mays
  misc_feature: MA Experiment 108528 PARAMETER Experiment Name: Zm_Imbibed_Seeds_P Parameter: Plant Line Value: 35A19
  misc_feature: MA Experiment 108528 PARAMETER Experiment Name: Zm_Imbibed_Seeds_P Parameter: Tissue Value: Aerial vs. Embryo
  misc_feature: MA Experiment ID: 108530 Result: Down-regulated in Transcription
  misc_feature: MA Experiment 108530 PARAMETER Experiment Name: Zm_Imbibed_Seeds_P Parameter: Age (day) Value: 6 vs. 2
  misc_feature: MA Experiment 108530 PARAMETER Experiment Name: Zm_Imbibed_Seeds_P Parameter: Organism Value: Zea mays
  misc_feature: MA Experiment 108530 PARAMETER Experiment Name: Zm_Imbibed_Seeds_P Parameter: Plant Line Value: 35A19
  misc_feature: MA Experiment 108530 PARAMETER Experiment Name: Zm_Imbibed_Seeds_P Parameter: Tissue Value: Aerial vs. Embryo
  misc_feature: MA Experiment ID: 108535 Result: Down-regulated in Transcription
  misc_feature: MA Experiment 108535 PARAMETER Experiment Name: Zm_Meristem_P Parameter: Age (day) Value: 8
  misc_feature: MA Experiment 108535 PARAMETER Experiment Name: Zm_Meristem_P Parameter: Organism Value: Zea mays
  misc_feature: MA Experiment 108535 PARAMETER Experiment Name: Zm_Meristem_P Parameter: Plant Line Value: 35A19
  misc_feature: MA Experiment 108535 PARAMETER Experiment Name: Zm_Meristem_P Parameter: Tissue Value: Root Meristem vs. Above Root Meristem
  misc_feature: MA Experiment ID: 108543 Result: Down-regulated in Transcription
  misc_feature: MA Experiment ID: 108545 Result: Down-regulated in Transcription
  misc_feature: MA Experiment 108545 PARAMETER Experiment Name: Zm_Imbibed_Seeds_P Parameter: Age (day) Value: 3 vs. 2
  misc_feature: MA Experiment 108545 PARAMETER Experiment Name: Zm_Imbibed_Seeds_P Parameter: Organism Value: Zea mays
  misc_feature: MA Experiment 108545 PARAMETER Experiment Name: Zm_Imbibed_Seeds_P Parameter: Plant Line Value: 35A19
  misc_feature: MA Experiment 108545 PARAMETER Experiment Name: Zm_Imbibed_Seeds_P Parameter: Tissue Value: Aerial vs. Embryo
  misc_feature: MA Experiment ID: 108547 Result: Down-regulated in Transcription
  misc_feature: MA Experiment 108547 PARAMETER Experiment Name: Zm_Imbibed_Seeds_P Parameter: Age (day) Value: 4 vs. 2
  misc_feature: MA Experiment 108547 PARAMETER Experiment Name: Zm_Imbibed_Seeds_P Parameter: Organism Value: Zea mays
  misc_feature: MA Experiment 108547 PARAMETER Experiment Name: Zm_Imbibed_Seeds_P Parameter: Plant Line Value: 35A19
  misc_feature: MA Experiment 108547 PARAMETER Experiment Name: Zm_Imbibed_Seeds_P Parameter: Tissue Value: Aerial vs. Embryo
  misc_feature: MA Experiment ID: 20000477 Result: Up-regulated in Transcription
  misc_feature: MA Experiment 20000477 PARAMETER Experiment Name: Zm_5mM_SA_P Parameter: Age (day) Value: 10
  misc_feature: MA Experiment 20000477 PARAMETER Experiment Name: Zm_5mM_SA_P Parameter: Organism Value: Zea mays
  misc_feature: MA Experiment 20000477 PARAMETER Experiment Name: Zm_5mM_SA_P Parameter: Plant Line Value: 35A19
  misc_feature: MA Experiment 20000477 PARAMETER Experiment Name: Zm_5mM_SA_P Parameter: Timepoint (hr) Value: 48
  misc_feature: MA Experiment 20000477 PARAMETER Experiment Name: Zm_5mM_SA_P Parameter: Tissue Value: Aerial
  misc_feature: MA Experiment 20000477 PARAMETER Experiment Name: Zm_5mM_SA_P Parameter: Treatment Value: 5mM SA vs. No Treatment
  misc_feature: MA Experiment ID: 20000478 Result: Up-regulated in Transcription
  misc_feature: MA Experiment 20000478 PARAMETER Experiment Name: Zm_5mM_SA_P Parameter: Age (day) Value: 11
  misc_feature: MA Experiment 20000478 PARAMETER Experiment Name: Zm_5mM_SA_P Parameter: Organism Value: Zea mays
  misc_feature: MA Experiment 20000478 PARAMETER Experiment Name: Zm_5mM_SA_P Parameter: Plant Line Value: 35A19
  misc_feature: MA Experiment 20000478 PARAMETER Experiment Name: Zm_5mM_SA_P Parameter: Timepoint (hr) Value: 72
  misc_feature: MA Experiment 20000478 PARAMETER Experiment Name: Zm_5mM_SA_P Parameter: Tissue Value: Aerial
  misc_feature: MA Experiment 20000478 PARAMETER Experiment Name: Zm_5mM_SA_P Parameter: Treatment Value: 5mM SA vs. No Treatment
  misc_feature: MA Experiment ID: 20000479 Result: Up-regulated in Transcription
  misc_feature: MA Experiment 20000479 PARAMETER Experiment Name: Zm_Drought_P Parameter: Age (day) Value: 10
  misc_feature: MA Experiment 20000479 PARAMETER Experiment Name: Zm_Drought_P Parameter: Organism Value: Zea mays
  misc_feature: MA Experiment 20000479 PARAMETER Experiment Name: Zm_Drought_P Parameter: Plant Line Value: 35A19
  misc_feature: MA Experiment 20000479 PARAMETER Experiment Name: Zm_Drought_P Parameter: Timepoint (hr) Value: 48
  misc_feature: MA Experiment 20000479 PARAMETER Experiment Name: Zm_Drought_P Parameter: Tissue Value: Aerial
  misc_feature: MA Experiment 20000479 PARAMETER Experiment Name: Zm_Drought_P Parameter: Treatment Value: Drought vs. No Drought
  misc_feature: MA Experiment ID: 20000480 Result: Up-regulated in Transcription
  misc_feature: MA Experiment 20000480 PARAMETER Experiment Name: Zm_Drought_P Parameter: Age (day) Value: 11
  misc_feature: MA Experiment 20000480 PARAMETER Experiment Name: Zm_Drought_P Parameter: Organism Value: Zea mays
  misc_feature: MA Experiment 20000480 PARAMETER Experiment Name: Zm_Drought_P Parameter: Plant Line Value: 35A19
  misc_feature: MA Experiment 20000480 PARAMETER Experiment Name: Zm_Drought_P Parameter: Timepoint (hr) Value: 72
  misc_feature: MA Experiment 20000480 PARAMETER Experiment Name: Zm_Drought_P Parameter: Tissue Value: Aerial
  misc_feature: MA Experiment 20000480 PARAMETER Experiment Name: Zm_Drought_P Parameter: Treatment Value: Drought vs. No Drought
  misc_feature: MA Experiment ID: 20000488 Result: Down-regulated in Transcription
  misc_feature: MA Experiment 20000488 PARAMETER Experiment Name: Zm_50mM_NH4NO3_L_to_H_P Parameter: Organism Value: Zea mays
  misc_feature: MA Experiment 20000488 PARAMETER Experiment Name: Zm_50mM_NH4NO3_L_to_H_P Parameter: Timepoint (hr) Value: 8
  misc_feature: MA Experiment 20000488 PARAMETER Experiment Name: Zm_50mM_NH4NO3_L_to_H_P Parameter: Tissue Value: Leaves
  misc_feature: MA Experiment 20000488 PARAMETER Experiment Name: Zm_50mM_NH4NO3_L_to_H_P Parameter: Treatment Value: 50mM NH4NO3 vs. 100mM Mannitol
  misc_feature: MA Experiment ID: 20000532 Result: Up-regulated in Transcription
  misc_feature: MA Experiment 20000532 PARAMETER Experiment Name: Zm_0.001percent_MeJA_P Parameter: Age (day) Value: 10
  misc_feature: MA Experiment 20000532 PARAMETER Experiment Name: Zm_0.001percent_MeJA_P Parameter: Organism Value: Zea mays
  misc_feature: MA Experiment 20000532 PARAMETER Experiment Name: Zm_0.001percent_MeJA_P Parameter: Plant Line Value: 35A19
  misc_feature: MA Experiment 20000532 PARAMETER Experiment Name: Zm_0.001percent_MeJA_P Parameter: Timepoint (hr) Value: 48
  misc_feature: MA Experiment 20000532 PARAMETER Experiment Name: Zm_0.001percent_MeJA_P Parameter: Tissue Value: Aerial
  misc_feature: MA Experiment 20000532 PARAMETER Experiment Name: Zm_0.001percent_MeJA_P Parameter: Treatment Value: 0.001percent MeJA vs. No Treatment
  misc_feature: MA Experiment ID: 20000533 Result: Up-regulated in Transcription
  misc_feature: MA Experiment 20000533 PARAMETER Experiment Name: Zm_0.001percent_MeJA_P Parameter: Age (day) Value: 11
  misc_feature: MA Experiment 20000533 PARAMETER Experiment Name: Zm_0.001percent_MeJA_P Parameter: Organism Value: Zea mays
  misc_feature: MA Experiment 20000533 PARAMETER Experiment Name: Zm_0.001percent_MeJA_P Parameter: Plant Line Value: 35A19
  misc_feature: MA Experiment 20000533 PARAMETER Experiment Name: Zm_0.001percent_MeJA_P Parameter: Timepoint (hr) Value: 72
  misc_feature: MA Experiment 20000533 PARAMETER Experiment Name: Zm_0.001percent_MeJA_P Parameter: Tissue Value: Aerial
  misc_feature: MA Experiment 20000533 PARAMETER Experiment Name: Zm_0.001percent_MeJA_P Parameter: Treatment Value: 0.001percent MeJA vs. No Treatment
  misc_feature: MA Experiment ID: 20000535 Result: Up-regulated in Transcription
  misc_feature: MA Experiment 20000535 PARAMETER Experiment Name: Zm_Hybrid_Seed_Dev_P Parameter: DAP Value: 30 vs. 12
  misc_feature: MA Experiment 20000535 PARAMETER Experiment Name: Zm_Hybrid_Seed_Dev_P Parameter: Organism Value: Zea mays
  misc_feature: MA Experiment 20000535 PARAMETER Experiment Name: Zm_Hybrid_Seed_Dev_P Parameter: Plant Line Value: 35A19
  misc_feature: MA Experiment 20000535 PARAMETER Experiment Name: Zm_Hybrid_Seed_Dev_P Parameter: Tissue Value: Embryo vs. Unfert Floret
  misc_feature: MA Experiment ID: 20000626 Result: Up-regulated in Transcription
  misc_feature: MA Experiment 20000626 PARAMETER Experiment Name: Zm_Herbicide-Treatments_P Parameter: Timepoint (hr) Value: 12
  misc_feature: MA Experiment 20000626 PARAMETER Experiment Name: Zm_Herbicide-Treatments_P Parameter: Tissue Value: Aerial
  misc_feature: MA Experiment 20000626 PARAMETER Experiment Name: Zm_Herbicide-Treatments_P Parameter: Treatment Value: Roundup vs. No Treatment
  misc_feature: MA Experiment ID: 20001608 Result: Down-regulated in Transcription
  misc_feature: MA Experiment 20001608 PARAMETER Experiment Name: Zm_50ppm_KNO3_L-to-H_P Parameter: Age (day) Value: 21
  misc_feature: MA Experiment 20001608 PARAMETER Experiment Name: Zm_50ppm_KNO3_L-to-H_P Parameter: Organism Value: Zea mays
  misc_feature: MA Experiment 20001608 PARAMETER Experiment Name: Zm_50ppm_KNO3_L-to-H_P Parameter: Plant Line Value: 35A19
  misc_feature: MA Experiment 20001608 PARAMETER Experiment Name: Zm_50ppm_KNO3_L-to-H_P Parameter: Timepoint (hr) Value: 48
  misc_feature: MA Experiment 20001608 PARAMETER Experiment Name: Zm_50ppm_KNO3_L-to-H_P Parameter: Tissue Value: Shoots
  misc_feature: MA Experiment 20001608 PARAMETER Experiment Name: Zm_50ppm_KNO3_L-to-H_P Parameter: Treatment Value: 50ppm KNO3 vs. 50ppm KCl
  misc_feature: MA Experiment ID: 20001612 Result: Down-regulated in Transcription
  misc_feature: MA Experiment 20001612 PARAMETER Experiment Name: Zm_50ppm_KNO3_L-to-H_P Parameter: Age (day) Value: 19
  misc_feature: MA Experiment 20001612 PARAMETER Experiment Name: Zm_50ppm_KNO3_L-to-H_P Parameter: Organism Value: Zea mays
  misc_feature: MA Experiment 20001612 PARAMETER Experiment Name: Zm_50ppm_KNO3_L-to-H_P Parameter: Plant Line Value: 35A19
  misc_feature: MA Experiment 20001612 PARAMETER Experiment Name: Zm_50ppm_KNO3_L-to-H_P Parameter: Timepoint (hr) Value: 8
  misc_feature: MA Experiment 20001612 PARAMETER Experiment Name: Zm_50ppm_KNO3_L-to-H_P Parameter: Tissue Value: Roots
  misc_feature: MA Experiment 20001612 PARAMETER Experiment Name: Zm_50ppm_KNO3_L-to-H_P Parameter: Treatment Value: 50ppm KNO3 vs. 50ppm KCl
  misc_feature: MA Experiment ID: 20001613 Result: Down-regulated in Transcription
  misc_feature: MA Experiment 20001613 PARAMETER Experiment Name: Zm_50ppm_KNO3_L-to-H_P Parameter: Age (day) Value: 20
  misc_feature: MA Experiment 20001613 PARAMETER Experiment Name: Zm_50ppm_KNO3_L-to-H_P Parameter: Organism Value: Zea mays
  misc_feature: MA Experiment 20001613 PARAMETER Experiment Name: Zm_50ppm_KNO3_L-to-H_P Parameter: Plant Line Value: 35A19
  misc_feature: MA Experiment 20001613 PARAMETER Experiment Name: Zm_50ppm_KNO3_L-to-H_P Parameter: Timepoint (hr) Value: 24
  misc_feature: MA Experiment 20001613 PARAMETER Experiment Name: Zm_50ppm_KNO3_L-to-H_P Parameter: Tissue Value: Roots
  misc_feature: MA Experiment 20001613 PARAMETER Experiment Name: Zm_50ppm_KNO3_L-to-H_P Parameter: Treatment Value: 50ppm KNO3 vs. 50ppm KCl
gtacaatccgatgtaaacgaacaaggcctaagacgtactgcagcggcagcgcaccacatctgaccctaccaccatggcatccgcggggacgacggcggtggtgcccgaggtggccctgcggtcgggcaacgcgaggacggcgatgccgatggtcggcatgggcacggcgtcgttccctctggtgcacgaggccgtcaaggacggccgtgctctccgccatcgaggtggggttccgccacttcgacactgcctccatgtacggcaccgagaagccgctgggcgacgccgtggccgaggcgctccggcgcgggaccctgcggtcccgggaggatctgttcgtgacgtccaagctgtggtgctcgcagaaccacccggacctcgtgctgccgtccctccgggaaacactcaagaacctgcagatggagtacgtggatctgtacctgatccactggccggtgtgcctgaaaccggggccgcccgagctcccgaccaggaaggagaacgccgtgccgctggacctcgcgggtgtgtggcgcgccatggaggagtgccagcggctgggcctcgccaaggcgatcggcgtgagcaacttcaccaccaggcacctcgacggggtcctggccgtcgccacggtcccgcccgcggtgaaccaggtggagctgaacccgggcgtggccagcagcggacgctcagggcgtactgcgccgacaggggcatccacgtcgcggcctactcgccgntggaagggcagaactgggacgggcagggcagcgccgtgctggactccgaggtgctcgccgcgatagccaaggcgagggggaaaaccgtcgcgcaggtggcgttgcgatggatacatgagcagggagtgacatgcatcgtcaagagttacagcaaggagaggctgaggcagaaccttgggatattcgactgggagctgaccgacgaggagcggctcaagatcagccagatcccgcagaggaaggttgtccagactagtagcttgttctcgcaagagggtgagttcacggctgttgatccagcggaacttaatattttagaggaatagggggaaaatgacccgccacacatacactgcatcagtgttgctgcatacaaaagtgtatttcgtagaccatttgaataaggctgttggaaacggtgacatctagtgctgtttggtttcgttgccgggacggtaacatctacagttaatgctgcaatccattaacggaacggaggggaatggatagcgctcgtttatgagtggtttcattactgttataagactgtttcagcaacatttactaaatttcattctct

SEQ ID NO: 6389 - protein, 330 aa, Zea mays subsp. mays
  peptide (1)..(330): Ceres Seq. ID no. 12407730
  misc_feature (202)..(330): Homolog of NCBI NO: 38344824 NR Description: OSJNBa0064H22.5 [Oryza sativa (japonica
  misc_feature (202)..(330): Homolog of NCBI NO: 38344823 NR Description: OSJNBa0064H22.4 [Oryza sativa (japonica
  misc_feature (202)..(329): Homolog of NCBI NO: 38344822 NR Description: OSJNBa0064H22.3 [Oryza sativa (japonica
  misc_feature (202)..(321): Homolog of NCBI NO: 40781599 NR Description: reductase 1 [Hydrangea macrophylla]
  misc_feature (202)..(321): Homolog of NCBI NO: 27357979 NR Description: Putative NADPH-dependent oxidoreductase [Oryza
  misc_feature (202)..(321): Homolog of NCBI NO: 6478216 NR Description: putative NADPH-dependent oxidoreductase [Papaver
  misc_feature (202)..(321): Homolog of NCBI NO: 37530522 NR Description: putative NADPH-dependent oxidoreductase [Oryza
  misc_feature (202)..(321): Homolog of NCBI NO: 40781598 NR Description: reductase 2 [Hydrangea macrophylla]
  misc_feature (223)..(223): Xaa is any aa, unknown or other
MASAGTTAVVPEVALRSGNARTAMPMVGMGTASFPLVHEAVKDGRALRHRGGVPPLRHCLHVRHREAAGRRRGRGAPARDPAVPGGSVRDVQAVVLAEPPGPRAAVPPGNTQEPADGVRGSVPDPLAGVPETGAARAPDQEGERRAAGPRGCVARHGGVPAAGPRQGDRREQLHHQAPRRGPGRRHGPARGEPGGAEPGRGQQRTLRAYCADRGIHVAAYSPXEGQNWDGQGSAVLDSEVLAAIAKARGKTVAQVALRWIHEQGVTCIVKSYSKERLRQNLGIFDWELTDEERLKISQIPQRKVVQTSSLFSQEGEFTAVDPAELNILEE

SEQ ID NO: 6390 - protein, 307 aa, Zea mays subsp. mays
  peptide (1)..(307): Ceres Seq. ID no. 12407731
  misc_feature (179)..(307): Homolog of NCBI NO: 38344824 NR Description: OSJNBa0064H22.5 [Oryza sativa (japonica
  misc_feature (179)..(307): Homolog of NCBI NO: 38344823 NR Description: OSJNBa0064H22.4 [Oryza sativa (japonica
  misc_feature (179)..(306): Homolog of NCBI NO: 38344822 NR Description: OSJNBa0064H22.3 [Oryza sativa (japonica
  misc_feature (179)..(298): Homolog of NCBI NO: 40781599 NR Description: reductase 1 [Hydrangea macrophylla]
  misc_feature (179)..(298): Homolog of NCBI NO: 27357979 NR Description: Putative NADPH-dependent oxidoreductase [Oryza
  misc_feature (179)..(298): Homolog of NCBI NO: 6478216 NR Description: putative NADPH-dependent oxidoreductase [Papaver
  misc_feature (179)..(298): Homolog of NCBI NO: 37530522 NR Description: putative NADPH-dependent oxidoreductase [Oryza
  misc_feature (179)..(298): Homolog of NCBI NO: 40781598 NR Description: reductase 2 [Hydrangea macrophylla]
  misc_feature (200)..(200): Xaa is any aa, unknown or other
MPMVGMGTASFPLVHEAVKDGRALRHRGGVPPLRHCLHVRHREAAGRRRGRGAPARDPAVPGGSVRDVQAVVLAEPPGPRAAVPPGNTQEPADGVRGSVPDPLAGVPETGAARAPDQEGERRAAGPRGCVARHGGVPAAGPRQGDRREQLHHQAPRRGPGRRHGPARGEPGGAEPGRGQQRTLRAYCADRGIHVAAYSPXEGQNWDGQGSAVLDSEVLAAIAKARGKTVAQVALRWIHEQGVTCIVKSYSKERLRQNLGIFDWELTDEERLKISQIPQRKVVQTSSLFSQEGEFTAVDPAELNILEE

SEQ ID NO: 6391 - protein, 305 aa, Zea mays subsp. mays
  peptide (1)..(305): Ceres Seq. ID no. 12407732
  misc_feature (177)..(305): Homolog of NCBI NO: 38344824 NR Description: OSJNBa0064H22.5 [Oryza sativa (japonica
  misc_feature (177)..(305): Homolog of NCBI NO: 38344823 NR Description: OSJNBa0064H22.4 [Oryza sativa (japonica
  misc_feature (177)..(304): Homolog of NCBI NO: 38344822 NR Description: OSJNBa0064H22.3 [Oryza sativa (japonica
  misc_feature (177)..(296): Homolog of NCBI NO: 40781599 NR Description: reductase 1 [Hydrangea macrophylla]
  misc_feature (177)..(296): Homolog of NCBI NO: 27357979 NR Description: Putative NADPH-dependent oxidoreductase [Oryza
  misc_feature (177)..(296): Homolog of NCBI NO: 6478216 NR Description: putative NADPH-dependent oxidoreductase [Papaver
  misc_feature (177)..(296): Homolog of NCBI NO: 37530522 NR Description: putative NADPH-dependent oxidoreductase [Oryza
  misc_feature (177)..(296): Homolog of NCBI NO: 40781598 NR Description: reductase 2 [Hydrangea macrophylla]
  misc_feature (198)..(198): Xaa is any aa, unknown or other
MVGMGTASFPLVHEAVKDGRALRHRGGVPPLRHCLHVRHREAAGRRRGRGAPARDPAVPGGSVRDVQAVVLAEPPGPRAAVPPGNTQEPADGVRGSVPDPLAGVPETGAARAPDQEGERRAAGPRGCVARHGGVPAAGPRQGDRREQLHHQAPRRGPGRRHGPARGEPGGAEPGRGQQRTLRAYCADRGIHVAAYSPXEGQNWDGQGSAVLDSEVLAAIAKARGKTVAQVALRWIHEQGVTCIVKSYSKERLRQNLGIFDWELTDEERLKISQIPQRKVVQTSSLFSQEGEFTAVDPAELNILEE

SEQ ID NO: 6392 - DNA, 1101 bp, Zea mays subsp. mays
  misc_feature (1)..(1101): Ceres Seq. ID no. 12356388
  misc_feature: MA Experiment ID: 108522 Result: Up-regulated in Transcription
  misc_feature: MA Experiment 108522 PARAMETER Experiment Name: Zm_42deg_Heat_P Parameter: Age (day) Value: 8
  misc_feature: MA Experiment 108522 PARAMETER Experiment Name: Zm_42deg_Heat_P Parameter: Organism Value: Zea mays
  misc_feature: MA Experiment 108522 PARAMETER Experiment Name: Zm_42deg_Heat_P Parameter: Plant Line Value: 35A19
  misc_feature: MA Experiment 108522 PARAMETER Experiment Name: Zm_42deg_Heat_P Parameter: Temperature (deg C) Value: 42 vs. 22
  misc_feature: MA Experiment 108522 PARAMETER Experiment Name: Zm_42deg_Heat_P Parameter: Timepoint (hr) Value: 1
  misc_feature: MA Experiment 108522 PARAMETER Experiment Name: Zm_42deg_Heat_P Parameter: Tissue Value: Aerial
  misc_feature: MA Experiment ID: 108527 Result: Up-regulated in Transcription
  misc_feature: MA Experiment 108527 PARAMETER Experiment Name: Zm_5mM_NO_P Parameter: Age (day) Value: 8
  misc_feature: MA Experiment 108527 PARAMETER Experiment Name: Zm_5mM_NO_P Parameter: Organism Value: Zea mays
  misc_feature: MA Experiment 108527 PARAMETER Experiment Name: Zm_5mM_NO_P Parameter: Plant Line Value: 35A19
  misc_feature: MA Experiment 108527 PARAMETER Experiment Name: Zm_5mM_NO_P Parameter: Timepoint (hr) Value: 6
  misc_feature: MA Experiment 108527 PARAMETER Experiment Name: Zm_5mM_NO_P Parameter: Tissue Value: Aerial
  misc_feature: MA Experiment 108527 PARAMETER Experiment Name: Zm_5mM_NO_P Parameter: Treatment Value: 5mM NO vs. No Treatment
ctctcgcgtccccgtcttcctcttgtcgcctgcctctgcggctctgcctacctctctcgaagcttctcgctctcctgggtggccgtgtccagtctcccacgccaccgccccgaccgccggtaggtaataccagttccaagagcactcgacatggcggccgctaatgttggggaatcaacaagcggcggcggcagcagcagcagcagcggcgccgacgccgggggcggattcgagtgcaacatatgcttcgagctgccgcaggagccgatcgtgacgctgtgcgggcacctcttctgctggccgtgcctctacaagtggctgcgcatccactcgcactcgcccgagtgcccggtgtgcaaggccgtggtcgaggaggagaagctcgtgcccctgtacggccgcggcaaggaccgcgtcgacccgaggtccaagaacgtccccggggcggccgacatccccagccgtccggctgggcagaggccggccacggctccgcaggcggaccccaacaacgcccacttccccaacgccgccaacccggcgaacccgtggttcatgggcggcggcggcggaggcatcccgctggccaacgcgcgctgggggaactacaccttctcggcggcgttcggtgggctgttcccgctgctcagcttccaggtgcacgggttcccggacgccacggcctatggccagccagctgggttcccgtacgggtacggccacggccacgcttttcatggcgggcacgctggagcacatgcccacgccgcagctgcagctcctcgggcacgcgcagcaccagcagcagcaggcggatgtgtaccttaaggcgctgctcatcctagtcggcgttctggttatcgcgagcctcgtcacgttctagggcgtcgcctgttggtaggtgttcatcatattgttgctgccttgctggtaataaataagagagagagacagagacaacacgaccgaaactgaattattcagagcggtgcaatgtgttgatagaagggttgttgttgtacatgctgatacatgattgtatactgtggtctttgaacatacattattatcgaataataatctggaggctctgtttgaagt

SEQ ID NO: 6393 - protein, 225 aa, Zea mays subsp. mays
  peptide (1)..(225): Ceres Seq. ID no. 12356389
  misc_feature (29)..(69): Pfam Name: Zinc finger, C3HC4 type (RING finger) Pfam Description: Zinc finger, C3HC4 type (RING finger)
  misc_feature (3)..(212): Homolog of NCBI NO: 29150403 NR Description: unknown protein [Oryza sativa (japonica
  misc_feature (1)..(207): Homolog of NCBI NO: 34909840 NR Description: P0403C05.28 [Oryza sativa (japonica
  misc_feature (16)..(205): Homolog of NCBI NO: 18394721 NR Description: expressed protein; protein id: At1g19310.1, by cDNA: 1402., supported by cDNA: gi_16323201 [Arabidopsis
  misc_feature (7)..(197): Homolog of NCBI NO: 15224062 NR Description: putative RING zinc finger protein; protein id: supported by cDNA: 17402. [Arabidopsis thaliana]
  misc_feature (7)..(197): Homolog of NCBI NO: 21553849 NR Description: putative RING zinc finger protein [Arabidopsis
  misc_feature (22)..(114): Homolog of NCBI NO: 15222064 NR Description: putative RING zinc finger protein; protein id: supported by cDNA: 96683. [Arabidopsis thaliana]
  misc_feature (16)..(216): Homolog of NCBI NO: 17554742 NR Description: Ring finger protein RNF-5 (24.9 kD) (rnf-5) elegans] >gi|2501735|sp|Q09463|YQ57_CAEEL Hypothetical protein
  misc_feature (16)..(172): Homolog of NCBI NO: 21912604 NR Description: putative ubiquitin ligase [Taenia solium]
  misc_feature (18)..(221): Homolog of NCBI NO: 39581891 NR Description: Hypothetical protein CBG20152 [Caenorhabditis
  misc_feature (2)..(111): Homolog of NCBI NO: 31542783 NR Description: hypothetical protein FLJ38628 [Homo sapiens] Similar to CG8974 gene product [Homo sapiens]
MAAANVGESTSGGGSSSSSGADAGGGFECNICFELPQEPIVTLCGHLFCWPCLYKWLRIHSHSPECPVCKAVVEEEKLVPLYGRGKDRVDPRSKNVPGAADIPSRPAGQRPATAPQADPNNAHFPNAANPANPWFMGGGGGGIPLANARWGNYTFSAAFGGLFPLLSFQVHGFPDATAYGQPAGFPYGYGHGHAFHGGHAGAHAHAAAAAPRARAAPAAAGGCVP

SEQ ID NO: 6394 - protein, 200 aa, Zea mays subsp. mays
  peptide (1)..(200): Ceres Seq. ID no. 12356390
MLRAAAGADRDAVRAPLLLAVPLQVAAHPLALARVPGVQGRGRGGEARAPVRPRQGPRRPEVQERPRGGRHPQPSGWAEAGHGSAGGPQQRPLPQRRQPGEPVVHGRRRRRHPAGQRALGELHLLGGVRWAVPAAQLPGARVPGRHGLWPASWVPVRVRPRPRFSWRARWSTCPRRSCSSSGTRSTSSSRRMCTLRRCSS

SEQ ID NO: 6395 - DNA, 781 bp, Zea mays subsp. mays
  misc_feature (1)..(781): Ceres Seq. ID no. 12401310
  misc_feature: MA Experiment ID: 108526 Result: Up-regulated in Transcription
  misc_feature: MA Experiment 108526 PARAMETER Experiment Name: Zm_5mM_NO_P Parameter: Age (day) Value: 8
  misc_feature: MA Experiment 108526 PARAMETER Experiment Name: Zm_5mM_NO_P Parameter: Organism Value: Zea mays
  misc_feature: MA Experiment 108526 PARAMETER Experiment Name: Zm_5mM_NO_P Parameter: Plant Line Value: 35A19
  misc_feature: MA Experiment 108526 PARAMETER Experiment Name: Zm_5mM_NO_P Parameter: Timepoint (hr) Value: 1
  misc_feature: MA Experiment 108526 PARAMETER Experiment Name: Zm_5mM_NO_P Parameter: Tissue Value: Aerial
  misc_feature: MA Experiment 108526 PARAMETER Experiment Name: Zm_5mM_NO_P Parameter: Treatment Value: 5mM NO vs. No Treatment
  misc_feature: MA Experiment ID: 108527 Result: Up-regulated in Transcription
  misc_feature: MA Experiment 108527 PARAMETER Experiment Name: Zm_5mM_NO_P Parameter: Age (day) Value: 8
  misc_feature: MA Experiment 108527 PARAMETER Experiment Name: Zm_5mM_NO_P Parameter: Organism Value: Zea mays
  misc_feature: MA Experiment 108527 PARAMETER Experiment Name: Zm_5mM_NO_P Parameter: Plant Line Value: 35A19
  misc_feature: MA Experiment 108527 PARAMETER Experiment Name: Zm_5mM_NO_P Parameter: Timepoint (hr) Value: 6
  misc_feature: MA Experiment 108527 PARAMETER Experiment Name: Zm_5mM_NO_P Parameter: Tissue Value: Aerial
  misc_feature: MA Experiment 108527 PARAMETER Experiment Name: Zm_5mM_NO_P Parameter: Treatment Value: 5mM NO vs. No Treatment
  misc_feature: MA Experiment ID: 108534 Result: Up-regulated in Transcription
  misc_feature: MA Experiment 108534 PARAMETER Experiment Name: Zm_4deg_Cold_P Parameter: Age (hr) Value: 8
  misc_feature: MA Experiment 108534 PARAMETER Experiment Name: Zm_4deg_Cold_P Parameter: Organism Value: Zea mays
  misc_feature: MA Experiment 108534 PARAMETER Experiment Name: Zm_4deg_Cold_P Parameter: Plant Line Value: 35A19
  misc_feature: MA Experiment 108534 PARAMETER Experiment Name: Zm_4deg_Cold_P Parameter: Temperature (deg C) Value: 4 vs. 22
  misc_feature: MA Experiment 108534 PARAMETER Experiment Name: Zm_4deg_Cold_P Parameter: Timepoint (hr) Value: 6
  misc_feature: MA Experiment 108534 PARAMETER Experiment Name: Zm_4deg_Cold_P Parameter: Tissue Value: Aerial
  misc_feature: MA Experiment ID: 108544 Result: Down-regulated in Transcription
  misc_feature: MA Experiment ID: 108546 Result: Up-regulated in Transcription
  misc_feature: MA Experiment 108546 PARAMETER Experiment Name: Zm_Imbibed_Seeds_P Parameter: Age (day) Value: 3 vs. 2
  misc_feature: MA Experiment 108546 PARAMETER Experiment Name: Zm_Imbibed_Seeds_P Parameter: Organism Value: Zea mays
  misc_feature: MA Experiment 108546 PARAMETER Experiment Name: Zm_Imbibed_Seeds_P Parameter: Plant Line Value: 35A19
  misc_feature: MA Experiment 108546 PARAMETER Experiment Name: Zm_Imbibed_Seeds_P Parameter: Tissue Value: Roots vs. Embryo
  misc_feature: MA Experiment ID: 108559 Result: Up-regulated in Transcription
  misc_feature: MA Experiment 108559 PARAMETER Experiment Name: Zm_5mM_NO_P Parameter: Age (day) Value: 8
  misc_feature: MA Experiment 108559 PARAMETER Experiment Name: Zm_5mM_NO_P Parameter: Organism Value: Zea mays
  misc_feature: MA Experiment 108559 PARAMETER Experiment Name: Zm_5mM_NO_P Parameter: Plant Line Value: 35A19
  misc_feature: MA Experiment 108559 PARAMETER Experiment Name: Zm_5mM_NO_P Parameter: Timepoint (hr) Value: 12
  misc_feature: MA Experiment 108559 PARAMETER Experiment Name: Zm_5mM_NO_P Parameter: Tissue Value: Aerial
  misc_feature: MA Experiment 108559 PARAMETER Experiment Name: Zm_5mM_NO_P Parameter: Treatment Value: 5mM NO vs. No Treatment
  misc_feature: MA Experiment ID: 108688 Result: Down-regulated in Transcription
  misc_feature: MA Experiment 108688 PARAMETER Experiment Name: Zm_Embryos-Flowers__P Parameter: Tissue Value: Immature Flowers vs. Aerial+
  misc_feature: MA Experiment ID: 20000480 Result: Down-regulated in Transcription
  misc_feature: MA Experiment 20000480 PARAMETER Experiment Name: Zm_Drought_P Parameter: Age (day) Value: 11
  misc_feature: MA Experiment 20000480 PARAMETER Experiment Name: Zm_Drought_P Parameter: Organism Value: Zea mays
  misc_feature: MA Experiment 20000480 PARAMETER Experiment Name: Zm_Drought_P Parameter: Plant Line Value: 35A19
  misc_feature: MA Experiment 20000480 PARAMETER Experiment Name: Zm_Drought_P Parameter: Timepoint (hr) Value: 72
  misc_feature: MA Experiment 20000480 PARAMETER Experiment Name: Zm_Drought_P Parameter: Tissue Value: Aerial
  misc_feature: MA Experiment 20000480 PARAMETER Experiment Name: Zm_Drought_P Parameter: Treatment Value: Drought vs. No Drought
  misc_feature: MA Experiment ID: 20000626 Result: Up-regulated in Transcription
  misc_feature: MA Experiment 20000626 PARAMETER Experiment Name: Zm_Herbicide-Treatments_P Parameter: Timepoint (hr) Value: 12
  misc_feature: MA Experiment 20000626 PARAMETER Experiment Name: Zm_Herbicide-Treatments_P Parameter: Tissue Value: Aerial
  misc_feature: MA Experiment 20000626 PARAMETER Experiment Name: Zm_Herbicide-Treatments_P Parameter: Treatment Value: Roundup vs. No Treatment
  misc_feature: MA Experiment ID: 20001608 Result: Down-regulated in Transcription
  misc_feature: MA Experiment 20001608 PARAMETER Experiment Name: Zm_50ppm_KNO3_L-to-H_P Parameter: Age (day) Value: 21
  misc_feature: MA Experiment 20001608 PARAMETER Experiment Name: Zm_50ppm_KNO3_L-to-H_P Parameter: Organism Value: Zea mays
  misc_feature: MA Experiment 20001608 PARAMETER Experiment Name: Zm_50ppm_KNO3_L-to-H_P Parameter: Plant Line Value: 35A19
  misc_feature: MA Experiment 20001608 PARAMETER Experiment Name: Zm_50ppm_KNO3_L-to-H_P Parameter: Timepoint (hr) Value: 48
  misc_feature: MA Experiment 20001608 PARAMETER Experiment Name: Zm_50ppm_KNO3_L-to-H_P Parameter: Tissue Value: Shoots
  misc_feature: MA Experiment 20001608 PARAMETER Experiment Name: Zm_50ppm_KNO3_L-to-H_P Parameter: Treatment Value: 50ppm KNO3 vs. 50ppm KCl
agcacaagccgcaccgcaattagccgcgaccctccgcagaatcggctcacgtttccgatccagaggtccagactgttccccgagttttcctcgcgagtcccggcgaaccgcgaacatgtgccccactggaaggtacctggggctcgacctctccggcgctggcggcgacctgaggccggcgttcgacgtgcttgacgcggaccgggacggccgcatcagccgggacgacctcaagtccttctacgccgccgcggggcccgccgccggcgaccgggttcgacgacgacgacctcgcggccatgatcgcggccgccgacgccgaccgcgacggcttcgtgcagtacgacgagttcgagcgcctgctggccggccgcgccgcggcggccgccgccgcgggaggcgctgggcgccgctccgccatggagggcgccttccggctcatggaccgggacggggacggcatggtcggcttccaggacctcaaggcctacctcgactgggccgggatgcccgcggcggacgaggaggtccgcgccatgatccgcgtcgctggcggaggggacggcggtgaaggcgtggggctcgaggcgctagccggagtgctcgcggtcgacctggaaggcatcgccttttgattttgagagatccatggggatgttgtgcggagtactgtattctttttcttggggttttcggttggtgagcgtggtgcgttgtctgtcgattgtctgtggttgactggggttcacgaggaccattcaaaacgagataaaaagttcgc

SEQ ID NO: 6396 - protein, 189 aa, Zea mays subsp. mays
  peptide (1)..(189): Ceres Seq. ID no. 12401311
  misc_feature (56)..(82): Pfam Name: EF hand Pfam Description: EF hand
  misc_feature (39)..(92): Homolog of NCBI NO: 5702231 NR Description: hypersensitive reaction associated Ca2+-binding
  misc_feature (39)..(82): Homolog of NCBI NO: 15239904 NR Description: NaCl-inducible Ca2+-binding protein-like; protein id: At5g49480.1, supported by cDNA: gi_13358217, by cDNA: gi_14190412, supported by cDNA: gi_15450552, supported
  misc_feature (39)..(82): Homolog of NCBI NO: 2352828 NR Description: NaCl-inducible Ca2+-binding protein [Arabidopsis
AQAAPQLAATLRRIGSRFRSRGPDCSPSFPRESRRTANMCPTGRYLGLDLSGAGGDLRPAFDVLDADRDGRISRDDLKSFYAAAGPAAGDRVRRRRPRGHDRGRRRRPRRLRAVRRVRAPAGRPRRGGRRRGRRWAPLRHGGRLPAHGPGRGRHGRLPGPQGLPRLGRDARGGRGGPRHDPRRWRRGRR

SEQ ID NO: 6397 - protein, 151 aa, Zea mays subsp. mays
  peptide (1)..(151): Ceres Seq. ID no. 12401312
  misc_feature (18)..(44): Pfam Name: EF hand Pfam Description: EF hand
  misc_feature (1)..(54): Homolog of NCBI NO: 5702231 NR Description: hypersensitive reaction associated Ca2+-binding
  misc_feature (1)..(44): Homolog of NCBI NO: 15239904 NR Description: NaCl-inducible Ca2+-binding protein-like; protein id: At5g49480.1, supported by cDNA: gi_13358217, by cDNA: gi_14190412, supported by cDNA: gi_15450552, supported
  misc_feature (1)..(44): Homolog of NCBI NO: 2352828 NR Description: NaCl-inducible Ca2+-binding protein [Arabidopsis
MCPTGRYLGLDLSGAGGDLRPAFDVLDADRDGRISRDDLKSFYAAAGPAAGDRVRRRRPRGHDRGRRRRPRRLRAVRRVRAPAGRPRRGGRRRGRRWAPLRHGGRLPAHGPGRGRHGRLPGPQGLPRLGRDARGGRGGPRHDPRRWRRGRR

SEQ ID NO: 6398 - protein, 111 aa, Zea mays subsp. mays
  peptide (1)..(111): Ceres Seq. ID no. 12401313
  misc_feature (1)..(105): Homolog of NCBI NO: 5702231 NR Description: hypersensitive reaction associated Ca2+-binding
  misc_feature (1)..(98): Homolog of NCBI NO: 15239904 NR Description: NaCl-inducible Ca2+-binding protein-like; protein id: At5g49480.1, supported by cDNA: gi_13358217, by cDNA: gi_14190412, supported by cDNA: gi_15450552, supported
  misc_feature (1)..(99): Homolog of NCBI NO: 2352828 NR Description: NaCl-inducible Ca2+-binding protein [Arabidopsis
  misc_feature (1)..(89): Homolog of NCBI NO: 19386815 NR Description: B1147A04.10 [Oryza sativa (japonica
  misc_feature (1)..(89): Homolog of NCBI NO: 15991282 NR Description: Calmodulin-2 [Oryza sativa (japonica
  misc_feature (1)..(103): Homolog of NCBI NO: 8393159 NR Description: calmodulin-like skin protein [Homo sapiens]
  misc_feature (1)..(103): Homolog of NCBI NO: 24657605 NR Description: calmodulin-like skin protein [Homo sapiens]
MIAAADADRDGFVQYDEFERLLAGRAAAAAAAGGAGRRSAMEGAFRLMDRDGDGMVGFQDLKAYLDWAGMPAADEEVRAMIRVAGGGDGGEGVGLEALAGVLAVDLEGIAF

SEQ ID NO: 6399 - DNA, 1322 bp, Zea mays subsp. mays
  misc_feature (1)..(1322): Ceres Seq. ID no. 13491098
  misc_feature: MA Experiment ID: 108523 Result: Down-regulated in Transcription
  misc_feature: MA Experiment 108523 PARAMETER Experiment Name: Zm_42deg_Heat_P Parameter: Age (day) Value: 8
  misc_feature: MA Experiment 108523 PARAMETER Experiment Name: Zm_42deg_Heat_P Parameter: Organism Value: Zea mays
  misc_feature: MA Experiment 108523 PARAMETER Experiment Name: Zm_42deg_Heat_P Parameter: Plant Line Value: 35A19
  misc_feature: MA Experiment 108523 PARAMETER Experiment Name: Zm_42deg_Heat_P Parameter: Temperature (deg C) Value: 42 vs. 22
  misc_feature: MA Experiment 108523 PARAMETER Experiment Name: Zm_42deg_Heat_P Parameter: Timepoint (hr) Value: 6
  misc_feature: MA Experiment 108523 PARAMETER Experiment Name: Zm_42deg_Heat_P Parameter: Tissue Value: Aerial
  misc_feature: MA Experiment ID: 108527 Result: Down-regulated in Transcription
  misc_feature: MA Experiment 108527 PARAMETER Experiment Name: Zm_5mM_NO_P Parameter: Age (day) Value: 8
  misc_feature: MA Experiment 108527 PARAMETER Experiment Name: Zm_5mM_NO_P Parameter: Organism Value: Zea mays
  misc_feature: MA Experiment 108527 PARAMETER Experiment Name: Zm_5mM_NO_P Parameter: Plant Line Value: 35A19
  misc_feature: MA Experiment 108527 PARAMETER Experiment Name: Zm_5mM_NO_P Parameter: Timepoint (hr) Value: 6
  misc_feature: MA Experiment 108527 PARAMETER Experiment Name: Zm_5mM_NO_P Parameter: Tissue Value: Aerial
  misc_feature: MA Experiment 108527 PARAMETER Experiment Name: Zm_5mM_NO_P Parameter: Treatment Value: 5mM NO vs. No Treatment
  misc_feature: MA Experiment ID: 108528 Result: Up-regulated in Transcription
  misc_feature: MA Experiment 108528 PARAMETER Experiment Name: Zm_Imbibed_Seeds_P Parameter: Age (day) Value: 5 vs. 2
  misc_feature: MA Experiment 108528 PARAMETER Experiment Name: Zm_Imbibed_Seeds_P Parameter: Organism Value: Zea mays
  misc_feature: MA Experiment 108528 PARAMETER Experiment Name: Zm_Imbibed_Seeds_P Parameter: Plant Line Value: 35A19
  misc_feature: MA Experiment 108528 PARAMETER Experiment Name: Zm_Imbibed_Seeds_P Parameter: Tissue Value: Aerial vs. Embryo
  misc_feature: MA Experiment ID: 108530 Result: Up-regulated in Transcription
  misc_feature: MA Experiment 108530 PARAMETER Experiment Name: Zm_Imbibed_Seeds_P Parameter: Age (day) Value: 6 vs. 2
  misc_feature: MA Experiment 108530 PARAMETER Experiment Name: Zm_Imbibed_Seeds_P Parameter: Organism Value: Zea mays
  misc_feature: MA Experiment 108530 PARAMETER Experiment Name: Zm_Imbibed_Seeds_P Parameter: Plant Line Value: 35A19
  misc_feature: MA Experiment 108530 PARAMETER Experiment Name: Zm_Imbibed_Seeds_P Parameter: Tissue Value: Aerial vs. Embryo
  misc_feature: MA Experiment ID: 108536 Result: Down-regulated in Transcription
  misc_feature: MA Experiment 108536 PARAMETER Experiment Name: Zm_Meristem_P Parameter: Age (day) Value: 8
  misc_feature: MA Experiment 108536 PARAMETER Experiment Name: Zm_Meristem_P Parameter: Organism Value: Zea mays
  misc_feature: MA Experiment 108536 PARAMETER Experiment Name: Zm_Meristem_P Parameter: Plant Line Value: 35A19
  misc_feature: MA Experiment 108536 PARAMETER Experiment Name: Zm_Meristem_P Parameter: Tissue Value: Shoot Meristem vs. Above Shoot Meristem
  misc_feature: MA Experiment ID: 108544 Result: Up-regulated in Transcription
  misc_feature: MA Experiment ID: 108545 Result: Up-regulated in Transcription
  misc_feature: MA Experiment 108545 PARAMETER Experiment Name: Zm_Imbibed_Seeds_P Parameter: Age (day) Value: 3 vs. 2
  misc_feature: MA Experiment 108545 PARAMETER Experiment Name: Zm_Imbibed_Seeds_P Parameter: Organism Value: Zea mays
  misc_feature: MA Experiment 108545 PARAMETER Experiment Name: Zm_Imbibed_Seeds_P Parameter: Plant Line Value: 35A19
  misc_feature: MA Experiment 108545 PARAMETER Experiment Name: Zm_Imbibed_Seeds_P Parameter: Tissue Value: Aerial vs. Embryo
  misc_feature: MA Experiment ID: 108547 Result: Up-regulated in Transcription
  misc_feature: MA Experiment 108547 PARAMETER Experiment Name: Zm_Imbibed_Seeds_P Parameter: Age (day) Value: 4 vs. 2
  misc_feature: MA Experiment 108547 PARAMETER Experiment Name: Zm_Imbibed_Seeds_P Parameter: Organism Value: Zea mays
  misc_feature: MA Experiment 108547 PARAMETER Experiment Name: Zm_Imbibed_Seeds_P Parameter: Plant Line Value: 35A19
  misc_feature: MA Experiment 108547 PARAMETER Experiment Name: Zm_Imbibed_Seeds_P Parameter: Tissue Value: Aerial vs. Embryo
  misc_feature: MA Experiment ID: 108559 Result: Down-regulated in Transcription
  misc_feature: MA Experiment 108559 PARAMETER Experiment Name: Zm_5mM_NO_P Parameter: Age (day) Value: 8
  misc_feature: MA Experiment 108559 PARAMETER Experiment Name: Zm_5mM_NO_P Parameter: Organism Value: Zea mays
  misc_feature: MA Experiment 108559 PARAMETER Experiment Name: Zm_5mM_NO_P Parameter: Plant Line Value: 35A19
  misc_feature: MA Experiment 108559 PARAMETER Experiment Name: Zm_5mM_NO_P Parameter: Timepoint (hr) Value: 12
  misc_feature: MA Experiment 108559 PARAMETER Experiment Name: Zm_5mM_NO_P Parameter: Tissue Value: Aerial
  misc_feature: MA Experiment 108559 PARAMETER Experiment Name: Zm_5mM_NO_P Parameter: Treatment Value: 5mM NO vs. No Treatment
  misc_feature: MA Experiment ID: 108687 Result: Down-regulated in Transcription
  misc_feature: MA Experiment 108687 PARAMETER Experiment Name: Zm_Embryos-Flowers__P Parameter: Tissue Value: Embryo vs. Aerial+
  misc_feature: MA Experiment ID: 108688 Result: Down-regulated in Transcription
  misc_feature: MA Experiment 108688 PARAMETER Experiment Name: Zm_Embryos-Flowers__P Parameter: Tissue Value: Immature Flowers vs. Aerial+
  misc_feature: MA Experiment ID: 20000480 Result: Down-regulated in Transcription
  misc_feature: MA Experiment 20000480 PARAMETER Experiment Name: Zm_Drought_P Parameter: Age (day) Value: 11
  misc_feature: MA Experiment 20000480 PARAMETER Experiment Name: Zm_Drought_P Parameter: Organism Value: Zea mays
  misc_feature: MA Experiment 20000480 PARAMETER Experiment Name: Zm_Drought_P Parameter: Plant Line Value: 35A19
  misc_feature: MA Experiment 20000480 PARAMETER Experiment Name: Zm_Drought_P Parameter: Timepoint (hr) Value: 72
  misc_feature: MA Experiment 20000480 PARAMETER Experiment Name: Zm_Drought_P Parameter: Tissue Value: Aerial
  misc_feature: MA Experiment 20000480 PARAMETER Experiment Name: Zm_Drought_P Parameter: Treatment Value: Drought vs. No Drought
atcgcaaaaaccccaatccatccaaacccatttccctcgctcccatcccgtcccgccccttgtctcttccgcttccccccgaccccgcgcgccgcggaccagcagccatgtcgtgctcccacctctccaccgcctggtcctcctcggcgctcgccagcagcgcctccaccacccgacggcgctcccccccgcgctcgggtctcctggtgcggtgttccctccgtgagctccgcacccgcatcgactccgtcaggaacacgcagaagatcacggaggccatgaagctggtggccgccgccaaggtccggcgcgcgcaggaggccgtcgtctcctctcgccctttctcggaggcgctggtggaggtgctcctacaacatgaaccaggagatccagacggaggacatcgacctgcccctcacccgcacccgccccgtcaagaaggtggccctcgtggtcctgaccggcgagcgcggcctctgcgggagcttcaacaacaacgtgctcaagaaggcggaaacccgcatcgatgagctcaagcagctgggcctccagtacaccgtcgtcagcgtggggaagaagggcaacgcctacttccagcgccgcccctacatcccgttggagcgcgatctagaggtgagcagcgtgcccaccgtcaaggactcgcaggccatctgcgacctcgtctactcgctcttcgtctccgaggaggtggacaaggtggagctgctctactccaagttcgtgtcgctggtgcgctccgaccccatcatccagacgctgctccccatgtcgcccaagggcgagatctgcgacgtcaacggcgtctgcgtggacgccaccgaggacgagctcttccgcctcaccaccaaggaggggaagctcaccgtggagcgcgagaaggtgaagatcgagacgcagcccttctcccccgtggtgcagttcgagcaggaccccgtgcagatcctggacgcgctgctcccgctctacctcaacagccagatcctccgtgccctgcaggagtcgctcgccagcgagctcgccgcccggatgagcgccatgagcagcgccaccgacaacgccatcgagctccgcaagaacctctccatcgcctacaaccgacagcgccaggccaagatcaccggggagatcctcgagatcgtcgccggtgccgacgccctcgctggctgagcctgagtccccttggtggtgcggtgctcctgctatatataattctttttcctcattttctccactctgcctgtaattcctgataatagcaaacacaacggagttctgtgttccttgcgacacacaagaatttc

SEQ ID NO: 6400 - protein, 270 aa, Zea mays subsp. mays
  peptide (1)..(270): Ceres Seq. ID no. 13491099
  misc_feature (1)..(268): Pfam Name: ATP synthase Pfam Description: ATP synthase
  misc_feature (1)..(269): Homolog of NCBI NO: 27818005 NR Description: putative ATP synthase gamma-subunit [Oryza sativa
  misc_feature (1)..(267): Homolog of NCBI NO: 18412632 NR Description: ATP synthase gamma chain 1, chloroplast
  misc_feature (1)..(268): Homolog of NCBI NO: 231610 NR Description: ATP synthase gamma chain, chloroplast precursor
  misc_feature (1)..(267): Homolog of NCBI NO: 114643 NR Description: ATP synthase gamma chain, chloroplast precursor
  misc_feature (1)..(267): Homolog of NCBI NO: 755801 NR Description: ATP synthase [Spinacia oleracea]
  misc_feature (1)..(264): Homolog of NCBI NO: 114640 NR Description: ATP synthase gamma chain, chloroplast precursor
  misc_feature (1)..(267): Homolog of NCBI NO: 5708095 NR Description: ATP synthase gamma chain, chloroplast precursor
  misc_feature (1)..(268): Homolog of NCBI NO: 15218281 NR Description: ATP synthase gamma-subunit -related [Arabidopsis >gi|461551|sp|Q01909|ATP2_ARATH ATP synthase gamma chain 2,
  misc_feature (1)..(270): Homolog of NCBI NO: 114638 NR Description: ATP synthase gamma chain, chloroplast precursor
  misc_feature (1)..(270): Homolog of NCBI NO: 228698 NR Description: CF1 ATP synthase:SUBUNIT=gamma
MNQEIQTEDIDLPLTRTRPVKKVALVVLTGERGLCGSFNNNVLKKAETRIDELKQLGLQYTVVSVGKKGNAYFQRRPYIPLERDLEVSSVPTVKDSQAICDLVYSLFVSEEVDKVELLYSKFVSLVRSDPIIQTLLPMSPKGEICDVNGVCVDATEDELFRLTTKEGKLTVEREKVKIETQPFSPVVQFEQDPVQILDALLPLYLNSQILRALQESLASELAARMSAMSSATDNAIELRKNLSIAYNRQRQAKITGEILEIVAGADALAG

SEQ ID NO: 6401 - protein, 175 aa, Zea mays subsp. mays
  peptide (1)..(175): Ceres Seq. ID no. 13491100
  misc_feature (71)..(122): Pfam Name: ATP synthase Pfam Description: ATP synthase
  misc_feature (36)..(122): Homolog of NCBI NO: 27818005 NR Description: putative ATP synthase gamma-subunit [Oryza sativa
  misc_feature (36)..(122): Homolog of NCBI NO: 18412632 NR Description: ATP synthase gamma chain 1, chloroplast
  misc_feature (33)..(122): Homolog of NCBI NO: 231610 NR Description: ATP synthase gamma chain, chloroplast precursor
  misc_feature (36)..(122): Homolog of NCBI NO: 114643 NR Description: ATP synthase gamma chain, chloroplast precursor
  misc_feature (69)..(122): Homolog of NCBI NO: 755801 NR Description: ATP synthase [Spinacia oleracea]
  misc_feature (33)..(122): Homolog of NCBI NO: 114640 NR Description: ATP synthase gamma chain, chloroplast precursor
  misc_feature (93)..(122): Homolog of NCBI NO: 5708095 NR Description: ATP synthase gamma chain, chloroplast precursor
  misc_feature (60)..(122): Homolog of NCBI NO: 15218281 NR Description: ATP synthase gamma-subunit -related [Arabidopsis >gi|461551|sp|Q01909|ATP2_ARATH ATP synthase gamma chain 2,
  misc_feature (64)..(122): Homolog of NCBI NO: 114638 NR Description: ATP synthase gamma chain, chloroplast precursor
  misc_feature (64)..(122): Homolog of NCBI NO: 228698 NR Description: CF1 ATP synthase:SUBUNIT=gamma
RKNPNPSKPISLAPIPSRPLSLPLPPDPARRGPAAMSCSHLSTAWSSSALASSASTTRRRSPPRSGLLVRCSLRELRTRIDSVRNTQKITEAMKLVAAAKVRRAQEAVVSSRPFSEALVEVLLQHEPGDPDGGHRPAPHPHPPRQEGGPRGPDRRARPLRELQQQRAQEGGNPHR

SEQ ID NO: 6402 - protein, 140 aa, Zea mays subsp. mays
  peptide (1)..(140): Ceres Seq. ID no. 13491101
  misc_feature (36)..(87): Pfam Name: ATP synthase Pfam Description: ATP synthase
  misc_feature (1)..(87): Homolog of NCBI NO: 27818005 NR Description: putative ATP synthase gamma-subunit [Oryza sativa
  misc_feature (1)..(87): Homolog of NCBI NO: 18412632 NR Description: ATP synthase gamma chain 1, chloroplast
  misc_feature (1)..(87): Homolog of NCBI NO: 231610 NR Description: ATP synthase gamma chain, chloroplast precursor
  misc_feature (1)..(87): Homolog of NCBI NO: 114643 NR Description: ATP synthase gamma chain, chloroplast precursor
  misc_feature (34)..(87): Homolog of NCBI NO: 755801 NR Description: ATP synthase [Spinacia oleracea]
  misc_feature (1)..(87): Homolog of NCBI NO: 114640 NR Description: ATP synthase gamma chain, chloroplast precursor
  misc_feature (58)..(87): Homolog of NCBI NO: 5708095 NR Description: ATP synthase gamma chain, chloroplast precursor
  misc_feature (25)..(87): Homolog of NCBI NO: 15218281 NR Description: ATP synthase gamma-subunit -related [Arabidopsis >gi|461551|sp|Q01909|ATP2_ARATH ATP synthase gamma chain 2,
  misc_feature (29)..(87): Homolog of NCBI NO: 114638 NR Description: ATP synthase gamma chain, chloroplast precursor
  misc_feature (29)..(87): Homolog of NCBI NO: 228698 NR Description: CF1 ATP synthase:SUBUNIT=gamma
MSCSHLSTAWSSSALASSASTTRRRSPPRSGLLVRCSLRELRTRIDSVRNTQKITEAMKLVAAAKVRRAQEAVVSSRPFSEALVEVLLQHEPGDPDGGHRPAPHPHPPRQEGGPRGPDRRARPLRELQQQRAQEGGNPHR

SEQ ID NO: 6403 - DNA, 1127 bp, Zea mays subsp. mays
  misc_feature (1)..(1127): Ceres Seq. ID no. 13492997
  misc_feature: MA Experiment ID: 20000480 Result: Down-regulated in Transcription
  misc_feature: MA Experiment 20000480 PARAMETER Experiment Name: Zm_Drought_P Parameter: Age (day) Value: 11
  misc_feature: MA Experiment 20000480 PARAMETER Experiment Name: Zm_Drought_P Parameter: Organism Value: Zea mays
  misc_feature: MA Experiment 20000480 PARAMETER Experiment Name: Zm_Drought_P Parameter: Plant Line Value: 35A19
  misc_feature: MA Experiment 20000480 PARAMETER Experiment Name: Zm_Drought_P Parameter: Timepoint (hr) Value: 72
  misc_feature: MA Experiment 20000480 PARAMETER Experiment Name: Zm_Drought_P Parameter: Tissue Value: Aerial
  misc_feature: MA Experiment 20000480 PARAMETER Experiment Name: Zm_Drought_P Parameter: Treatment Value: Drought vs. No Drought
gcaaccgaacgaacaaggctagaagctagctagccaagttattagctactacatactagtggccggccggacacgatcgatgggaaggccgccgtgctgcgacagggcgggggttaagaaggggccatggacgccggaggaggacatcgtcctggtgtcctacgtccaggagcacggccccggcaactggcgcgccgtgcccgtcagcacgggcctcatgcgctgcagcaagagctgccgcctccgctggaccaactacctccgccccggcatccggcgcggcaacttcacaccccacgaggaaggcatcatcgtccacctccaggccttgctaggcaacagatgggcggccattgcttcttacctcccacagagaaccgacaacgacatcaagaactactggaacacccacctcaagaagaagctccggaagcagcaagccatcggcgccatcttagcgccacctcccccctccgaacccaccgccggccatgccgattgccatcacgacatgacccgctcctccaaggacagccacgcttgcctggccgacagcacaccagcggctgatgaggtcgtcacccagctcatcgcccagcagttcgccgccaccgacggtgacacctcgtcgtcgtcgtcgtactcgtacgcctccagcacggacaacatctccaagctgctcaacggcttcatgaagagcgcctcgccggcgcgggacgacgctaccgacaccatcaagacttcctcggccattgacatcgaccctttcgaccacaagtccggcggggcactactaccaccacccaagaagcggcagcagcagcagcagcatctgtcctccatagagaactggttgttcgacgatgccactgagcaggtcgttgtccagctgatggaggagatctccggcggctcttgctcagttcccatgctgctttattagcaccaagaaaaagaagcgaacatgcatgatagccgatcgatagatgtgacttggataggagaatgaatgtgtgcatgggtgcaagttacccagctgataggagaattttatatgcacccatgcatgtttggttttatttacacaagcatgagccatgagacaagaacaatatatatgcatagtt

SEQ ID NO: 6404 - protein, 287 aa, Zea mays subsp. mays
  peptide (1)..(287): Ceres Seq. ID no. 15222896
  misc_feature (14)..(61): Pfam Name: Myb-like DNA-binding domain Pfam Description: Myb-like DNA-binding domain
  misc_feature (1)..(116): Homolog of NCBI NO: 7438331 NR Description: myb protein homolog - rice
  misc_feature (148)..(211): Homolog of NCBI NO: 7438331 NR Description: myb protein homolog - rice
  misc_feature (1)..(234): Homolog of NCBI NO: 2129775 NR Description: myb-related protein Y13 - Arabidopsis thaliana cY13 [Arabidopsis thaliana] >gi|928965|emb|CAA62031.1| Y13
  misc_feature (1)..(234): Homolog of NCBI NO: 15221336 NR Description: myb family transcription factor [Arabidopsis
  misc_feature (1)..(218): Homolog of NCBI NO: 15228529 NR Description: myb family transcription factor [Arabidopsis
  misc_feature (1)..(218): Homolog of NCBI NO: 11273960 NR Description: myb-related transcription factor MYB30 [imported] Arabidopsis thaliana >gi|3941438|gb|AAC83595.1| putative
  misc_feature (1)..(121): Homolog of NCBI NO: 11358548 NR Description: myb-related transcription factor MYB60 [imported] Arabidopsis thaliana >gi|3941482|gb|AAC83617.1| putative
  misc_feature (1)..(121): Homolog of NCBI NO: 15223917 NR Description: myb family transcription factor [Arabidopsis
  misc_feature (1)..(212): Homolog of NCBI NO: 18071376 NR Description: putative transcription factor [Oryza sativa]
  misc_feature (1)..(212): Homolog of NCBI NO: 19072762 NR Description: typical P-type R2R3 Myb protein [Oryza sativa]
MGRPPCCDRAGVKKGPWTPEEDIVLVSYVQEHGPGNWRAVPVSTGLMRCSKSCRLRWTNYLRPGIRRGNFTPHEEGIIVHLQALLGNRWAAIASYLPQRTDNDIKNYWNTHLKKKLRKQQAIGAILAPPPPSEPTAGHADCHHDMTRSSKDSHACLADSTPAADEVVTQLIAQQFAATDGDTSSSSSYSYASSTDNISKLLNGFMKSASPARDDATDTIKTSSAIDIDPFDHKSGGALLPPPKKRQQQQQHLSSIENWLFDDATEQVVVQLMEEISGGSCSVPMLLY

SEQ ID NO: 6405 - protein, 241 aa, Zea mays subsp. mays
  peptide (1)..(241): Ceres Seq. ID no. 15222897
  misc_feature (1)..(70): Homolog of NCBI NO: 7438331 NR Description: myb protein homolog - rice
  misc_feature (102)..(165): Homolog of NCBI NO: 7438331 NR Description: myb protein homolog - rice
  misc_feature (1)..(188): Homolog of NCBI NO: 2129775 NR Description: myb-related protein Y13 - Arabidopsis thaliana cY13 [Arabidopsis thaliana] >gi|928965|emb|CAA62031.1| Y13
  misc_feature (1)..(188): Homolog of NCBI NO: 15221336 NR Description: myb family transcription factor [Arabidopsis
  misc_feature (1)..(172): Homolog of NCBI NO: 15228529 NR Description: myb family transcription factor [Arabidopsis
  misc_feature (1)..(172): Homolog of NCBI NO: 11273960 NR Description: myb-related transcription factor MYB30 [imported] Arabidopsis thaliana >gi|3941438|gb|AAC83595.1| putative
  misc_feature (1)..(75): Homolog of NCBI NO: 11358548 NR Description: myb-related transcription factor MYB60 [imported] Arabidopsis thaliana >gi|3941482|gb|AAC83617.1| putative
  misc_feature (1)..(75): Homolog of NCBI NO: 15223917 NR Description: myb family transcription factor [Arabidopsis
  misc_feature (1)..(166): Homolog of NCBI NO: 18071376 NR Description: putative transcription factor [Oryza sativa]
  misc_feature (1)..(166): Homolog of NCBI NO: 19072762 NR Description: typical P-type R2R3 Myb protein [Oryza sativa]
MRCSKSCRLRWTNYLRPGIRRGNFTPHEEGIIVHLQALLGNRWAAIASYLPQRTDNDIKNYWNTHLKKKLRKQQAIGAILAPPPPSEPTAGHADCHHDMTRSSKDSHACLADSTPAADEVVTQLIAQQFAATDGDTSSSSSYSYASSTDNISKLLNGFMKSASPARDDATDTIKTSSAIDIDPFDHKSGGALLPPPKKRQQQQQHLSSIENWLFDDATEQVVVQLMEEISGGSCSVPMLLY

SEQ ID NO: 6406 - protein, 147 aa, Zea mays subsp. mays
  peptide (1)..(147): Ceres Seq. ID no. 15222898
MDAGGGHRPGVLRPGARPRQLARRARQHGPHALQQELPPPLDQLPPPRHPARQLHTPRGRHHRPPPGLARQQMGGHCFLPPTENRQRHQELLEHPPQEEAPEAASHRRHLSATSPLRTHRRPCRLPSRHDPLLQGQPRLPGRQHTSG

SEQ ID NO: 6407 - DNA, 1359 bp, Zea mays subsp. mays
  misc_feature (1)..(1359): Ceres Seq. ID no. 12408140
  misc_feature: MA Experiment ID: 108522 Result: Up-regulated in Transcription
  misc_feature: MA Experiment 108522 PARAMETER Experiment Name: Zm_42deg_Heat_P Parameter: Age (day) Value: 8
  misc_feature: MA Experiment 108522 PARAMETER Experiment Name: Zm_42deg_Heat_P Parameter: Organism Value: Zea mays
  misc_feature: MA Experiment 108522 PARAMETER Experiment Name: Zm_42deg_Heat_P Parameter: Plant Line Value: 35A19
  misc_feature: MA Experiment 108522 PARAMETER Experiment Name: Zm_42deg_Heat_P Parameter: Temperature (deg C) Value: 42 vs. 22
  misc_feature: MA Experiment 108522 PARAMETER Experiment Name: Zm_42deg_Heat_P Parameter: Timepoint (hr) Value: 1
  misc_feature: MA Experiment 108522 PARAMETER Experiment Name: Zm_42deg_Heat_P Parameter: Tissue Value: Aerial
  misc_feature: MA Experiment ID: 108545 Result: Up-regulated in Transcription
  misc_feature: MA Experiment 108545 PARAMETER Experiment Name: Zm_Imbibed_Seeds_P Parameter: Age (day) Value: 3 vs. 2
  misc_feature: MA Experiment 108545 PARAMETER Experiment Name: Zm_Imbibed_Seeds_P Parameter: Organism Value: Zea mays
  misc_feature: MA Experiment 108545 PARAMETER Experiment Name: Zm_Imbibed_Seeds_P Parameter: Plant Line Value: 35A19
  misc_feature: MA Experiment 108545 PARAMETER Experiment Name: Zm_Imbibed_Seeds_P Parameter: Tissue Value: Aerial vs. Embryo
  misc_feature: MA Experiment ID: 108547 Result: Up-regulated in Transcription
  misc_feature: MA Experiment 108547 PARAMETER Experiment Name: Zm_Imbibed_Seeds_P Parameter: Age (day) Value: 4 vs. 2
  misc_feature: MA Experiment 108547 PARAMETER Experiment Name: Zm_Imbibed_Seeds_P Parameter: Organism Value: Zea mays
  misc_feature: MA Experiment 108547 PARAMETER Experiment Name: Zm_Imbibed_Seeds_P Parameter: Plant Line Value: 35A19
  misc_feature: MA Experiment 108547 PARAMETER Experiment Name: Zm_Imbibed_Seeds_P Parameter: Tissue Value: Aerial vs. Embryo
gcacgagaccattacctagaacatcctaatcgaaaaccattacggacacagccattccaccaaccaaccaagccaaacggtttatagccccgctcggttcaagccggtaccgtacacctccagagtagcttaccccaaccaaatccatccaaattcaatcggaattcgcgtgcgcaagcccaaatcggaccacggtaatccaaaggccgcggcgtagcggacgcgcgggcgctggtgataaagcgggggctgggcctcgacgcctctgctctgctctgctctccttgcataggttttatcttctcccctcctctgcccccatctcgcttctcgcacacggcagccggattccgaagcgcgccccctcggccccagccaaaagcatcgcagtttctaatcgtttggagagcacacaagaatgtcgttcgtgcagctctctggtgctggagtcgctgcagtggccttcacgaacaagagcctagtctctcggcacgcagcgctacgggtctgctcgtcgaggcgctcgatccgtagcctggtcgttaaggctgcaactgtcgtcaccccaaagtacacttcactgaagcctctgggagatagggtgcttgtgaagcttggtgccgcagaggagaagacagttggtggcattttgcttccatctactgcccagactaaaccacaaggaggtgaggttgttgctgttggagcaggaaggaccatcggggacaagaaaatagctgtggatatagagactggagcacaagtagtatactcaaagtatgctgggactgaggttgaattcaatgactcaaagcatcttattctcaaagaagacgatatcattggtattcttgagacagatgatgtgaaggacatgaagcctctcaatgaccgtgttctcatcaaggttgcagaagccgaagacaaaactcctgggggccttatcctcactgaaacaactaaagagaagccgtccataggaacggttgtagctgttggcccgggtcctctggacgaggaaggcaagagacagccactgtcagtgtcggcgggcagcacagtgctgtactccaagtatgcagggagtgagttcaagggcgcggatggcacggcctacattgtgttgagagcgtcggatgtgatggctgtcctgtcttgagcatttcgtttccggctcgttaatgtagtttgcagccaatagttgtcatgtggtatgaaacgatcgctttgtggtggtcatcacaccatgctggtgatcatcacaacatatgctgatactgttccggacaatcggctagaatttgttgtgtggcaggtataaacgtcagcatctgatagtgagagcactcggttacttct

SEQ ID NO: 6408 - protein, 246 aa, Zea mays subsp. mays
  peptide (1)..(246): Ceres Seq. ID no. 12408141
  misc_feature (151)..(246): Pfam Name: Chaperonin 10 Kd subunit Pfam Description: Chaperonin 10 Kd subunit
  misc_feature (151)..(246): Pfam Name: Chaperonin 10 Kd subunit Pfam Description: Chaperonin 10 Kd subunit
  misc_feature (4)..(246): Homolog of NCBI NO: 15242045 NR Description: chloroplast Cpn21 protein; protein id: supported by cDNA: gi_10179871, supported by cDNA: gi_14334611, by cDNA: gi_14587372, supported by cDNA: gi_16226814, supported
  misc_feature (1)..(246): Homolog of NCBI NO: 7331143 NR Description: chaperonin 21 precursor [Lycopersicon esculentum]
  misc_feature (4)..(246): Homolog of NCBI NO: 25453528 NR Description: chaperonin 10 [imported] - Arabidopsis thaliana
  misc_feature (2)..(246): Homolog of NCBI NO: 21780187 NR Description: cp10-like protein [Gossypium hirsutum]
  misc_feature (35)..(246): Homolog of NCBI NO: 399241 NR Description: 20 kDa chaperonin, chloroplast precursor (Protein
  misc_feature (1)..(246): Homolog of NCBI NO: 7331143 NR Description: chaperonin 21 precursor [Lycopersicon esculentum]
  misc_feature (2)..(246): Homolog of NCBI NO: 21780187 NR Description: cp10-like protein [Gossypium hirsutum]
  misc_feature (54)..(145): Homolog of NCBI NO: 23113174 NR Description: hypothetical protein [Desulfitobacterium
  misc_feature (55)..(146): Homolog of NCBI NO: 20807075 NR Description: Co-chaperonin GroES (HSP10) [Thermoanaerobacter
  misc_feature (55)..(146): Homolog of NCBI NO: 2493659 NR Description: 10 kDa chaperonin (Protein Cpn10) (groES protein)
  misc_feature (152)..(246): Homolog of NCBI NO: 3599923 NR Description: GroES/HSP10 homolog [Lawsonia intracellularis]
  misc_feature (150)..(245): Homolog of NCBI NO: 22297730 NR Description: 10kD chaperonin [Thermosynechococcus elongatus >gi|4033374|sp|O50322|CH10_SYNEL 10 kDa chaperonin (Protein (groES protein) >gi|2696700|dbj|BAA23816.1| GroES [Synechococcus
  misc_feature (35)..(246): Homolog of NCBI NO: 399241 NR Description: 20 kDa chaperonin, chloroplast precursor (Protein
  misc_feature (4)..(246): Homolog of NCBI NO: 25453528 NR Description: chaperonin 10 [imported] - Arabidopsis thaliana
  misc_feature (4)..(246): Homolog of NCBI NO: 15242045 NR Description: chloroplast Cpn21 protein; protein id: supported by cDNA: gi_10179871, supported by cDNA: gi_14334611, by cDNA: gi_14587372, supported by cDNA: gi_16226814, supported
  misc_feature (150)..(245): Homolog of NCBI NO: 22297730 NR Description: 10kD chaperonin [Thermosynechococcus elongatus >gi|4033374|sp|O50322|CH10_SYNEL 10 kDa chaperonin (Protein (groES protein) >gi|2696700|dbj|BAA23816.1| GroES [Synechococcus
  misc_feature (152)..(246): Homolog of NCBI NO: 3599923 NR Description: GroES/HSP10 homolog [Lawsonia intracellularis]
  misc_feature (55)..(146): Homolog of NCBI NO: 2493659 NR Description: 10 kDa chaperonin (Protein Cpn10) (groES protein)
  misc_feature (55)..(146): Homolog of NCBI NO: 20807075 NR Description: Co-chaperonin GroES (HSP10) [Thermoanaerobacter
  misc_feature (54)..(145): Homolog of NCBI NO: 23113174 NR Description: hypothetical protein [Desulfitobacterium
MSFVQLSGAGVAAVAFTNKSLVSRHAALRVCSSRRSIRSLVVKAATVVTPKYTSLKPLGDRVLVKLGAAEEKTVGGILLPSTAQTKPQGGEVVAVGAGRTIGDKKIAVDIETGAQVVYSKYAGTEVEFNDSKHLILKEDDIIGILETDDVKDMKPLNDRVLIKVAEAEDKTPGGLILTETTKEKPSIGTVVAVGPGPLDEEGKRQPLSVSAGSTVLYSKYAGSEFKGADGTAYIVLRASDVMAVLS

SEQ ID NO: 6409 - DNA, 913 bp, Zea mays subsp. mays
  misc_feature (1)..(913): Ceres Seq. ID no. 12352405
  misc_feature: MA Experiment ID: 108543 Result: Up-regulated in Transcription
agatctctagcactagctttgatcctttccgccgccaactttggcttgggatttgtctctgacttgggacactcgctgaagagagtacatctccgacttgggatttgtcttacgaccagcagcggcggcggcggcggcgcgccaggacaaggagcagcgggactacagactcatcgcaaaagccgtggacgaagcgtaccgggcggtggagtgcgacggcggcgggtaccccttcggcgcggtcgtcgtccacggcggcggcgacgacgaggtggtcagcagcagccacaactcggtccggaaggacgccgacccgtcggcgcacgccgaagtgaccgccatcagacaggcgtgcaagaagctggggaaaaccagcctcgccggctgcgagatctacacgtcctgcgagccgtgcccgatgtgcctggggctcattcgcctggccaagataaagaaggtggtgtacggagccaagtcggaggtcgccgctgccgccgggctcaacggcgtcctcccagaggtcttcagagagtactaccagaaatccggcgtggagatgaggcaggccgagggcgaggcggcaacccgggatcgccgaggaggtgttcgaggagaccaagggcaagtttcgcaacaagtaaacgcgctggagatggcgccgggcggatggctgttgcctgttgctagtggaatggttgccgtttccaagctttttgtccgggggacctttgatcagaggtcacatgcccagagaccggaataaattcacccctttccccccctaaaaaatactccatttcacatggtttgttgtatcagtgtgttatttctttttttaacgcccgcctcgaccgtgtgacattttttttcttaataatgtagggtgttacttgttgggaacataattaggtgt

SEQ ID NO: 6410 - protein, 228 aa, Zea mays subsp. mays
  peptide (1)..(228): Ceres Seq. ID no. 12352406
  misc_feature (37)..(221): Homolog of NCBI NO: 23018055 NR Description: hypothetical protein [Thermobifida fusca]
RSLALALILSAANFGLGFVSDLGHSLKRVHLRLGICLTTSSGGGGGAPGQGAAGLQTHRKSRGRSVPGGGVRRRRVPLRRGRRPRRRRRRGGQQQPQLGPEGRRPVGARRSDRHQTGVQEAGENQPRRLRDLHVLRAVPDVPGAHSPGQDKEGGVRSQVGGRRCRRAQRRPPRGLQRVLPEIRRGDEAGRGRGGNPGSPRRCSRRPRASFATSKRAGDGAGRMAVACC

SEQ ID NO: 6411 - protein, 114 aa, Zea mays subsp. mays
  peptide (1)..(114): Ceres Seq. ID no. 12352407
  misc_feature (1)..(55): Homolog of NCBI NO: 23928436 NR Description: putative cytidine deaminase [Zea mays]
  misc_feature (1)..(55): Homolog of NCBI NO: 40714681 NR Description: putative deoxycytidine deaminase [Oryza sativa
  misc_feature (1)..(55): Homolog of NCBI NO: 3204108 NR Description: putative cytidine deaminase; putative
  misc_feature (1)..(55): Homolog of NCBI NO: 15241124 NR Description: putative cytidine deaminase - like; protein id: supported by cDNA: 37242., supported by cDNA: gi_14532497 thaliana] >gi|14532498|gb|AAK63977.1| AT5g28050/F15F15_120
  misc_feature (1)..(55): Homolog of NCBI NO: 18266045 NR Description: deoxycytidine deaminase [Brassica oleracea]
  misc_feature (1)..(54): Homolog of NCBI NO: 23021911 NR Description: hypothetical protein [Clostridium thermocellum
  misc_feature (1)..(55): Homolog of NCBI NO: 39591749 NR Description: Hypothetical protein CBG18226 [Caenorhabditis
  misc_feature (1)..(55): Homolog of NCBI NO: 17555996 NR Description: Cytidine, cytosine, dCTP et al deaminase (18.3 kD)
  misc_feature (1)..(41): Homolog of NCBI NO: 17554608 NR Description: Cytidine, cytosine, dCTP et al deaminase elegans] >gi|15144367|gb|AAK84461.1|AC006679_2 Hypothetical
  misc_feature (1)..(55): Homolog of NCBI NO: 21228824 NR Description: hypothetical protein [Methanosarcina mazei Goe1]
MCLGLIRLAKIKKVVYGAKSEVAAAAGLNGVLPEVFREYYQKSGVEMRQAEGEAATRDRRGGVRGDQGQVSQQVNALEMAPGGWLLPVASGMVAVSKLFVRGTFDQRSHAQRPE

SEQ ID NO: 6412 - DNA, 670 bp, Zea mays subsp. mays
  misc_feature (1)..(670): Ceres Seq. ID no. 13496088
  misc_feature: MA Experiment ID: 108504 Result: Up-regulated in Transcription
  misc_feature: MA Experiment 108504 PARAMETER Experiment Name: Zm_Drought_P Parameter: Age (day) Value: 8
  misc_feature: MA Experiment 108504 PARAMETER Experiment Name: Zm_Drought_P Parameter: Organism Value: Zea mays
  misc_feature: MA Experiment 108504 PARAMETER Experiment Name: Zm_Drought_P Parameter: Plant Line Value: 35A19
  misc_feature: MA Experiment 108504 PARAMETER Experiment Name: Zm_Drought_P Parameter: Timepoint (hr) Value: 12
  misc_feature: MA Experiment 108504 PARAMETER Experiment Name: Zm_Drought_P Parameter: Tissue Value: Aerial
  misc_feature: MA Experiment 108504 PARAMETER Experiment Name: Zm_Drought_P Parameter: Treatment Value: Drought vs. No Drought
  misc_feature: MA Experiment ID: 108522 Result: Up-regulated in Transcription
  misc_feature: MA Experiment 108522 PARAMETER Experiment Name: Zm_42deg_Heat_P Parameter: Age (day) Value: 8
  misc_feature: MA Experiment 108522 PARAMETER Experiment Name: Zm_42deg_Heat_P Parameter: Organism Value: Zea mays
  misc_feature: MA Experiment 108522 PARAMETER Experiment Name: Zm_42deg_Heat_P Parameter: Plant Line Value: 35A19
  misc_feature: MA Experiment 108522 PARAMETER Experiment Name: Zm_42deg_Heat_P Parameter: Temperature (deg C) Value: 42 vs. 22
  misc_feature: MA Experiment 108522 PARAMETER Experiment Name: Zm_42deg_Heat_P Parameter: Timepoint (hr) Value: 1
  misc_feature: MA Experiment 108522 PARAMETER Experiment Name: Zm_42deg_Heat_P Parameter: Tissue Value: Aerial
  misc_feature: MA Experiment ID: 108523 Result: Up-regulated in Transcription
  misc_feature: MA Experiment 108523 PARAMETER Experiment Name: Zm_42deg_Heat_P Parameter: Age (day) Value: 8
  misc_feature: MA Experiment 108523 PARAMETER Experiment Name: Zm_42deg_Heat_P Parameter: Organism Value: Zea mays
  misc_feature: MA Experiment 108523 PARAMETER Experiment Name: Zm_42deg_Heat_P Parameter: Plant Line Value: 35A19
  misc_feature: MA Experiment 108523 PARAMETER Experiment Name: Zm_42deg_Heat_P Parameter: Temperature (deg C) Value: 42 vs. 22
  misc_feature: MA Experiment 108523 PARAMETER Experiment Name: Zm_42deg_Heat_P Parameter: Timepoint (hr) Value: 6
  misc_feature: MA Experiment 108523 PARAMETER Experiment Name: Zm_42deg_Heat_P Parameter: Tissue Value: Aerial
  misc_feature: MA Experiment ID: 108533 Result: Up-regulated in Transcription
  misc_feature: MA Experiment 108533 PARAMETER Experiment Name: Zm_4deg_Cold_P Parameter: Age (hr) Value: 8
  misc_feature: MA Experiment 108533 PARAMETER Experiment Name: Zm_4deg_Cold_P Parameter: Organism Value: Zea mays
  misc_feature: MA Experiment 108533 PARAMETER Experiment Name: Zm_4deg_Cold_P Parameter: Plant Line Value: 35A19
  misc_feature: MA Experiment 108533 PARAMETER Experiment Name: Zm_4deg_Cold_P Parameter: Temperature (deg C) Value: 4 vs. 22
  misc_feature: MA Experiment 108533 PARAMETER Experiment Name: Zm_4deg_Cold_P Parameter: Timepoint (hr) Value: 1
  misc_feature: MA Experiment 108533 PARAMETER Experiment Name: Zm_4deg_Cold_P Parameter: Tissue Value: Aerial
  misc_feature: MA Experiment ID: 108536 Result: Up-regulated in Transcription
  misc_feature: MA Experiment 108536 PARAMETER Experiment Name: Zm_Meristem_P Parameter: Age (day) Value: 8
  misc_feature: MA Experiment 108536 PARAMETER Experiment Name: Zm_Meristem_P Parameter: Organism Value: Zea mays
  misc_feature: MA Experiment 108536 PARAMETER Experiment Name: Zm_Meristem_P Parameter: Plant Line Value: 35A19
  misc_feature: MA Experiment 108536 PARAMETER Experiment Name: Zm_Meristem_P Parameter: Tissue Value: Shoot Meristem vs. Above Shoot Meristem
  misc_feature: MA Experiment ID: 108539 Result: Up-regulated in Transcription
  misc_feature: MA Experiment 108539 PARAMETER Experiment Name: Zm_20percent_PEG_P Parameter: Age (day) Value: 8
  misc_feature: MA Experiment 108539 PARAMETER Experiment Name: Zm_20percent_PEG_P Parameter: Organism Value: Zea mays
  misc_feature: MA Experiment 108539 PARAMETER Experiment Name: Zm_20percent_PEG_P Parameter: Plant Line Value: 35A19
  misc_feature: MA Experiment 108539 PARAMETER Experiment Name: Zm_20percent_PEG_P Parameter: Timepoint (hr) Value: 1
  misc_feature: MA Experiment 108539 PARAMETER Experiment Name: Zm_20percent_PEG_P Parameter: Tissue Value: Aerial
  misc_feature: MA Experiment 108539 PARAMETER Experiment Name: Zm_20percent_PEG_P Parameter: Treatment Value: 20percent PEG vs. No Treatment
  misc_feature: MA Experiment ID: 108540 Result: Up-regulated in Transcription
  misc_feature: MA Experiment 108540 PARAMETER Experiment Name: Zm_20percent_PEG_P Parameter: Age (day) Value: 8
  misc_feature: MA Experiment 108540 PARAMETER Experiment Name: Zm_20percent_PEG_P Parameter: Organism Value: Zea mays
  misc_feature: MA Experiment 108540 PARAMETER Experiment Name: Zm_20percent_PEG_P Parameter: Plant Line Value: 35A19
  misc_feature: MA Experiment 108540 PARAMETER Experiment Name: Zm_20percent_PEG_P Parameter: Timepoint (hr) Value: 6
  misc_feature: MA Experiment 108540 PARAMETER Experiment Name: Zm_20percent_PEG_P Parameter: Tissue Value: Aerial
  misc_feature: MA Experiment 108540 PARAMETER Experiment Name: Zm_20percent_PEG_P Parameter: Treatment Value: 20percent PEG vs. No Treatment
  misc_feature: MA Experiment ID: 108542 Result: Up-regulated in Transcription
  misc_feature: MA Experiment 108542 PARAMETER Experiment Name: Zm_150mM_NaCl_P Parameter: Age (day) Value: 8
  misc_feature: MA Experiment 108542 PARAMETER Experiment Name: Zm_150mM_NaCl_P Parameter: Organism Value: Zea mays
  misc_feature: MA Experiment 108542 PARAMETER Experiment Name: Zm_150mM_NaCl_P Parameter: Plant Line Value: 35A19
  misc_feature: MA Experiment 108542 PARAMETER Experiment Name: Zm_150mM_NaCl_P Parameter: Timepoint (hr) Value: 6
  misc_feature: MA Experiment 108542 PARAMETER Experiment Name: Zm_150mM_NaCl_P Parameter: Tissue Value: Aerial
  misc_feature: MA Experiment 108542 PARAMETER Experiment Name: Zm_150mM_NaCl_P Parameter: Treatment Value: 150mM NaCl vs. No Treatment
  misc_feature: MA Experiment ID: 108543 Result: Down-regulated in Transcription
  misc_feature: MA Experiment ID: 108544 Result: Down-regulated in Transcription
  misc_feature: MA Experiment ID: 108556 Result: Up-regulated in Transcription
  misc_feature: MA Experiment 108556 PARAMETER Experiment Name: Zm_Drought_P Parameter: Age (day) Value: 9
  misc_feature: MA Experiment 108556 PARAMETER Experiment Name: Zm_Drought_P Parameter: Organism Value: Zea mays
  misc_feature: MA Experiment 108556 PARAMETER Experiment Name: Zm_Drought_P Parameter: Plant Line Value: 35A19
  misc_feature: MA Experiment 108556 PARAMETER Experiment Name: Zm_Drought_P Parameter: Timepoint (hr) Value: 24
  misc_feature: MA Experiment 108556 PARAMETER Experiment Name: Zm_Drought_P Parameter: Tissue Value: Aerial
  misc_feature: MA Experiment 108556 PARAMETER Experiment Name: Zm_Drought_P Parameter: Treatment Value: Drought vs. No Drought
  misc_feature: MA Experiment ID: 20000479 Result: Up-regulated in Transcription
  misc_feature: MA Experiment 20000479 PARAMETER Experiment Name: Zm_Drought_P Parameter: Age (day) Value: 10
  misc_feature: MA Experiment 20000479 PARAMETER Experiment Name: Zm_Drought_P Parameter: Organism Value: Zea mays
  misc_feature: MA Experiment 20000479 PARAMETER Experiment Name: Zm_Drought_P Parameter: Plant Line Value: 35A19
  misc_feature: MA Experiment 20000479 PARAMETER Experiment Name: Zm_Drought_P Parameter: Timepoint (hr) Value: 48
  misc_feature: MA Experiment 20000479 PARAMETER Experiment Name: Zm_Drought_P Parameter: Tissue Value: Aerial
  misc_feature: MA Experiment 20000479 PARAMETER Experiment Name: Zm_Drought_P Parameter: Treatment Value: Drought vs. No Drought
  misc_feature: MA Experiment ID: 20000480 Result: Up-regulated in Transcription
  misc_feature: MA Experiment 20000480 PARAMETER Experiment Name: Zm_Drought_P Parameter: Age (day) Value: 11
  misc_feature: MA Experiment 20000480 PARAMETER Experiment Name: Zm_Drought_P Parameter: Organism Value: Zea mays
  misc_feature: MA Experiment 20000480 PARAMETER Experiment Name: Zm_Drought_P Parameter: Plant Line Value: 35A19
  misc_feature: MA Experiment 20000480 PARAMETER Experiment Name: Zm_Drought_P Parameter: Timepoint (hr) Value: 72
  misc_feature: MA Experiment 20000480 PARAMETER Experiment Name: Zm_Drought_P Parameter: Tissue Value: Aerial
  misc_feature: MA Experiment 20000480 PARAMETER Experiment Name: Zm_Drought_P Parameter: Treatment Value: Drought vs. No Drought
  misc_feature: MA Experiment ID: 20000626 Result: Down-regulated in Transcription
  misc_feature: MA Experiment 20000626 PARAMETER Experiment Name: Zm_Herbicide-Treatments_P Parameter: Timepoint (hr) Value: 12
  misc_feature: MA Experiment 20000626 PARAMETER Experiment Name: Zm_Herbicide-Treatments_P Parameter: Tissue Value: Aerial
  misc_feature: MA Experiment 20000626 PARAMETER Experiment Name: Zm_Herbicide-Treatments_P Parameter: Treatment Value: Roundup vs. No Treatment
  misc_feature: MA Experiment ID: 20000629 Result: Down-regulated in Transcription
  misc_feature: MA Experiment 20000629 PARAMETER Experiment Name: Zm_Herbicide-Treatments_P Parameter: Timepoint (hr) Value: 12
  misc_feature: MA Experiment 20000629 PARAMETER Experiment Name: Zm_Herbicide-Treatments_P Parameter: Tissue Value: Aerial
  misc_feature: MA Experiment 20000629 PARAMETER Experiment Name: Zm_Herbicide-Treatments_P Parameter: Treatment Value: Trimec vs. No Treatment
  misc_feature: MA Experiment ID: 20001612 Result: Up-regulated in Transcription
  misc_feature: MA Experiment 20001612 PARAMETER Experiment Name: Zm_50ppm_KNO3_L-to-H_P Parameter: Age (day) Value: 19
  misc_feature: MA Experiment 20001612 PARAMETER Experiment Name: Zm_50ppm_KNO3_L-to-H_P Parameter: Organism Value: Zea mays
  misc_feature: MA Experiment 20001612 PARAMETER Experiment Name: Zm_50ppm_KNO3_L-to-H_P Parameter: Plant Line Value: 35A19
  misc_feature: MA Experiment 20001612 PARAMETER Experiment Name: Zm_50ppm_KNO3_L-to-H_P Parameter: Timepoint (hr) Value: 8
  misc_feature: MA Experiment 20001612 PARAMETER Experiment Name: Zm_50ppm_KNO3_L-to-H_P Parameter: Tissue Value: Roots
  misc_feature: MA Experiment 20001612 PARAMETER Experiment Name: Zm_50ppm_KNO3_L-to-H_P Parameter: Treatment Value: 50ppm KNO3 vs. 50ppm KCl
aagacttcacaagaatctactcgtcgagtcaccaaagataaggctctatcggactcggagtctcggacagcacagcaaagcaagagccgctactcaagtatagtctgacaccggccgaccctgccccaacccaagccatggcggacaacaacaaccggcggaaccacgggcagaccttgctcgccggcgcgggcctgggcctgctcgccgtgaactcgggcctcgccatctaccgcgcgaggggcgacacggccgccgtcctcttcgtcgcggggtcctgcgccaccctgctcctcctcttcgcctgcctccgcgcctacgagcgggcggcgcccgggtcgccggcccgggaccgggcgcggcgcgccgtgtggccgctcgccacgctgctcacgctctcgttcgcctggaaggtggcggcggccatgccttccgccgccgcggccgccctcgtatggggcctggccgtggccaccaccgccggcggcttcgtggcactgtacgtgcagcaggcatgaacacgtgggcgcgggacggactaggcaagcagctgcagacttgcagctcgttcagggatctagatctgggcgccgcgcgcctgtgtagaaatgtacagtgtatttggctagcttttcgattttgtgcatatgtatgtagctgactggctgat

SEQ ID NO: 6413 - protein, 126 aa, Zea mays subsp. mays
  peptide (1)..(126): Ceres Seq. ID no. 13496089
  misc_feature (13)..(123): Homolog of NCBI NO: 34912134 NR Description: OSJNBb0024F06.19 [Oryza sativa (japonica
  misc_feature (15)..(125): Homolog of NCBI NO: 34904462 NR Description: OSJNBa0086P08.10 [Oryza sativa (japonica
  misc_feature (22)..(123): Homolog of NCBI NO: 34910564 NR Description: B1131B07.10 [Oryza sativa (japonica
  misc_feature (18)..(126): Homolog of NCBI NO: 34906268 NR Description: P0489A01.19 [Oryza sativa (japonica
MADNNNRRNHGQTLLAGAGLGLLAVNSGLAIYRARGDTAAVLFVAGSCATLLLLFACLRAYERAAPGSPARDRARRAVWPLATLLTLSFAWKVAAAMPSAAAAALVWGLAVATTAGGFVALYVQQA

SEQ ID NO: 6414 - protein, 68 aa, Zea mays subsp. mays
  peptide (1)..(68): Ceres Seq. ID no. 13496090
MGPGRGHHRRRLRGTVRAAGMNTWARDGLGKQLQTCSSFRDLDLGAARLCRNVQCIWLAFRFCAYVCS

SEQ ID NO: 6415 - DNA, 988 bp, Zea mays subsp. mays
  misc_feature (1)..(988): Ceres Seq. ID no. 12402534
  misc_feature: MA Experiment ID: 108535 Result: Down-regulated in Transcription
  misc_feature: MA Experiment 108535 PARAMETER Experiment Name: Zm_Meristem_P Parameter: Age (day) Value: 8
  misc_feature: MA Experiment 108535 PARAMETER Experiment Name: Zm_Meristem_P Parameter: Organism Value: Zea mays
  misc_feature: MA Experiment 108535 PARAMETER Experiment Name: Zm_Meristem_P Parameter: Plant Line Value: 35A19
  misc_feature: MA Experiment 108535 PARAMETER Experiment Name: Zm_Meristem_P Parameter: Tissue Value: Root Meristem vs. Above Root Meristem
  misc_feature: MA Experiment ID: 108544 Result: Down-regulated in Transcription
  misc_feature: MA Experiment ID: 108687 Result: Down-regulated in Transcription
  misc_feature: MA Experiment 108687 PARAMETER Experiment Name: Zm_Embryos-Flowers__P Parameter: Tissue Value: Embryo vs. Aerial+
  misc_feature: MA Experiment ID: 20000535 Result: Up-regulated in Transcription
  misc_feature: MA Experiment 20000535 PARAMETER Experiment Name: Zm_Hybrid_Seed_Dev_P Parameter: DAP Value: 30 vs. 12
  misc_feature: MA Experiment 20000535 PARAMETER Experiment Name: Zm_Hybrid_Seed_Dev_P Parameter: Organism Value: Zea mays
  misc_feature: MA Experiment 20000535 PARAMETER Experiment Name: Zm_Hybrid_Seed_Dev_P Parameter: Plant Line Value: 35A19
  misc_feature: MA Experiment 20000535 PARAMETER Experiment Name: Zm_Hybrid_Seed_Dev_P Parameter: Tissue Value: Embryo vs. Unfert Floret
agcagcagcagcagcaagcttgagccactgctgcacgtatattattaagatcgaaagccaccaccatggccttggcctctaataagctcctcatcaacagcttcgtcacggtggcattcttagtcgccagcactcgtgggagtggcaccatccagctgatcttggtgaacaactgcgcggaatccatctggcccgggcttctgggcaccgccggccagccgacgccgcagtcgggcggcctccacctggcccccggcgacgaggcggccttcgacgtgccggtggggtggtccggccgcgtgtgnccgcggcgcggctgctccttcgaccagcgcgagcgggggcagtgcgcgacgggggactgtggcggcgtgctccgctgngacgggcggcccggcgccgccccggccacggtggtagagatgacgctgggcacccccaagtccccgntccacttnnacgacgtgtcgntggtggacggcttcaacgcgccggtgtccatggcccccgtgggcggcggcgccgggtgcggcgtgnncgggtgccagnnggacctgaacgtctgctgcccgtcggcgctcgaggnnagggaccgggaggggagggtggccggctgccggagcgcctgcaaggccatgggaggggacaggtactgctgcacgggggactacgcgtcgccggacnaggtgccgccccaccatcttngcccacgtcttcaaggccgtgtgccccaaggcctatcantacgcgtacgacgacgccacctcgctgaaccggtgcaaggccagccggtacctcatcaccttctgcccaccgccgacatccaggaaatgacgaccacatccatggattgcatcttcaaaataataatacttactaaatgtcctacggtttttatatatcagtcatgtagagcttgtttaattaggatacttatttaaacatattccaatccgagaggtctntatccaacgcatcaattgttcgt

SEQ ID NO: 6416 - protein, 291 aa, Zea mays subsp. mays
  peptide (1)..(291): Ceres Seq. ID no. 12402535
  misc_feature (35)..(210): Pfam Name: Thaumatin family Pfam Description: Thaumatin family
  misc_feature (18)..(210): Homolog of NCBI NO: 15241688 NR Description: thaumatin-like protein; protein id: At5g02140.1
  misc_feature (10)..(210): Homolog of NCBI NO: 15221033 NR Description: pathogenesis-related group 5 protein, putative; id: At1g18250.1, supported by cDNA: gi_536824 [Arabidopsis
  misc_feature (1)..(210): Homolog of NCBI NO: 15219508 NR Description: thaumatin-like protein; protein id: At1g73620.1,
  misc_feature (10)..(210): Homolog of NCBI NO: 2129751 NR Description: thaumatin-like protein - Arabidopsis thaliana
  misc_feature (13)..(210): Homolog of NCBI NO: 21553814 NR Description: thaumatin-like protein [Arabidopsis thaliana]
  misc_feature (12)..(226): Homolog of NCBI NO: 15222088 NR Description: thaumatin-like protein (PR-5); protein id: supported by cDNA: gi_2435405 [Arabidopsis thaliana]
  misc_feature (18)..(210): Homolog of NCBI NO: 4586372 NR Description: thaumatin-like protein SE39b [Nicotiana tabacum]
  misc_feature (12)..(226): Homolog of NCBI NO: 2435406 NR Description: thaumatin-like protein [Arabidopsis thaliana]
  misc_feature (1)..(226): Homolog of NCBI NO: 18420282 NR Description: putative thaumatin-like protein; protein id: supported by cDNA: 32152., supported by cDNA: gi_17979354, by cDNA: gi_20466020 [Arabidopsis thaliana]
  misc_feature (17)..(210): Homolog of NCBI NO: 7442175 NR Description: thaumatin-like protein - turnip
  misc_feature (80)..(80): Xaa is any aa, unknown or other
  misc_feature (106)..(106): Xaa is any aa, unknown or other
  misc_feature (129)..(129): Xaa is any aa, unknown or other
  misc_feature (131)..(131): Xaa is any aa, unknown or other
  misc_feature (132)..(132): Xaa is any aa, unknown or other
  misc_feature (136)..(136): Xaa is any aa, unknown or other
  misc_feature (158)..(158): Xaa is any aa, unknown or other
  misc_feature (162)..(162): Xaa is any aa, unknown or other
  misc_feature (174)..(174): Xaa is any aa, unknown or other
  misc_feature (207)..(207): Xaa is any aa, unknown or other
  misc_feature (214)..(214): Xaa is any aa, unknown or other
  misc_feature (227)..(227): Xaa is any aa, unknown or other
MALASNKLLINSFVTVAFLVASTRGSGTIQLILVNNCAESIWPGLLGTAGQPTPQSGGLHLAPGDEAAFDVPVGWSGRVXPRRGCSFDQRERGQCATGDCGGVLRXDGRPGAAPATVVEMTLGTPKSPXHXXDVSXVDGFNAPVSMAPVGGGAGCGVXGCQXDLNVCCPSALEXRDREGRVAGCRSACKAMGGDRYCCTGDYASPDXVPPHHLXPRLQGRVPQGLSXRVRRRHLAEPVQGQPVPHHLLPTADIQEMTTTSMDCIFKIIILTKCPTVFIYQSCRACLIRILI

SEQ ID NO: 6417 - protein, 172 aa, Zea mays subsp. mays
  peptide (1)..(172): Ceres Seq. ID no. 12402536
  misc_feature (1)..(91): Pfam Name: Thaumatin family Pfam Description: Thaumatin family
  misc_feature (1)..(91): Homolog of NCBI NO: 15241688 NR Description: thaumatin-like protein; protein id: At5g02140.1
  misc_feature (1)..(91): Homolog of NCBI NO: 15221033 NR Description: pathogenesis-related group 5 protein, putative; id: At1g18250.1, supported by cDNA: gi_536824 [Arabidopsis
  misc_feature (1)..(91): Homolog of NCBI NO: 15219508 NR Description: thaumatin-like protein; protein id: At1g73620.1,
  misc_feature (1)..(91): Homolog of NCBI NO: 2129751 NR Description: thaumatin-like protein - Arabidopsis thaliana
  misc_feature (1)..(91): Homolog of NCBI NO: 21553814 NR Description: thaumatin-like protein [Arabidopsis thaliana]
  misc_feature (1)..(107): Homolog of NCBI NO: 15222088 NR Description: thaumatin-like protein (PR-5); protein id: supported by cDNA: gi_2435405 [Arabidopsis thaliana]
  misc_feature (1)..(91): Homolog of NCBI NO: 4586372 NR Description: thaumatin-like protein SE39b [Nicotiana tabacum]
  misc_feature (1)..(107): Homolog of NCBI NO: 2435406 NR Description: thaumatin-like protein [Arabidopsis thaliana]
  misc_feature (1)..(107): Homolog of NCBI NO: 18420282 NR Description: putative thaumatin-like protein; protein id: supported by cDNA: 32152., supported by cDNA: gi_17979354, by cDNA: gi_20466020 [Arabidopsis thaliana]
  misc_feature (1)..(91): Homolog of NCBI NO: 7442175 NR Description: thaumatin-like protein - turnip
  misc_feature (10)..(10): Xaa is any aa, unknown or other
  misc_feature (12)..(12): Xaa is any aa, unknown or other
  misc_feature (13)..(13): Xaa is any aa, unknown or other
  misc_feature (17)..(17): Xaa is any aa, unknown or other
  misc_feature (39)..(39): Xaa is any aa, unknown or other
  misc_feature (43)..(43): Xaa is any aa, unknown or other
  misc_feature (55)..(55): Xaa is any aa, unknown or other
  misc_feature (88)..(88): Xaa is any aa, unknown or other
  misc_feature (95)..(95): Xaa is any aa, unknown or other
  misc_feature (108)..(108): Xaa is any aa, unknown or other
MTLGTPKSPXHXXDVSXVDGFNAPVSMAPVGGGAGCGVXGCQXDLNVCCPSALEXRDREGRVAGCRSACKAMGGDRYCCTGDYASPDXVPPHHLXPRLQGRVPQGLSXRVRRRHLAEPVQGQPVPHHLLPTADIQEMTTTSMDCIFKIIILTKCPTVFIYQSCRACLIRILI

SEQ ID NO: 6418 - protein, 146 aa, Zea mays subsp. mays
  peptide (1)..(146): Ceres Seq. ID no. 12402537
  misc_feature (1)..(65): Pfam Name: Thaumatin family Pfam Description: Thaumatin family
  misc_feature (1)..(65): Homolog of NCBI NO: 15241688 NR Description: thaumatin-like protein; protein id: At5g02140.1
  misc_feature (1)..(65): Homolog of NCBI NO: 15221033 NR Description: pathogenesis-related group 5 protein, putative; id: At1g18250.1, supported by cDNA: gi_536824 [Arabidopsis
  misc_feature (1)..(65): Homolog of NCBI NO: 15219508 NR Description: thaumatin-like protein; protein id: At1g73620.1,
  misc_feature (1)..(65): Homolog of NCBI NO: 2129751 NR Description: thaumatin-like protein - Arabidopsis thaliana
  misc_feature (1)..(65): Homolog of NCBI NO: 21553814 NR Description: thaumatin-like protein [Arabidopsis thaliana]
  misc_feature (1)..(81): Homolog of NCBI NO: 15222088 NR Description: thaumatin-like protein (PR-5); protein id: supported by cDNA: gi_2435405 [Arabidopsis thaliana]
  misc_feature (1)..(65): Homolog of NCBI NO: 4586372 NR Description: thaumatin-like protein SE39b [Nicotiana tabacum]
  misc_feature (1)..(81): Homolog of NCBI NO: 2435406 NR Description: thaumatin-like protein [Arabidopsis thaliana]
  misc_feature (1)..(81): Homolog of NCBI NO: 18420282 NR Description: putative thaumatin-like protein; protein id: supported by cDNA: 32152., supported by cDNA: gi_17979354, by cDNA: gi_20466020 [Arabidopsis thaliana]
  misc_feature (1)..(65): Homolog of NCBI NO: 7442175 NR Description: thaumatin-like protein - turnip
  misc_feature (13)..(13): Xaa is any aa, unknown or other
  misc_feature (17)..(17): Xaa is any aa, unknown or other
  misc_feature (29)..(29): Xaa is any aa, unknown or other
  misc_feature (62)..(62): Xaa is any aa, unknown or other
  misc_feature (69)..(69): Xaa is any aa, unknown or other
  misc_feature (82)..(82): Xaa is any aa, unknown or other
MAPVGGGAGCGVXGCQXDLNVCCPSALEXRDREGRVAGCRSACKAMGGDRYCCTGDYASPDXVPPHHLXPRLQGRVPQGLSXRVRRRHLAEPVQGQPVPHHLLPTADIQEMTTTSMDCIFKIIILTKCPTVFIYQSCRACLIRILI

SEQ ID NO: 6419 - DNA, 899 bp, Zea mays subsp. mays
  misc_feature (1)..(899): Ceres Seq. ID no. 12403444
  misc_feature: MA Experiment ID: 108523 Result: Up-regulated in Transcription
  misc_feature: MA Experiment 108523 PARAMETER Experiment Name: Zm_42deg_Heat_P Parameter: Age (day) Value: 8
  misc_feature: MA Experiment 108523 PARAMETER Experiment Name: Zm_42deg_Heat_P Parameter: Organism Value: Zea mays
  misc_feature: MA Experiment 108523 PARAMETER Experiment Name: Zm_42deg_Heat_P Parameter: Plant Line Value: 35A19
  misc_feature: MA Experiment 108523 PARAMETER Experiment Name: Zm_42deg_Heat_P Parameter: Temperature (deg C) Value: 42 vs. 22
  misc_feature: MA Experiment 108523 PARAMETER Experiment Name: Zm_42deg_Heat_P Parameter: Timepoint (hr) Value: 6
  misc_feature: MA Experiment 108523 PARAMETER Experiment Name: Zm_42deg_Heat_P Parameter: Tissue Value: Aerial
  misc_feature: MA Experiment ID: 108535 Result: Up-regulated in Transcription
  misc_feature: MA Experiment 108535 PARAMETER Experiment Name: Zm_Meristem_P Parameter: Age (day) Value: 8
  misc_feature: MA Experiment 108535 PARAMETER Experiment Name: Zm_Meristem_P Parameter: Organism Value: Zea mays
  misc_feature: MA Experiment 108535 PARAMETER Experiment Name: Zm_Meristem_P Parameter: Plant Line Value: 35A19
  misc_feature: MA Experiment 108535 PARAMETER Experiment Name: Zm_Meristem_P Parameter: Tissue Value: Root Meristem vs. Above Root Meristem
aaaaccctagcccatcagggcagcgaccttctagaaccgtctccaatggcgctactccgagcgctccggcgagcccttccggcgctctcctcgccggcggcggttctcccccgtcgcgccccgcacccactacctcctccgcccgctcctcgtcggttcctggacccgatcgggctccgctccttctccgccgccgccgccaccgcgtcgcaggcgccgcccatgggggccaccctgttcggcgggctcatggacacccggttcccgaagcgccggccgggcttcgccaaccgccggaagagggctagcttgcgccccaaaggtccgtactactgggtgaagtgcaagcctgacgagcccataccagttagtcagccgaaccaagggagcgtacgagggaggaaggagaagaagcggatcaagcagcgcaaggactttatcatggctgagaagaagaagcgcagagctcagtattctgctgctgttaagagaaaggaggcagaacgaacagaaaggaagatggctgctgtggcaagagagcgggcatgggcagcaaggttgatagagctaaaacagattgaggaagacgttaaagctgtaatggcataagggcctgctctggaaaatggcaaggcgtctaacctgtttctgctgctctattttctcctcctttgttcctacatagtttaaattgtcacaattctttgtgatggaatggaagaccagtaccacttctttcaacagtaatatcaaatgccggaactgtttttttaatacagactctcattagaccatgtttggagtttgtttacttttgatgtaatttagaataagtgatgcgatggtatctgtgtgcttgacatctgagatggctgttgtctgcaatatatagttttggt

SEQ ID NO: 6420 - protein, 202 aa, Zea mays subsp. mays
  peptide (1)..(202): Ceres Seq. ID no. 12403445
  misc_feature (19)..(202): Homolog of NCBI NO: 21553452 NR Description: unknown [Arabidopsis thaliana]
  misc_feature (19)..(202): Homolog of NCBI NO: 18409234 NR Description: expressed protein; protein id: At3g51010.1, by cDNA: 14475. [Arabidopsis thaliana] >gi|11280693|pir||T45732
KTLAHQGSDLLEPSPMALLRALRRALPALSSPAAVLPRRAPHPLPPPPAPRRFLDPIGLRSFSAAAATASQAPPMGATLFGGLMDTRFPKRRPGFANRRKRASLRPKGPYYWVKCKPDEPIPVSQPNQGSVRGRKEKKRIKQRKDFIMAEKKKRRAQYSAAVKRKEAERTERKMAAVARERAWAARLIELKQIEEDVKAVMA

SEQ ID NO: 6421 - protein, 187 aa, Zea mays subsp. mays
  peptide (1)..(187): Ceres Seq. ID no. 12403446
  misc_feature (4)..(187): Homolog of NCBI NO: 21553452 NR Description: unknown [Arabidopsis thaliana]
  misc_feature (4)..(187): Homolog of NCBI NO: 18409234 NR Description: expressed protein; protein id: At3g51010.1, by cDNA: 14475. [Arabidopsis thaliana] >gi|11280693|pir||T45732
MALLRALRRALPALSSPAAVLPRRAPHPLPPPPAPRRFLDPIGLRSFSAAAATASQAPPMGATLFGGLMDTRFPKRRPGFANRRKRASLRPKGPYYWVKCKPDEPIPVSQPNQGSVRGRKEKKRIKQRKDFIMAEKKKRRAQYSAAVKRKEAERTERKMAAVARERAWAARLIELKQIEEDVKAVMA

SEQ ID NO: 6422 - protein, 128 aa, Zea mays subsp. mays
  peptide (1)..(128): Ceres Seq. ID no. 12403447
  misc_feature (1)..(128): Homolog of NCBI NO: 21553452 NR Description: unknown [Arabidopsis thaliana]
  misc_feature (1)..(128): Homolog of NCBI NO: 18409234 NR Description: expressed protein; protein id: At3g51010.1, by cDNA: 14475. [Arabidopsis thaliana] >gi|11280693|pir||T45732
MGATLFGGLMDTRFPKRRPGFANRRKRASLRPKGPYYWVKCKPDEPIPVSQPNQGSVRGRKEKKRIKQRKDFIMAEKKKRRAQYSAAVKRKEAERTERKMAAVARERAWAARLIELKQIEEDVKAVMA

SEQ ID NO: 6423 - DNA, 1073 bp, Zea mays subsp. mays
  misc_feature (1)..(1073): Ceres Seq. ID no. 12368746
  misc_feature: MA Experiment ID: 108528 Result: Up-regulated in Transcription
  misc_feature: MA Experiment 108528 PARAMETER Experiment Name: Zm_Imbibed_Seeds_P Parameter: Age (day) Value: 5 vs. 2
  misc_feature: MA Experiment 108528 PARAMETER Experiment Name: Zm_Imbibed_Seeds_P Parameter: Organism Value: Zea mays
  misc_feature: MA Experiment 108528 PARAMETER Experiment Name: Zm_Imbibed_Seeds_P Parameter: Plant Line Value: 35A19
  misc_feature: MA Experiment 108528 PARAMETER Experiment Name: Zm_Imbibed_Seeds_P Parameter: Tissue Value: Aerial vs. Embryo
  misc_feature: MA Experiment ID: 108536 Result: Down-regulated in Transcription
  misc_feature: MA Experiment 108536 PARAMETER Experiment Name: Zm_Meristem_P Parameter: Age (day) Value: 8
  misc_feature: MA Experiment 108536 PARAMETER Experiment Name: Zm_Meristem_P Parameter: Organism Value: Zea mays
  misc_feature: MA Experiment 108536 PARAMETER Experiment Name: Zm_Meristem_P Parameter: Plant Line Value: 35A19
  misc_feature: MA Experiment 108536 PARAMETER Experiment Name: Zm_Meristem_P Parameter: Tissue Value: Shoot Meristem vs. Above Shoot Meristem
  misc_feature: MA Experiment ID: 108545 Result: Up-regulated in Transcription
  misc_feature: MA Experiment 108545 PARAMETER Experiment Name: Zm_Imbibed_Seeds_P Parameter: Age (day) Value: 3 vs. 2
  misc_feature: MA Experiment 108545 PARAMETER Experiment Name: Zm_Imbibed_Seeds_P Parameter: Organism Value: Zea mays
  misc_feature: MA Experiment 108545 PARAMETER Experiment Name: Zm_Imbibed_Seeds_P Parameter: Plant Line Value: 35A19
  misc_feature: MA Experiment 108545 PARAMETER Experiment Name: Zm_Imbibed_Seeds_P Parameter: Tissue Value: Aerial vs. Embryo
  misc_feature: MA Experiment ID: 108547 Result: Up-regulated in Transcription
  misc_feature: MA Experiment 108547 PARAMETER Experiment Name: Zm_Imbibed_Seeds_P Parameter: Age (day) Value: 4 vs. 2
  misc_feature: MA Experiment 108547 PARAMETER Experiment Name: Zm_Imbibed_Seeds_P Parameter: Organism Value: Zea mays
  misc_feature: MA Experiment 108547 PARAMETER Experiment Name: Zm_Imbibed_Seeds_P Parameter: Plant Line Value: 35A19
  misc_feature: MA Experiment 108547 PARAMETER Experiment Name: Zm_Imbibed_Seeds_P Parameter: Tissue Value: Aerial vs. Embryo
  misc_feature: MA Experiment ID: 20000534 Result: Down-regulated in Transcription
  misc_feature: MA Experiment 20000534 PARAMETER Experiment Name: Zm_Hybrid_Pollen_P Parameter: Age (day) Value: 8
  misc_feature: MA Experiment 20000534 PARAMETER Experiment Name: Zm_Hybrid_Pollen_P Parameter: Organism Value: Zea mays
  misc_feature: MA Experiment 20000534 PARAMETER Experiment Name: Zm_Hybrid_Pollen_P Parameter: Plant Line Value: 35A19
  misc_feature: MA Experiment 20000534 PARAMETER Experiment Name: Zm_Hybrid_Pollen_P Parameter: Tissue Value: Pollen vs. Aerial
  misc_feature: MA Experiment ID: 20000626 Result: Down-regulated in Transcription
  misc_feature: MA Experiment 20000626 PARAMETER Experiment Name: Zm_Herbicide-Treatments_P Parameter: Timepoint (hr) Value: 12
  misc_feature: MA Experiment 20000626 PARAMETER Experiment Name: Zm_Herbicide-Treatments_P Parameter: Tissue Value: Aerial
  misc_feature: MA Experiment 20000626 PARAMETER Experiment Name: Zm_Herbicide-Treatments_P Parameter: Treatment Value: Roundup vs. No Treatment
  misc_feature: MA Experiment ID: 20001606 Result: Up-regulated in Transcription
  misc_feature: MA Experiment 20001606 PARAMETER Experiment Name: Zm_50ppm_KNO3_L-to-H_P Parameter: Age (day) Value: 19
  misc_feature: MA Experiment 20001606 PARAMETER Experiment Name: Zm_50ppm_KNO3_L-to-H_P Parameter: Organism Value: Zea mays
  misc_feature: MA Experiment 20001606 PARAMETER Experiment Name: Zm_50ppm_KNO3_L-to-H_P Parameter: Plant Line Value: 35A19
  misc_feature: MA Experiment 20001606 PARAMETER Experiment Name: Zm_50ppm_KNO3_L-to-H_P Parameter: Timepoint (hr) Value: 8
  misc_feature: MA Experiment 20001606 PARAMETER Experiment Name: Zm_50ppm_KNO3_L-to-H_P Parameter: Tissue Value: Shoots
  misc_feature: MA Experiment 20001606 PARAMETER Experiment Name: Zm_50ppm_KNO3_L-to-H_P Parameter: Treatment Value: 50ppm KNO3 vs. 50ppm KCl
  misc_feature: MA Experiment ID: 20001608 Result: Up-regulated in Transcription
  misc_feature: MA Experiment 20001608 PARAMETER Experiment Name: Zm_50ppm_KNO3_L-to-H_P Parameter: Age (day) Value: 21
  misc_feature: MA Experiment 20001608 PARAMETER Experiment Name: Zm_50ppm_KNO3_L-to-H_P Parameter: Organism Value: Zea mays
  misc_feature: MA Experiment 20001608 PARAMETER Experiment Name: Zm_50ppm_KNO3_L-to-H_P Parameter: Plant Line Value: 35A19
  misc_feature: MA Experiment 20001608 PARAMETER Experiment Name: Zm_50ppm_KNO3_L-to-H_P Parameter: Timepoint (hr) Value: 48
  misc_feature: MA Experiment 20001608 PARAMETER Experiment Name: Zm_50ppm_KNO3_L-to-H_P Parameter: Tissue Value: Shoots
  misc_feature: MA Experiment 20001608 PARAMETER Experiment Name: Zm_50ppm_KNO3_L-to-H_P Parameter: Treatment Value: 50ppm KNO3 vs. 50ppm KCl
  misc_feature: MA Experiment ID: 20001612 Result: Up-regulated in Transcription
  misc_feature: MA Experiment 20001612 PARAMETER Experiment Name: Zm_50ppm_KNO3_L-to-H_P Parameter: Age (day) Value: 19
  misc_feature: MA Experiment 20001612 PARAMETER Experiment Name: Zm_50ppm_KNO3_L-to-H_P Parameter: Organism Value: Zea mays
  misc_feature: MA Experiment 20001612 PARAMETER Experiment Name: Zm_50ppm_KNO3_L-to-H_P Parameter: Plant Line Value: 35A19
  misc_feature: MA Experiment 20001612 PARAMETER Experiment Name: Zm_50ppm_KNO3_L-to-H_P Parameter: Timepoint (hr) Value: 8
  misc_feature: MA Experiment 20001612 PARAMETER Experiment Name: Zm_50ppm_KNO3_L-to-H_P Parameter: Tissue Value: Roots
  misc_feature: MA Experiment 20001612 PARAMETER Experiment Name: Zm_50ppm_KNO3_L-to-H_P Parameter: Treatment Value: 50ppm KNO3 vs. 50ppm KCl
agttggagtcggagaattttggggtaacaggtgggttggcttcttggctgttagaaggaagggcgcctttgtgctgttctcctaatccaaaagtcgcgtgctgtgctctgctctcgcctcgcacggactcgtggtaaaggatggagaccatgtcggctctcgcgaggacggcgccgccccttgctgggaccattcgccggccgtcctgcgcgctgcggccgacggcgtccctctccttcgccgccgcttcaacgacgccccgcggccggctcgggctggggctgagcacggcgccggcggggagcgggagggcggccagggctcgcgccgtcccgcagcgcatcgtcgcctcctcggaggttgagcgaagctacattatgatcaaaccagatggtgttcagcgtggtctggttggagagattatttctcgctttgagaagaaagggtttttgttgaaaggcttaaaacttttccagtgccccaaggacttggcgcaggagcattacaaggatttgaaggataaacctttctttcctaagctgatcgattacataacttctggccctgttgtctgcatggcctgggagggtgctggtgttgttgcatcagctcgcaaattaataggagctactaacccccttcaagctgaaccagggactataaggggtgatcttgcagttcaaactggaaggaacgttgtccatggaagtgatagtcctgataatggcaagcgtgaaattgaactgtggttcaaagaaggcgagctctgccaatgggaatcagttcaagcaccgtggcttatagaataactcttgctaatcatttccagagttgtattcaatgtttttttttgtgttcgtcttgattcaaggagccatgcaagagtgtatgagtttagttcggctaagtaattagctcatgagggcttgaattatcggttctttttgaggattgaggatttttgcaactgaaacctttgatcagttgctcatgttgagaagctaatttcttgtcatatttacatgtaataaagtccctctactacagtaataaattagtatttcctatggtcc

SEQ ID NO: 6424 - protein, 222 aa, Zea mays subsp. mays
  peptide (1)..(222): Ceres Seq. ID no. 12368747
  misc_feature (75)..(212): Pfam Name: Nucleoside diphosphate kinase Pfam Description: Nucleoside diphosphate kinase
  misc_feature (21)..(222): Homolog of NCBI NO: 27807824 NR Description: nucleoside diphosphate kinase [Nicotiana tabacum]
  misc_feature (3)..(222): Homolog of NCBI NO: 21832064 NR Description: nucloside diphosphate kinase 2 [Brassica rapa]
  misc_feature (64)..(222): Homolog of NCBI NO: 266607 NR Description: Nucleoside diphosphate kinase II, chloroplast
  misc_feature (14)..(222): Homolog of NCBI NO: 30697820 NR Description: nucleotide diphosphate kinase Ia (emb|CAB58230.1) thaliana] >gi|12644076|sp|O64903|NDK2_ARATH Nucleoside kinase II, chloroplast precursor (NDK II) (NDP kinase II) (NDPK
  misc_feature (73)..(222): Homolog of NCBI NO: 11260887 NR Description: nucleoside-diphosphate kinase (EC 2.7.4.6) Ia - Arabidopsis thaliana >gi|3063661|gb|AAC14280.1| nucleoside
  misc_feature (14)..(222): Homolog of NCBI NO: 3093480 NR Description: nucleoside diphosphate kinase type 2 [Arabidopsis
  misc_feature (64)..(222): Homolog of NCBI NO: 1346673 NR Description: Nucleoside diphosphate kinase II, chloroplast
  misc_feature (74)..(222): Homolog of NCBI NO: 22297811 NR Description: nucleoside diphosphate kinase
  misc_feature (74)..(222): Homolog of NCBI NO: 585551 NR Description: NUCLEOSIDE DIPHOSPHATE KINASE I (NDK I) (NDP
  misc_feature (75)..(222): Homolog of NCBI NO: 9652119 NR Description: nucleoside diphosphate kinase [Lolium perenne]
METMSALARTAPPLAGTIRRPSCALRPTASLSFAAASTTPRGRLGLGLSTAPAGSGRAARARAVPQRIVASSEVERSYIMIKPDGVQRGLVGEIISRFEKKGFLLKGLKLFQCPKDLAQEHYKDLKDKPFFPKLIDYITSGPVVCMAWEGAGVVASARKLIGATNPLQAEPGTIRGDLAVQTGRNVVHGSDSPDNGKREIELWFKEGELCQWESVQAPWLIE

SEQ ID NO: 6425 - protein, 219 aa, Zea mays subsp. mays
  peptide (1)..(219): Ceres Seq. ID no. 12368748
  misc_feature (72)..(209): Pfam Name: Nucleoside diphosphate kinase Pfam Description: Nucleoside diphosphate kinase
  misc_feature (18)..(219): Homolog of NCBI NO: 27807824 NR Description: nucleoside diphosphate kinase [Nicotiana tabacum]
  misc_feature (1)..(219): Homolog of NCBI NO: 21832064 NR Description: nucloside diphosphate kinase 2 [Brassica rapa]
  misc_feature (61)..(219): Homolog of NCBI NO: 266607 NR Description: Nucleoside diphosphate kinase II, chloroplast
  misc_feature (11)..(219): Homolog of NCBI NO: 30697820 NR Description: nucleotide diphosphate kinase Ia (emb|CAB58230.1) thaliana] >gi|12644076|sp|O64903|NDK2_ARATH Nucleoside kinase II, chloroplast precursor (NDK II) (NDP kinase II) (NDPK
  misc_feature (70)..(219): Homolog of NCBI NO: 11260887 NR Description: nucleoside-diphosphate kinase (EC 2.7.4.6) Ia - Arabidopsis thaliana >gi|3063661|gb|AAC14280.1| nucleoside
  misc_feature (11)..(219): Homolog of NCBI NO: 3093480 NR Description: nucleoside diphosphate kinase type 2 [Arabidopsis
  misc_feature (61)..(219): Homolog of NCBI NO: 1346673 NR Description: Nucleoside diphosphate kinase II, chloroplast
  misc_feature (71)..(219): Homolog of NCBI NO: 22297811 NR Description: nucleoside diphosphate kinase
  misc_feature (71)..(219): Homolog of NCBI NO: 585551 NR Description: NUCLEOSIDE DIPHOSPHATE KINASE I (NDK I) (NDP
  misc_feature (72)..(219): Homolog of NCBI NO: 9652119 NR Description: nucleoside diphosphate kinase [Lolium perenne]
MSALARTAPPLAGTIRRPSCALRPTASLSFAAASTTPRGRLGLGLSTAPAGSGRAARARAVPQRIVASSEVERSYIMIKPDGVQRGLVGEIISRFEKKGFLLKGLKLFQCPKDLAQEHYKDLKDKPFFPKLIDYITSGPVVCMAWEGAGVVASARKLIGATNPLQAEPGTIRGDLAVQTGRNVVHGSDSPDNGKREIELWFKEGELCQWESVQAPWLIE

SEQ ID NO: 6426 - protein, 143 aa, Zea mays subsp. mays
  peptide (1)..(143): Ceres Seq. ID no. 12368749
  misc_feature (1)..(133): Pfam Name: Nucleoside diphosphate kinase Pfam Description: Nucleoside diphosphate kinase
  misc_feature (1)..(143): Homolog of NCBI NO: 27807824 NR Description: nucleoside diphosphate kinase [Nicotiana tabacum]
  misc_feature (1)..(143): Homolog of NCBI NO: 21832064 NR Description: nucloside diphosphate kinase 2 [Brassica rapa]
  misc_feature (1)..(143): Homolog of NCBI NO: 266607 NR Description: Nucleoside diphosphate kinase II, chloroplast
  misc_feature (1)..(143): Homolog of NCBI NO: 30697820 NR Description: nucleotide diphosphate kinase Ia (emb|CAB58230.1) thaliana] >gi|12644076|sp|O64903|NDK2_ARATH Nucleoside kinase II, chloroplast precursor (NDK II) (NDP kinase II) (NDPK
  misc_feature (1)..(143): Homolog of NCBI NO: 11260887 NR Description: nucleoside-diphosphate kinase (EC 2.7.4.6) Ia - Arabidopsis thaliana >gi|3063661|gb|AAC14280.1| nucleoside
  misc_feature (1)..(143): Homolog of NCBI NO: 3093480 NR Description: nucleoside diphosphate kinase type 2 [Arabidopsis
  misc_feature (1)..(143): Homolog of NCBI NO: 1346673 NR Description: Nucleoside diphosphate kinase II, chloroplast
  misc_feature (1)..(143): Homolog of NCBI NO: 22297811 NR Description: nucleoside diphosphate kinase
  misc_feature (1)..(143): Homolog of NCBI NO: 585551 NR Description: NUCLEOSIDE DIPHOSPHATE KINASE I (NDK I) (NDP
  misc_feature (1)..(143): Homolog of NCBI NO: 9652119 NR Description: nucleoside diphosphate kinase [Lolium perenne]
MIKPDGVQRGLVGEIISRFEKKGFLLKGLKLFQCPKDLAQEHYKDLKDKPFFPKLIDYITSGPVVCMAWEGAGVVASARKLIGATNPLQAEPGTIRGDLAVQTGRNVVHGSDSPDNGKREIELWFKEGELCQWESVQAPWLIE

SEQ ID NO: 6427 - DNA, 962 bp, Zea mays subsp. mays
  misc_feature (1)..(962): Ceres Seq. ID no. 12349152
  misc_feature: MA Experiment ID: 108535 Result: Down-regulated in Transcription
  misc_feature: MA Experiment 108535 PARAMETER Experiment Name: Zm_Meristem_P Parameter: Age (day) Value: 8
  misc_feature: MA Experiment 108535 PARAMETER Experiment Name: Zm_Meristem_P Parameter: Organism Value: Zea mays
  misc_feature: MA Experiment 108535 PARAMETER Experiment Name: Zm_Meristem_P Parameter: Plant Line Value: 35A19
  misc_feature: MA Experiment 108535 PARAMETER Experiment Name: Zm_Meristem_P Parameter: Tissue Value: Root Meristem vs. Above Root Meristem
  misc_feature: MA Experiment ID: 108544 Result: Up-regulated in Transcription
  misc_feature: MA Experiment ID: 108687 Result: Down-regulated in Transcription
  misc_feature: MA Experiment 108687 PARAMETER Experiment Name: Zm_Embryos-Flowers__P Parameter: Tissue Value: Embryo vs. Aerial+
  misc_feature: MA Experiment ID: 20000480 Result: Up-regulated in Transcription
  misc_feature: MA Experiment 20000480 PARAMETER Experiment Name: Zm_Drought_P Parameter: Age (day) Value: 11
  misc_feature: MA Experiment 20000480 PARAMETER Experiment Name: Zm_Drought_P Parameter: Organism Value: Zea mays
  misc_feature: MA Experiment 20000480 PARAMETER Experiment Name: Zm_Drought_P Parameter: Plant Line Value: 35A19
  misc_feature: MA Experiment 20000480 PARAMETER Experiment Name: Zm_Drought_P Parameter: Timepoint (hr) Value: 72
  misc_feature: MA Experiment 20000480 PARAMETER Experiment Name: Zm_Drought_P Parameter: Tissue Value: Aerial
  misc_feature: MA Experiment 20000480 PARAMETER Experiment Name: Zm_Drought_P Parameter: Treatment Value: Drought vs. No Drought
  misc_feature: MA Experiment ID: 20000535 Result: Down-regulated in Transcription
  misc_feature: MA Experiment 20000535 PARAMETER Experiment Name: Zm_Hybrid_Seed_Dev_P Parameter: DAP Value: 30 vs. 12
  misc_feature: MA Experiment 20000535 PARAMETER Experiment Name: Zm_Hybrid_Seed_Dev_P Parameter: Organism Value: Zea mays
  misc_feature: MA Experiment 20000535 PARAMETER Experiment Name: Zm_Hybrid_Seed_Dev_P Parameter: Plant Line Value: 35A19
  misc_feature: MA Experiment 20000535 PARAMETER Experiment Name: Zm_Hybrid_Seed_Dev_P Parameter: Tissue Value: Embryo vs. Unfert Floret
  misc_feature: MA Experiment ID: 20001608 Result: Down-regulated in Transcription
  misc_feature: MA Experiment 20001608 PARAMETER Experiment Name: Zm_50ppm_KNO3_L-to-H_P Parameter: Age (day) Value: 21
  misc_feature: MA Experiment 20001608 PARAMETER Experiment Name: Zm_50ppm_KNO3_L-to-H_P Parameter: Organism Value: Zea mays
  misc_feature: MA Experiment 20001608 PARAMETER Experiment Name: Zm_50ppm_KNO3_L-to-H_P Parameter: Plant Line Value: 35A19
  misc_feature: MA Experiment 20001608 PARAMETER Experiment Name: Zm_50ppm_KNO3_L-to-H_P Parameter: Timepoint (hr) Value: 48
  misc_feature: MA Experiment 20001608 PARAMETER Experiment Name: Zm_50ppm_KNO3_L-to-H_P Parameter: Tissue Value: Shoots
  misc_feature: MA Experiment 20001608 PARAMETER Experiment Name: Zm_50ppm_KNO3_L-to-H_P Parameter: Treatment Value: 50ppm KNO3 vs. 50ppm KCl
agtcagtgggatgtgtggatgctaaccagtgcagtggaggattagcgatcttctagaatcgtgtgcgagctggacagcaggaagagccgtagagttcgacgcgaggagcgagcgagtgattagctcgtgcgtgctgtgcaaggaaagtaaccaagcagatcgatcggtcgaggcgggtaggacaggatccagaggtagctagccatggcggaggaagcgtctgcgcctgcggcggggacggaagcgccgccggggaagatgacgatggtggtaggggtcgacgagagcgagcacagcttctacgcgctgcagtgggcactgcagcacttcttcccgccgggccagccgcagcagtaccgcctcgtcgtcgtcaccgccaagcccaccgccgcctccgccgtcggcctcgccggcccaggcgccgcggatgtgctgccgtacgtggaggcggatctcaagcgctccgccctgcgcgtcgtcgaaaaagccaaaggcctctgcacacaggcgagcgacgctgtgtttgaggcgctggagggggacgctaggaacgtcctctgcgaggctgtcgagaggcacggggccgagatgctcgtcgtcggcagccatggttacggagccattaaaagggctgttcttggaagtgtgagcgactactgtgcccatcacgcgcactgcaccgtgatgatagtaaagaagcccaagcagcacaagcactgatcaatgccgactgatcactacgtgtactgcaaataatttgtactactgcaaagttatgtgtgcgtccgtccgtttgtgaataattgggtcatcaaccatcacatcttcggttgcttctacaagtatccgatccaatccttctacgagtggattgggatttacaaataattgattgctctctgaacctgaaaacaatgtatttgtattaatgtgttggaacacgtatatgtagttgcaacttc

SEQ ID NO: 6428 - protein, 171 aa, Zea mays subsp. mays
  peptide (1)..(171): Ceres Seq. ID no. 12349153
  misc_feature (17)..(167): Homolog of NCBI NO: 18407428 NR Description: expressed protein; protein id: At2g47710.1, by cDNA: 2847., supported by cDNA: gi_15451079, supported by
  misc_feature (17)..(167): Homolog of NCBI NO: 21555580 NR Description: unknown [Arabidopsis thaliana]
  misc_feature (10)..(167): Homolog of NCBI NO: 22831145 NR Description: contains ESTs
  misc_feature (10)..(167): Homolog of NCBI NO: 20067187 NR Description: putative universal stress protein USP1 [Oryza
  misc_feature (4)..(168): Homolog of NCBI NO: 18399413 NR Description: ethylene-responsive protein, putative; protein
  misc_feature (4)..(168): Homolog of NCBI NO: 30681955 NR Description: ethylene-responsive protein -related [Arabidopsis >gi|6671949|gb|AAF23209.1|AC016795_22 unknown protein thaliana] >gi|10998131|dbj|BAB03102.1| gene_id:MEC18.3~unknown
  misc_feature (1)..(169): Homolog of NCBI NO: 40539010 NR Description: putative stress-related protein [Oryza sativa
  misc_feature (4)..(168): Homolog of NCBI NO: 21594903 NR Description: ethylene-responsive protein, putative
  misc_feature (10)..(165): Homolog of NCBI NO: 34914610 NR Description: P0520B06.18 [Oryza sativa (japonica
  misc_feature (23)..(171): Homolog of NCBI NO: 38016525 NR Description: fiber protein Fb19 [Gossypium barbadense]
MAEEASAPAAGTEAPPGKMTMVVGVDESEHSFYALQWALQHFFPPGQPQQYRLVVVTAKPTAASAVGLAGPGAADVLPYVEADLKRSALRVVEKAKGLCTQASDAVFEALEGDARNVLCEAVERHGAEMLVVGSHGYGAIKRAVLGSVSDYCAHHAHCTVMIVKKPKQHKH

SEQ ID NO: 6429 - protein, 153 aa, Zea mays subsp. mays
  peptide (1)..(153): Ceres Seq. ID no. 12349154
  misc_feature (5)..(153): Homolog of NCBI NO: 38016525 NR Description: fiber protein Fb19 [Gossypium barbadense]
  misc_feature (1)..(149): Homolog of NCBI NO: 18407428 NR Description: expressed protein; protein id: At2g47710.1, by cDNA: 2847., supported by cDNA: gi_15451079, supported by
  misc_feature (1)..(149): Homolog of NCBI NO: 21555580 NR Description: unknown [Arabidopsis thaliana]
  misc_feature (1)..(149): Homolog of NCBI NO: 22831145 NR Description: contains ESTs
  misc_feature (1)..(149): Homolog of NCBI NO: 20067187 NR Description: putative universal stress protein USP1 [Oryza
  misc_feature (1)..(150): Homolog of NCBI NO: 18399413 NR Description: ethylene-responsive protein, putative; protein
  misc_feature (1)..(150): Homolog of NCBI NO: 30681955 NR Description: ethylene-responsive protein -related [Arabidopsis >gi|6671949|gb|AAF23209.1|AC016795_22 unknown protein thaliana] >gi|10998131|dbj|BAB03102.1| gene_id:MEC18.3~unknown
  misc_feature (1)..(151): Homolog of NCBI NO: 40539010 NR Description: putative stress-related protein [Oryza sativa
  misc_feature (1)..(150): Homolog of NCBI NO: 21594903 NR Description: ethylene-responsive protein, putative
  misc_feature (1)..(147): Homolog of NCBI NO: 34914610 NR Description: P0520B06.18 [Oryza sativa (japonica
MTMVVGVDESEHSFYALQWALQHFFPPGQPQQYRLVVVTAKPTAASAVGLAGPGAADVLPYVEADLKRSALRVVEKAKGLCTQASDAVFEALEGDARNVLCEAVERHGAEMLVVGSHGYGAIKRAVLGSVSDYCAHHAHCTVMIVKKPKQHKH

SEQ ID NO: 6430 - protein, 151 aa, Zea mays subsp. mays
  peptide (1)..(151): Ceres Seq. ID no. 12349155
  misc_feature (3)..(151): Homolog of NCBI NO: 38016525 NR Description: fiber protein Fb19 [Gossypium barbadense]
  misc_feature (1)..(147): Homolog of NCBI NO: 18407428 NR Description: expressed protein; protein id: At2g47710.1, by cDNA: 2847., supported by cDNA: gi_15451079, supported by
  misc_feature (1)..(147): Homolog of NCBI NO: 21555580 NR Description: unknown [Arabidopsis thaliana]
  misc_feature (1)..(147): Homolog of NCBI NO: 22831145 NR Description: contains ESTs
  misc_feature (1)..(147): Homolog of NCBI NO: 20067187 NR Description: putative universal stress protein USP1 [Oryza
  misc_feature (1)..(148): Homolog of NCBI NO: 18399413 NR Description: ethylene-responsive protein, putative; protein
  misc_feature (1)..(148): Homolog of NCBI NO: 30681955 NR Description: ethylene-responsive protein -related [Arabidopsis >gi|6671949|gb|AAF23209.1|AC016795_22 unknown protein thaliana] >gi|10998131|dbj|BAB03102.1| gene_id:MEC18.3~unknown
  misc_feature (1)..(149): Homolog of NCBI NO: 40539010 NR Description: putative stress-related protein [Oryza sativa
  misc_feature (1)..(148): Homolog of NCBI NO: 21594903 NR Description: ethylene-responsive protein, putative
  misc_feature (1)..(145): Homolog of NCBI NO: 34914610 NR Description: P0520B06.18 [Oryza sativa (japonica
MVVGVDESEHSFYALQWALQHFFPPGQPQQYRLVVVTAKPTAASAVGLAGPGAADVLPYVEADLKRSALRVVEKAKGLCTQASDAVFEALEGDARNVLCEAVERHGAEMLVVGSHGYGAIKRAVLGSVSDYCAHHAHCTVMIVKKPKQHKH

SEQ ID NO: 6431 - DNA, 934 bp, Zea mays subsp. mays
  misc_feature (1)..(934): Ceres Seq. ID no. 12368601
  misc_feature: MA Experiment ID: 108528 Result: Down-regulated in Transcription
  misc_feature: MA Experiment 108528 PARAMETER Experiment Name: Zm_Imbibed_Seeds_P Parameter: Age (day) Value: 5 vs. 2
  misc_feature: MA Experiment 108528 PARAMETER Experiment Name: Zm_Imbibed_Seeds_P Parameter: Organism Value: Zea mays
  misc_feature: MA Experiment 108528 PARAMETER Experiment Name: Zm_Imbibed_Seeds_P Parameter: Plant Line Value: 35A19
  misc_feature: MA Experiment 108528 PARAMETER Experiment Name: Zm_Imbibed_Seeds_P Parameter: Tissue Value: Aerial vs. Embryo
  misc_feature: MA Experiment ID: 108543 Result: Down-regulated in Transcription
  misc_feature: MA Experiment ID: 108544 Result: Down-regulated in Transcription
  misc_feature: MA Experiment ID: 20000535 Result: Up-regulated in Transcription
  misc_feature: MA Experiment 20000535 PARAMETER Experiment Name: Zm_Hybrid_Seed_Dev_P Parameter: DAP Value: 30 vs. 12
  misc_feature: MA Experiment 20000535 PARAMETER Experiment Name: Zm_Hybrid_Seed_Dev_P Parameter: Organism Value: Zea mays
  misc_feature: MA Experiment 20000535 PARAMETER Experiment Name: Zm_Hybrid_Seed_Dev_P Parameter: Plant Line Value: 35A19
  misc_feature: MA Experiment 20000535 PARAMETER Experiment Name: Zm_Hybrid_Seed_Dev_P Parameter: Tissue Value: Embryo vs. Unfert Floret
tactctctctctctgcctgcaaagctgcttgatccatcatcgatcacatcactccaccagccgcagcgcacgtaacgtacgactcatggcagatcgcgaccgcagcggcatctacggcggacgagcgcctacgggcagcagcaggggggcggccgcccgatgggtgagcaggtgaagggcatgatccacgacaaggggccgacggcgtcccaggcgctgacggtggcgacgctgttccctctgggcgggctgctcctggtgctgtcgggcctggcgctggcggcctccacggtggggctggccctggccacgcccgtgttcctgctcttcagccccgtgctcgtccccgccgcgctgctcatcggcacggccgtcgcggggttcctcacgtcgggcgcgctggggctcggcggcctgtcctcgctcacgtgcctcgccaacacggcgcggcaggcgttccagcgcaccccggactacgtcgaggaggcgcgccgcaggatggcggaggccgcggcgcacgcgggccacaagaccgcgcaggccgggcacggcatccagagcaaggcgcaggaggccggtgctggcactggcgccggcggcggcaggacttcctcgtaaataagcaaatcatccatggatgcgtgcgtgtcaatgtcagcagggtcgtcgtggaatgctcttctctgtacgtgggtaaccgtcttttggtcgtcttccccgagtgcgtgataaatatcctggtgttcgtcgtgtgtggtgctgccctaggctggggcctggggtcggctgtgtaccggtatctgttcatcgccgctccgtcgcgttcggagatgtgaataagtgatgtgaaggttaagtttcagctttgctattgctattgtggcttgtgcatcagcggtttgctcgttgactgttatggaaataagcattgggg

SEQ ID NO: 6432 - protein, 152 aa, Zea mays subsp. mays
  peptide (1)..(152): Ceres Seq. ID no. 12368602
  misc_feature (15)..(132): Pfam Name: Oleosin Pfam Description: Oleosin
  misc_feature (1)..(152): Homolog of NCBI NO: 1076818 NR Description: oleosin 17 - maize >gi|687247|gb|AAA68066.1| 17
  misc_feature (1)..(152): Homolog of NCBI NO: 129081 NR Description: Oleosin Zm-II (Oleosin 18 kDa) (Lipid
  misc_feature (1)..(152): Homolog of NCBI NO: 28273373 NR Description: oleosin [Oryza sativa (japonica cultivar-group)]
  misc_feature (1)..(152): Homolog of NCBI NO: 3334279 NR Description: OLEOSIN 18 KD (OSE721) >gi|7442011|pir||T03380 >gi|4102969|gb|AAD10240.1| 18 kDa oleosin [Oryza sativa subsp.
  misc_feature (1)..(152): Homolog of NCBI NO: 1362166 NR Description: oleosin 1 - barley >gi|963062|emb|CAA57994.1|
  misc_feature (1)..(152): Homolog of NCBI NO: 82051 NR Description: lipid body-associated membrane protein - carrot
  misc_feature (1)..(150): Homolog of NCBI NO: 9963897 NR Description: oleosin [Perilla frutescens]
  misc_feature (1)..(150): Homolog of NCBI NO: 10880961 NR Description: 19 kDa oleosin [Perilla frutescens]
  misc_feature (1)..(150): Homolog of NCBI NO: 22651523 NR Description: oleosin [Olea europaea subsp. europaea]
  misc_feature (1)..(138): Homolog of NCBI NO: 13161008 NR Description: oleosin variant B [Arachis hypogaea]
MGEQVKGMIHDKGPTASQALTVATLFPLGGLLLVLSGLALAASTVGLALATPVFLLFSPVLVPAALLIGTAVAGFLTSGALGLGGLSSLTCLANTARQAFQRTPDYVEEARRRMAEAAAHAGHKTAQAGHGIQSKAQEAGAGTGAGGGRTSS

SEQ ID NO: 6433 - protein, 145 aa, Zea mays subsp. mays
  peptide (1)..(145): Ceres Seq. ID no. 12368603
  misc_feature (8)..(125): Pfam Name: Oleosin Pfam Description: Oleosin
  misc_feature (1)..(145): Homolog of NCBI NO: 1076818 NR Description: oleosin 17 - maize >gi|687247|gb|AAA68066.1| 17
  misc_feature (1)..(145): Homolog of NCBI NO: 129081 NR Description: Oleosin Zm-II (Oleosin 18 kDa) (Lipid
  misc_feature (1)..(145): Homolog of NCBI NO: 28273373 NR Description: oleosin [Oryza sativa (japonica cultivar-group)]
  misc_feature (1)..(145): Homolog of NCBI NO: 3334279 NR Description: OLEOSIN 18 KD (OSE721) >gi|7442011|pir||T03380 >gi|4102969|gb|AAD10240.1| 18 kDa oleosin [Oryza sativa subsp.
  misc_feature (1)..(145): Homolog of NCBI NO: 1362166 NR Description: oleosin 1 - barley >gi|963062|emb|CAA57994.1|
  misc_feature (1)..(145): Homolog of NCBI NO: 82051 NR Description: lipid body-associated membrane protein - carrot
  misc_feature (1)..(143): Homolog of NCBI NO: 9963897 NR Description: oleosin [Perilla frutescens]
  misc_feature (1)..(143): Homolog of NCBI NO: 10880961 NR Description: 19 kDa oleosin [Perilla frutescens]
  misc_feature (1)..(143): Homolog of NCBI NO: 22651523 NR Description: oleosin [Olea europaea subsp. europaea]
  misc_feature (1)..(131): Homolog of NCBI NO: 13161008 NR Description: oleosin variant B [Arachis hypogaea]
MIHDKGPTASQALTVATLFPLGGLLLVLSGLALAASTVGLALATPVFLLFSPVLVPAALLIGTAVAGFLTSGALGLGGLSSLTCLANTARQAFQRTPDYVEEARRRMAEAAAHAGHKTAQAGHGIQSKAQEAGAGTGAGGGRTSS

SEQ ID NO: 6434 - DNA, 2103 bp, Zea mays subsp. mays
  misc_feature (1)..(2103): Ceres Seq. ID no. 12343158
  misc_feature: MA Experiment ID: 108522 Result: Down-regulated in Transcription
  misc_feature: MA Experiment 108522 PARAMETER Experiment Name: Zm_42deg_Heat_P Parameter: Age (day) Value: 8
  misc_feature: MA Experiment 108522 PARAMETER Experiment Name: Zm_42deg_Heat_P Parameter: Organism Value: Zea mays
  misc_feature: MA Experiment 108522 PARAMETER Experiment Name: Zm_42deg_Heat_P Parameter: Plant Line Value: 35A19
  misc_feature: MA Experiment 108522 PARAMETER Experiment Name: Zm_42deg_Heat_P Parameter: Temperature (deg C) Value: 42 vs. 22
  misc_feature: MA Experiment 108522 PARAMETER Experiment Name: Zm_42deg_Heat_P Parameter: Timepoint (hr) Value: 1
  misc_feature: MA Experiment 108522 PARAMETER Experiment Name: Zm_42deg_Heat_P Parameter: Tissue Value: Aerial
acattggaacgcgaacgctctcggatccatccacctccaaagtccaaaagcgaagcctacgcccgccccaacggtgaaaacgtcggaaccctagatccctctcacggtcgcgcctgtgctccaaaaccttagatccgacatgcatcagcccagagcccgctacccacccgggtatggctccagcgggggaggcggtggcgggggaggcggtagtggaggaggaagaggaggcagcggcggcggaggaaaccacaactactacggccggaacacacatccacagcatcaacaccactaccagcagcagcagcagcactcgcataggaactcctcgcaccagcagcagtggctgcggcgagaccagggccccgccgttgcggggccagtgtctggaaacgctgtgcctaagacggcgcctcagcttgacgctgttgactcgagttctcaagattggaaggctcaactaaatataccagctccagacacacgctacaggacagaggatgtcactgcaacaaaaggcaatgagtttgaggattatttcttgaaacgtgagttgcttatgggaatatatgagaagggatttgaaaggccatctcctattcaagaagaaagcattcctattgcgttgactggaagtgatattcttgcaagggcgaaaaatggcactggaaagactgctgccttttgcattccggcacttgaaaaaattgatcctgaaaataatgcaattcaagttgttatactagtaccaacaagggaactggctctgcaaacttcacaagtgtgtaaagagcttgggaaatacctaaacattgaagttatggttagcactggaggaaccagcttgaaggatgacatcatgcgtttataccaacctgttcatctactcgttgggactcctggccgaatacttgatcttaccaggaagggcatttgtgtgctgaaagattgttcaatgcttgtcatggatgaggcagacaagctattagctccagagtttcagccttctgtggaggcacttattcatttccttccacctagtcgacaactgttgatgttttcagcaacctttcctgtaactgtcaaggaattcaaagagaaatatctgcctagaccttatgtgattaatctaatggacgaactgaccctgaaaggaatcacacaatattatgcttttgttgaagaaaggcagaaagttcattgcctgaatacacttttctcaaagcttcaaattaatcaatccattatattctgcaactctgttaatagagttgagctgctggctaaaaaaataactgaactcggttattcatgcttctacattcatgctaagatgttgcaagaccacagaaatcgagtatttcatgattttcgtaatggtgcttgcagaaaccttgtgtgcacagatctgtttaccagaggaattgatattcaggctgttaatgtggttattaattttgacttccctaagacatctgagacatatttacacagggttggccgttctgggagatatggacaccttggtttagcagtgaacttgatcacttatgaggaccgtttcaacttgtataggattgagcaagagcttggaacagaaattaagacaatacccccgcagatcgacctggccgtatactgccaatgatgaatgcgacattcaggagcatcaaacacttctctttctatttgagaaacttatcaggcaaatacgtttgtacatagcaacccatcagggctttgttttggcaccttgatgacgtttgtaagcttacctggattagtagaggaagtgcttcctgtaggcactgatactaacccgtttagctgaggacatgcacgctgggctgcttggaggcccagaactatgatgagatgagacaatatcttacctcacttgacattttcactcgacttgtttgccagtctcagttctacttgacttgcctgttctcatttgattcatcttccgttttcttctttcctaatgttatgatgcatatggatgtctttctgtagctgtatgatgtgttgagtttattttttcttggtgtatgtatacagcttaacttgaaattatttccatatcaacttctttgc

SEQ ID NO: 6435 - protein, 503 aa, Zea mays subsp. mays
  peptide (1)..(503): Ceres Seq. ID no. 12343159
  misc_feature (142)..(344): Pfam Name: DEAD/DEAH box helicase Pfam Description: DEAD/DEAH box helicase
  misc_feature (8)..(503): Homolog of NCBI NO: 37535822 NR Description: putative RNA helicase [Oryza sativa (japonica group)] >gi|10140782|gb|AAG13612.1| putative RNA helicase [Oryza
  misc_feature (8)..(503): Homolog of NCBI NO: 22758337 NR Description: putative RNA helicase [Oryza sativa (japonica
  misc_feature (4)..(503): Homolog of NCBI NO: 32489827 NR Description: OSJNBb0039L24.10 [Oryza sativa (japonica
  misc_feature (5)..(503): Homolog of NCBI NO: 22328183 NR Description: DEAD/DEAH box RNA helicase, putative; protein id: supported by cDNA: gi_19423938, supported by cDNA: gi_21280838 thaliana] >gi|19423939|gb|AAL87312.1| putative RNA putative RNA
  misc_feature (5)..(503): Homolog of NCBI NO: 11267537 NR Description: RNA helicase RH8 [imported] - Arabidopsis
  misc_feature (5)..(503): Homolog of NCBI NO: 7436453 NR Description: probable RNA helicase (EC 3.6.1.-) F6N23.6 -
  misc_feature (1)..(503): Homolog of NCBI NO: 15233064 NR Description: DEAD/DEAH box RNA helicase, putative; protein id:
  misc_feature (41)..(503): Homolog of NCBI NO: 15225898 NR Description: DEAD/DEAH box RNA helicase, putative; protein id:
  misc_feature (1)..(503): Homolog of NCBI NO: 11267538 NR Description: RNA helicase RH12 [imported] - Arabidopsis
  misc_feature (41)..(503): Homolog of NCBI NO: 14532476 NR Description: At2g45810/F4I18.21 [Arabidopsis thaliana]
MHQPRARYPPGYGSSGGGGGGGGGSGGGRGGSGGGGNHNYYGRNTHPQHQHHYQQQQQHSHRNSSHQQQWLRRDQGPAVAGPVSGNAVPKTAPQLDAVDSSSQDWKAQLNIPAPDTRYRTEDVTATKGNEFEDYFLKRELLMGIYEKGFERPSPIQEESIPIALTGSDILARAKNGTGKTAAFCIPALEKIDPENNAIQVVILVPTRELALQTSQVCKELGKYLNIEVMVSTGGTSLKDDIMRLYQPVHLLVGTPGRILDLTRKGICVLKDCSMLVMDEADKLLAPEFQPSVEALIHFLPPSRQLLMFSATFPVTVKEFKEKYLPRPYVINLMDELTLKGITQYYAFVEERQKVHCLNTLFSKLQINQSIIFCNSVNRVELLAKKITELGYSCFYIHAKMLQDHRNRVFHDFRNGACRNLVCTDLFTRGIDIQAVNVVINFDFPKTSETYLHRVGRSGRYGHLGLAVNLITYEDRFNLYRIEQELGTEIKTIPPQIDLAVYCQ

SEQ ID NO: 6436 - protein, 362 aa, Zea mays subsp. mays
  peptide (1)..(362): Ceres Seq. ID no. 12343160
  misc_feature (1)..(203): Pfam Name: DEAD/DEAH box helicase Pfam Description: DEAD/DEAH box helicase
  misc_feature (1)..(362): Homolog of NCBI NO: 37535822 NR Description: putative RNA helicase [Oryza sativa (japonica group)] >gi|10140782|gb|AAG13612.1| putative RNA helicase [Oryza
  misc_feature (1)..(362): Homolog of NCBI NO: 22758337 NR Description: putative RNA helicase [Oryza sativa (japonica
  misc_feature (1)..(362): Homolog of NCBI NO: 32489827 NR Description: OSJNBb0039L24.10 [Oryza sativa (japonica
  misc_feature (1)..(362): Homolog of NCBI NO: 22328183 NR Description: DEAD/DEAH box RNA helicase, putative; protein id: supported by cDNA: gi_19423938, supported by cDNA: gi_21280838 thaliana] >gi|19423939|gb|AAL87312.1| putative RNA putative RNA
  misc_feature (1)..(362): Homolog of NCBI NO: 11267537 NR Description: RNA helicase RH8 [imported] - Arabidopsis
  misc_feature (1)..(362): Homolog of NCBI NO: 7436453 NR Description: probable RNA helicase (EC 3.6.1.-) F6N23.6 -
  misc_feature (1)..(362): Homolog of NCBI NO: 15233064 NR Description: DEAD/DEAH box RNA helicase, putative; protein id:
  misc_feature (1)..(362): Homolog of NCBI NO: 15225898 NR Description: DEAD/DEAH box RNA helicase, putative; protein id:
  misc_feature (1)..(362): Homolog of NCBI NO: 11267538 NR Description: RNA helicase RH12 [imported] - Arabidopsis
  misc_feature (1)..(362): Homolog of NCBI NO: 14532476 NR Description: At2g45810/F4I18.21 [Arabidopsis thaliana]
MGIYEKGFERPSPIQEESIPIALTGSDILARAKNGTGKTAAFCIPALEKIDPENNAIQVVILVPTRELALQTSQVCKELGKYLNIEVMVSTGGTSLKDDIMRLYQPVHLLVGTPGRILDLTRKGICVLKDCSMLVMDEADKLLAPEFQPSVEALIHFLPPSRQLLMFSATFPVTVKEFKEKYLPRPYVINLMDELTLKGITQYYAFVEERQKVHCLNTLFSKLQINQSIIFCNSVNRVELLAKKITELGYSCFYIHAKMLQDHRNRVFHDFRNGACRNLVCTDLFTRGIDIQAVNVVINFDFPKTSETYLHRVGRSGRYGHLGLAVNLITYEDRFNLYRIEQELGTEIKTIPPQIDLAVYCQ

SEQ ID NO: 6437 - protein, 275 aa, Zea mays subsp. mays
  peptide (1)..(275): Ceres Seq. ID no. 12343161
  misc_feature (1)..(116): Pfam Name: DEAD/DEAH box helicase Pfam Description: DEAD/DEAH box helicase
  misc_feature (1)..(275): Homolog of NCBI NO: 37535822 NR Description: putative RNA helicase [Oryza sativa (japonica group)] >gi|10140782|gb|AAG13612.1| putative RNA helicase [Oryza
  misc_feature (1)..(275): Homolog of NCBI NO: 22758337 NR Description: putative RNA helicase [Oryza sativa (japonica
  misc_feature (1)..(275): Homolog of NCBI NO: 32489827 NR Description: OSJNBb0039L24.10 [Oryza sativa (japonica
  misc_feature (1)..(275): Homolog of NCBI NO: 22328183 NR Description: DEAD/DEAH box RNA helicase, putative; protein id: supported by cDNA: gi_19423938, supported by cDNA: gi_21280838 thaliana] >gi|19423939|gb|AAL87312.1| putative RNA putative RNA
  misc_feature (1)..(275): Homolog of NCBI NO: 11267537 NR Description: RNA helicase RH8 [imported] - Arabidopsis
  misc_feature (1)..(275): Homolog of NCBI NO: 7436453 NR Description: probable RNA helicase (EC 3.6.1.-) F6N23.6 -
  misc_feature (1)..(275): Homolog of NCBI NO: 15233064 NR Description: DEAD/DEAH box RNA helicase, putative; protein id:
  misc_feature (1)..(275): Homolog of NCBI NO: 15225898 NR Description: DEAD/DEAH box RNA helicase, putative; protein id:
  misc_feature (1)..(275): Homolog of NCBI NO: 11267538 NR Description: RNA helicase RH12 [imported] - Arabidopsis
  misc_feature (1)..(275): Homolog of NCBI NO: 14532476 NR Description: At2g45810/F4I18.21 [Arabidopsis thaliana]
MVSTGGTSLKDDIMRLYQPVHLLVGTPGRILDLTRKGICVLKDCSMLVMDEADKLLAPEFQPSVEALIHFLPPSRQLLMFSATFPVTVKEFKEKYLPRPYVINLMDELTLKGITQYYAFVEERQKVHCLNTLFSKLQINQSIIFCNSVNRVELLAKKITELGYSCFYIHAKMLQDHRNRVFHDFRNGACRNLVCTDLFTRGIDIQAVNVVINFDFPKTSETYLHRVGRSGRYGHLGLAVNLITYEDRFNLYRIEQELGTEIKTIPPQIDLAVYCQ

SEQ ID NO: 6438 - DNA, 1697 bp, Zea mays subsp. mays
  misc_feature (1)..(1697): Ceres Seq. ID no. 12387264
  misc_feature: MA Experiment ID: 108528 Result: Up-regulated in Transcription
  misc_feature: MA Experiment 108528 PARAMETER Experiment Name: Zm_Imbibed_Seeds_P Parameter: Age (day) Value: 5 vs. 2
  misc_feature: MA Experiment 108528 PARAMETER Experiment Name: Zm_Imbibed_Seeds_P Parameter: Organism Value: Zea mays
  misc_feature: MA Experiment 108528 PARAMETER Experiment Name: Zm_Imbibed_Seeds_P Parameter: Plant Line Value: 35A19
  misc_feature: MA Experiment 108528 PARAMETER Experiment Name: Zm_Imbibed_Seeds_P Parameter: Tissue Value: Aerial vs. Embryo
  misc_feature: MA Experiment ID: 108530 Result: Up-regulated in Transcription
  misc_feature: MA Experiment 108530 PARAMETER Experiment Name: Zm_Imbibed_Seeds_P Parameter: Age (day) Value: 6 vs. 2
  misc_feature: MA Experiment 108530 PARAMETER Experiment Name: Zm_Imbibed_Seeds_P Parameter: Organism Value: Zea mays
  misc_feature: MA Experiment 108530 PARAMETER Experiment Name: Zm_Imbibed_Seeds_P Parameter: Plant Line Value: 35A19
  misc_feature: MA Experiment 108530 PARAMETER Experiment Name: Zm_Imbibed_Seeds_P Parameter: Tissue Value: Aerial vs. Embryo
  misc_feature: MA Experiment ID: 108535 Result: Down-regulated in Transcription
  misc_feature: MA Experiment 108535 PARAMETER Experiment Name: Zm_Meristem_P Parameter: Age (day) Value: 8
  misc_feature: MA Experiment 108535 PARAMETER Experiment Name: Zm_Meristem_P Parameter: Organism Value: Zea mays
  misc_feature: MA Experiment 108535 PARAMETER Experiment Name: Zm_Meristem_P Parameter: Plant Line Value: 35A19
  misc_feature: MA Experiment 108535 PARAMETER Experiment Name: Zm_Meristem_P Parameter: Tissue Value: Root Meristem vs. Above Root Meristem
  misc_feature: MA Experiment ID: 108536 Result: Down-regulated in Transcription
  misc_feature: MA Experiment 108536 PARAMETER Experiment Name: Zm_Meristem_P Parameter: Age (day) Value: 8
  misc_feature: MA Experiment 108536 PARAMETER Experiment Name: Zm_Meristem_P Parameter: Organism Value: Zea mays
  misc_feature: MA Experiment 108536 PARAMETER Experiment Name: Zm_Meristem_P Parameter: Plant Line Value: 35A19
  misc_feature: MA Experiment 108536 PARAMETER Experiment Name: Zm_Meristem_P Parameter: Tissue Value: Shoot Meristem vs. Above Shoot Meristem
  misc_feature: MA Experiment ID: 108543 Result: Up-regulated in Transcription
  misc_feature: MA Experiment ID: 108546 Result: Down-regulated in Transcription
  misc_feature: MA Experiment 108546 PARAMETER Experiment Name: Zm_Imbibed_Seeds_P Parameter: Age (day) Value: 3 vs. 2
  misc_feature: MA Experiment 108546 PARAMETER Experiment Name: Zm_Imbibed_Seeds_P Parameter: Organism Value: Zea mays
  misc_feature: MA Experiment 108546 PARAMETER Experiment Name: Zm_Imbibed_Seeds_P Parameter: Plant Line Value: 35A19
  misc_feature: MA Experiment 108546 PARAMETER Experiment Name: Zm_Imbibed_Seeds_P Parameter: Tissue Value: Roots vs. Embryo
  misc_feature: MA Experiment ID: 108547 Result: Up-regulated in Transcription
  misc_feature: MA Experiment 108547 PARAMETER Experiment Name: Zm_Imbibed_Seeds_P Parameter: Age (day) Value: 4 vs. 2
  misc_feature: MA Experiment 108547 PARAMETER Experiment Name: Zm_Imbibed_Seeds_P Parameter: Organism Value: Zea mays
  misc_feature: MA Experiment 108547 PARAMETER Experiment Name: Zm_Imbibed_Seeds_P Parameter: Plant Line Value: 35A19
  misc_feature: MA Experiment 108547 PARAMETER Experiment Name: Zm_Imbibed_Seeds_P Parameter: Tissue Value: Aerial vs. Embryo
  misc_feature: MA Experiment ID: 108556 Result: Down-regulated in Transcription
  misc_feature: MA Experiment 108556 PARAMETER Experiment Name: Zm_Drought_P Parameter: Age (day) Value: 9
  misc_feature: MA Experiment 108556 PARAMETER Experiment Name: Zm_Drought_P Parameter: Organism Value: Zea mays
  misc_feature: MA Experiment 108556 PARAMETER Experiment Name: Zm_Drought_P Parameter: Plant Line Value: 35A19
  misc_feature: MA Experiment 108556 PARAMETER Experiment Name: Zm_Drought_P Parameter: Timepoint (hr) Value: 24
  misc_feature: MA Experiment 108556 PARAMETER Experiment Name: Zm_Drought_P Parameter: Tissue Value: Aerial
  misc_feature: MA Experiment 108556 PARAMETER Experiment Name: Zm_Drought_P Parameter: Treatment Value: Drought vs. No Drought
  misc_feature: MA Experiment ID: 108559 Result: Down-regulated in Transcription
  misc_feature: MA Experiment 108559 PARAMETER Experiment Name: Zm_5mM_NO_P Parameter: Age (day) Value: 8
  misc_feature: MA Experiment 108559 PARAMETER Experiment Name: Zm_5mM_NO_P Parameter: Organism Value: Zea mays
  misc_feature: MA Experiment 108559 PARAMETER Experiment Name: Zm_5mM_NO_P Parameter: Plant Line Value: 35A19
  misc_feature: MA Experiment 108559 PARAMETER Experiment Name: Zm_5mM_NO_P Parameter: Timepoint (hr) Value: 12
  misc_feature: MA Experiment 108559 PARAMETER Experiment Name: Zm_5mM_NO_P Parameter: Tissue Value: Aerial
  misc_feature: MA Experiment 108559 PARAMETER Experiment Name: Zm_5mM_NO_P Parameter: Treatment Value: 5mM NO vs. No Treatment
  misc_feature: MA Experiment ID: 108597 Result: Down-regulated in Transcription
  misc_feature: MA Experiment 108597 PARAMETER Experiment Name: Zm_100uM_ABA_P Parameter: Age (day) Value: 9
  misc_feature: MA Experiment 108597 PARAMETER Experiment Name: Zm_100uM_ABA_P Parameter: Organism Value: Zea mays
  misc_feature: MA Experiment 108597 PARAMETER Experiment Name: Zm_100uM_ABA_P Parameter: Plant Line Value: 35A19
  misc_feature: MA Experiment 108597 PARAMETER Experiment Name: Zm_100uM_ABA_P Parameter: Timepoint (hr) Value: 24
  misc_feature: MA Experiment 108597 PARAMETER Experiment Name: Zm_100uM_ABA_P Parameter: Tissue Value: Aerial
  misc_feature: MA Experiment 108597 PARAMETER Experiment Name: Zm_100uM_ABA_P Parameter: Treatment Value: 100uM ABA vs. No Treatment
  misc_feature: MA Experiment ID: 108687 Result: Down-regulated in Transcription
  misc_feature: MA Experiment 108687 PARAMETER Experiment Name: Zm_Embryos-Flowers__P Parameter: Tissue Value: Embryo vs. Aerial+
  misc_feature: MA Experiment ID: 108688 Result: Down-regulated in Transcription
  misc_feature: MA Experiment 108688 PARAMETER Experiment Name: Zm_Embryos-Flowers__P Parameter: Tissue Value: Immature Flowers vs. Aerial+
  misc_feature: MA Experiment ID: 108689 Result: Up-regulated in Transcription
  misc_feature: MA Experiment 108689 PARAMETER Experiment Name: Zm_Drought_Roots_P Parameter: Age (day) Value: 9
  misc_feature: MA Experiment 108689 PARAMETER Experiment Name: Zm_Drought_Roots_P Parameter: Organism Value: Zea mays
  misc_feature: MA Experiment 108689 PARAMETER Experiment Name: Zm_Drought_Roots_P Parameter: Plant Line Value: 35A19
  misc_feature: MA Experiment 108689 PARAMETER Experiment Name: Zm_Drought_Roots_P Parameter: Timepoint (hr) Value: 24
  misc_feature: MA Experiment 108689 PARAMETER Experiment Name: Zm_Drought_Roots_P Parameter: Tissue Value: Roots
  misc_feature: MA Experiment 108689 PARAMETER Experiment Name: Zm_Drought_Roots_P Parameter: Treatment Value: Drought vs. No Drought
  misc_feature: MA Experiment ID: 20000108 Result: Down-regulated in Transcription
  misc_feature: MA Experiment 20000108 PARAMETER Experiment Name: Zm_Root-Tips_P Parameter: Age (day) Value: 12
  misc_feature: MA Experiment 20000108 PARAMETER Experiment Name: Zm_Root-Tips_P Parameter: Organism Value: Zea mays
  misc_feature: MA Experiment 20000108 PARAMETER Experiment Name: Zm_Root-Tips_P Parameter: Tissue Value: Root tips vs. Root mid region    35
  misc_feature: MA Experiment 20000108 PARAMETER Experiment Name: Zm_Root-Tips_P Parameter: Tissue Value: Root tips vs. Root mid region   Sequence Listing-Misc Features (4)
  misc_feature: MA Experiment ID: 20000477 Result: Down-regulated in Transcription
  misc_feature: MA Experiment 20000477 PARAMETER Experiment Name: Zm_5mM_SA_P Parameter: Age (day) Value: 10
  misc_feature: MA Experiment 20000477 PARAMETER Experiment Name: Zm_5mM_SA_P Parameter: Organism Value: Zea mays
  misc_feature: MA Experiment 20000477 PARAMETER Experiment Name: Zm_5mM_SA_P Parameter: Plant Line Value: 35A19
  misc_feature: MA Experiment 20000477 PARAMETER Experiment Name: Zm_5mM_SA_P Parameter: Timepoint (hr) Value: 48
  misc_feature: MA Experiment 20000477 PARAMETER Experiment Name: Zm_5mM_SA_P Parameter: Tissue Value: Aerial
  misc_feature: MA Experiment 20000477 PARAMETER Experiment Name: Zm_5mM_SA_P Parameter: Treatment Value: 5mM SA vs. No Treatment
  misc_feature: MA Experiment ID: 20000478 Result: Down-regulated in Transcription
  misc_feature: MA Experiment 20000478 PARAMETER Experiment Name: Zm_5mM_SA_P Parameter: Age (day) Value: 11
  misc_feature: MA Experiment 20000478 PARAMETER Experiment Name: Zm_5mM_SA_P Parameter: Organism Value: Zea mays
  misc_feature: MA Experiment 20000478 PARAMETER Experiment Name: Zm_5mM_SA_P Parameter: Plant Line Value: 35A19
  misc_feature: MA Experiment 20000478 PARAMETER Experiment Name: Zm_5mM_SA_P Parameter: Timepoint (hr) Value: 72
  misc_feature: MA Experiment 20000478 PARAMETER Experiment Name: Zm_5mM_SA_P Parameter: Tissue Value: Aerial
  misc_feature: MA Experiment 20000478 PARAMETER Experiment Name: Zm_5mM_SA_P Parameter: Treatment Value: 5mM SA vs. No Treatment
  misc_feature: MA Experiment ID: 20000492 Result: Down-regulated in Transcription
  misc_feature: MA Experiment 20000492 PARAMETER Experiment Name: Zm_Hybrid_Seed_Dev_P Parameter: DAP Value: 12
  misc_feature: MA Experiment 20000492 PARAMETER Experiment Name: Zm_Hybrid_Seed_Dev_P Parameter: Organism Value: Zea mays
  misc_feature: MA Experiment 20000492 PARAMETER Experiment Name: Zm_Hybrid_Seed_Dev_P Parameter: Plant Line Value: 35A19
  misc_feature: MA Experiment 20000492 PARAMETER Experiment Name: Zm_Hybrid_Seed_Dev_P Parameter: Tissue Value: Fert Kernel vs. Unfert Floret
  misc_feature: MA Experiment ID: 20000535 Result: Down-regulated in Transcription
  misc_feature: MA Experiment 20000535 PARAMETER Experiment Name: Zm_Hybrid_Seed_Dev_P Parameter: DAP Value: 30 vs. 12
  misc_feature: MA Experiment 20000535 PARAMETER Experiment Name: Zm_Hybrid_Seed_Dev_P Parameter: Organism Value: Zea mays
  misc_feature: MA Experiment 20000535 PARAMETER Experiment Name: Zm_Hybrid_Seed_Dev_P Parameter: Plant Line Value: 35A19
  misc_feature: MA Experiment 20000535 PARAMETER Experiment Name: Zm_Hybrid_Seed_Dev_P Parameter: Tissue Value: Embryo vs. Unfert Floret
gtacctccggcgccccctccgacaccggtcctccggcctgcgcaggctagctagctctatataccaccgtgcctccgccgcgcaggcaggggagatccaagggtccgagcaaaaggccggcggcggcgagccagccagccagctaaagcgatcaatatatacatatatactatcgagcaacaagaaagaaaggaaaaaagaaggcaagcccaccagggccggcgaagagaggagctaataaggaaggaaggaaggaaggaaggaagatgatgagcaaggaggcagtggtgaacgcgttcctgggctgcttcatgcacgtggggctggcgctggtgctcgccgtctacctccccgtggcctttgtgtgccgcctcctccaccgcctcctcgtccgccccttcgccaggggcgaggacctccgcggcaaggtcatcctcgtcaccggcgcgtcctccggcatcggcgagcacctggtgtacgagtacgcgaggcacggcgcgtgcgtggcgctggtggcgcgcacggaggtggcgctgcgcgccgtggccaaggcggcgcgcgacctgggcgcccccgacgtgctggtcgtgccggccgacgtcaccaaggtcgacgacgccaagcgcgccgtcgaggagaccgtcgcgcacttcggcaaactgaatcacttggtggccaaacgccgggatctggtccagctgcttctttgaagagatcaccaacataaccgccttccataatgttattgatctcaacttctggggtgccgtgtacccgacctacttcgcgctgccgtacctcaaggccagccggggcaacatcgtggtgaccgcctccgtcgccggcagggtgccgacagccaggatgagcttctacaacgcaagcaaaggcgccgtgatacgtttctacgagacgctgagggctgagctggggtcccacgtgcacgtcaccatcctcacgcccggctacgtcgtctccaacctcaccaagggcaagggcctccagaaggacggccatgtcggcatcgacgaggaggcccgcgacgtacgtgatgagctcgatccaccgccctccctttatttatataatttcctcctcctacgtgcacgcgaacagtacagctacagcgacgaaatggcatgcatgcgcgcgcgcgcttgcagatcaacgtggggccgatgccggtgggcaagacggagtcgctggccgaggtggtggtggccagcgtgcgccgtcgggactactacgtcacgtggcccggctggtactggcccttccacatggtcatgtgcgccgcgccggagctggtggactggttctcccgcaccttctacgtctccaagtccggcgaccaggacggcggcggcggcgcgctcagcaagaagatcctggaggccgtcggcgggaagaagttcctctacccccagaccatacgctcacagaccgccatggcagccaataactgacaacttgcattgcactgtgttatatatatgtcattcatgagaatgcacggtcgatctgttgtttggattagaacacggtgatgatcgaacgggccagcacgggtcaaattgtttattcgtttcgtttcggattttttttccatttcctctgccttttctccacttccgattttacaaatggtcaatgtgtatcaagtaattaatacgaatgttcattcgtggttggcttgc

SEQ ID NO: 6439 - protein, 213 aa, Zea mays subsp. mays
  peptide (1)..(213): Ceres Seq. ID no. 12387265
  misc_feature (1)..(62): Homolog of NCBI NO: 18423187 NR Description: 11-beta-hydroxysteroid dehydrogenase-like; id: At5g50600.1, supported by cDNA: gi_15450584, supported by gi_17065383, supported by cDNA: gi_17386149, supported by cDNA:
  misc_feature (1)..(67): Homolog of NCBI NO: 15824408 NR Description: steroleosin [Sesamum indicum]
  misc_feature (1)..(61): Homolog of NCBI NO: 21311775 NR Description: steroleosin-B [Sesamum indicum]
  misc_feature (1)..(61): Homolog of NCBI NO: 15234888 NR Description: putative oxidoreductase; protein id: At4g10020.1
  misc_feature (1)..(70): Homolog of NCBI NO: 15241261 NR Description: putative protein; protein id: At5g50770.1 thaliana] >gi|8777400|dbj|BAA96990.1| contains similarity to
  misc_feature (1)..(41): Homolog of NCBI NO: 15232777 NR Description: putative protein; protein id: At3g47350.1
  misc_feature (1)..(41): Homolog of NCBI NO: 8777392 NR Description: 11-beta-hydroxysteroid dehydrogenase-like
  misc_feature (1)..(41): Homolog of NCBI NO: 15241203 NR Description: 11-beta-hydroxysteroid dehydrogenase-like;
  misc_feature (1)..(50): Homolog of NCBI NO: 15232779 NR Description: putative protein; protein id: At3g47360.1
  misc_feature (1)..(42): Homolog of NCBI NO: 24372033 NR Description: oxidoreductase, short chain
MSFYNASKGAVIRFYETLRAELGSHVHVTILTPGYVVSNLTKGKGLQKDGHVGIDEEARDVRDELDPPPSLYLYNFLLLRAREQYSYSDEMACMRARACRSTWGRCRWARRSRWPRWWWPACAVGTTTSRGPAGTGPSTWSCAPRRSWWTGSPAPSTSPSPATRTAAAARSARRSWRPSAGRSSSTPRPYAHRPPWQPITDNLHCTVLYICHS

SEQ ID NO: 6440 - protein, 148 aa, Zea mays subsp. mays
  peptide (1)..(148): Ceres Seq. ID no. 12387266
MSASTRRPATYVMSSIHRPPFIYIISSSYVHANSTATATKWHACARALADQRGADAGGQDGVAGRGGGGQRAPSGLLRHVARLVLALPHGHVRRAGAGGLVLPHLLRLQVRRPGRRRRRAQQEDPGGRRREEVPLPPDHTLTDRHGSQ

SEQ ID NO: 6441 - protein, 147 aa, Zea mays subsp. mays
  peptide (1)..(147): Ceres Seq. ID no. 12387267
  misc_feature (7)..(136): Homolog of NCBI NO: 18423187 NR Description: 11-beta-hydroxysteroid dehydrogenase-like; id: At5g50600.1, supported by cDNA: gi_15450584, supported by gi_17065383, supported by cDNA: gi_17386149, supported by cDNA:
  misc_feature (7)..(136): Homolog of NCBI NO: 15824408 NR Description: steroleosin [Sesamum indicum]
  misc_feature (7)..(136): Homolog of NCBI NO: 21311775 NR Description: steroleosin-B [Sesamum indicum]
  misc_feature (7)..(136): Homolog of NCBI NO: 15234888 NR Description: putative oxidoreductase; protein id: At4g10020.1
  misc_feature (49)..(136): Homolog of NCBI NO: 15241261 NR Description: putative protein; protein id: At5g50770.1 thaliana] >gi|8777400|dbj|BAA96990.1| contains similarity to
  misc_feature (24)..(136): Homolog of NCBI NO: 15232777 NR Description: putative protein; protein id: At3g47350.1
  misc_feature (24)..(136): Homolog of NCBI NO: 8777392 NR Description: 11-beta-hydroxysteroid dehydrogenase-like
  misc_feature (24)..(136): Homolog of NCBI NO: 15241203 NR Description: 11-beta-hydroxysteroid dehydrogenase-like;
  misc_feature (22)..(136): Homolog of NCBI NO: 15232779 NR Description: putative protein; protein id: At3g47360.1
  misc_feature (49)..(136): Homolog of NCBI NO: 24372033 NR Description: oxidoreductase, short chain
MMSKEAVVNAFLGCFMHVGLALVLAVYLPVAFVCRLLHRLLVRPFARGEDLRGKVILVTGASSGIGEHLVYEYARHGACVALVARTEVALRAVAKAARDLGAPDVLVVPADVTKVDDAKRAVEETVAHFGKLNHLVAKRRDLVQLLL

SEQ ID NO: 6442 - DNA, 1517 bp, Zea mays subsp. mays
  misc_feature (1)..(1517): Ceres Seq. ID no. 12404731
  misc_feature: MA Experiment ID: 108543 Result: Up-regulated in Transcription
acacaatcacgctacagagcgcagagctgcacgctccaccggcgaactcacctcggccgccctcctctgccagatagcctccctctactattcaagcccaaaccctaaatcctcggttcccaaatggcgacgccgccgactgcgctgctgttgctcctcgcggcggcagcggcattccacggcgcgacggcgaagacgacgatcgagccgtgctctggcgcggacgcgtgcccggctcttctgggctacaagctctacgcggacatgaaggtgtccgaggtggcggcgctcttcggcgccgacccggcagcggtactggctgccaacgcgctcgacttcgcctctccaggcgccgccaaccgcatcctccccgcgggaacacccctccgcgtgcccacccgctgcgcctgcgccgacggcgtccgcaagtccgtcgccatccgctacgccgcccggccttccgacacgctcggctccatctccgaggtcgtcttcgccggcctcccctcggccgaccagatccgcaccgccaacgggctcgccgccgaggaccccgacgcgccgctcaacccgggccaggagctcgtcatcccgctcccctgcgtctgcttcaactccaccgacaacaacctccccgctgtgtacctctcctatgtcgtgcaggtcggggacaccgtggaatccatcgccgccagccacacaaccaccgtcactgatatcagcaatgtgaacgccatggggagccccattgtcgcaccaggcgacatccttgccataccattgtctgcttgtgcctcagcatttcctaactctgcttcggactatggattgcttgtggcaaatggaacctatgcactgactgctggtaactgtgtggagtgcagttgtgggccagcgaatctcaatttgtattgcatgccgtcttcactatcagcatcatgttcaagtatgcaatgctctaatagcagcctaattcttggtaatgtgactgcacaacccaccactggtggctgcagtgtctcatcttgcaactatggtggctatgtcaatggaaccattgcaacatcgctatcctcaggtcttcaacccatgtgtccaggaccgcatcaatttcccccactcacggcggtgccaactgcggcaaaccatgggtcttattccccatcacctgcaccaggacctggagatgctggtggtgccaccccaggaggttccagcctttctccatcaaatgagcctgctgggaacagctcacaagcggctgcgataaatcaaccatgccgtttcctcctcattttcattctttctgtgacattgtccttgcgggtgtggattcctgtgtagagtattgttttttttaaataactatgtagagtatttgttggctgtatttgtattgagcgtggaaggccttatttggggccaggtggaacctgaatgaagaatgcagtagcctgtcttcgttagtgtccggtgaaactttggtatgattttggtttctccagaatttgtatatg

SEQ ID NO: 6443 - protein, 406 aa, Zea mays subsp. mays
  peptide (1)..(406): Ceres Seq. ID no. 12404732
  misc_feature (177)..(219): Pfam Name: LysM domain Pfam Description: LysM domain
  misc_feature (177)..(219): Pfam Name: LysM domain Pfam Description: LysM domain
  misc_feature (10)..(396): Homolog of NCBI NO: 18395044 NR Description: expressed protein; protein id: At1g21880.1, by cDNA: gi_15982869 [Arabidopsis thaliana]
  misc_feature (1)..(375): Homolog of NCBI NO: 30699276 NR Description: expressed protein [Arabidopsis thaliana]
  misc_feature (10)..(314): Homolog of NCBI NO: 30687570 NR Description: expressed protein [Arabidopsis thaliana]
  misc_feature (1)..(375): Homolog of NCBI NO: 25406518 NR Description: unknown protein T5M16.22 [imported] - Arabidopsis
  misc_feature (30)..(325): Homolog of NCBI NO: 28207683 NR Description: Erwinia induced protein 1 [Solanum tuberosum]
  misc_feature (1)..(375): Homolog of NCBI NO: 30699276 NR Description: expressed protein [Arabidopsis thaliana]
  misc_feature (1)..(375): Homolog of NCBI NO: 25406518 NR Description: unknown protein T5M16.22 [imported] - Arabidopsis
  misc_feature (187)..(385): Homolog of NCBI NO: 13592175 NR Description: ppg3 [Leishmania major]
  misc_feature (323)..(380): Homolog of NCBI NO: 1084362 NR Description: extensin-like protein S3 - alfalfa
  misc_feature (1)..(330): Homolog of NCBI NO: 21593990 NR Description: unknown [Arabidopsis thaliana]
  misc_feature (1)..(330): Homolog of NCBI NO: 18398317 NR Description: expressed protein; protein id: At2g17120.1, by cDNA: 6280., supported by cDNA: gi_15810364, supported by
  misc_feature (1)..(324): Homolog of NCBI NO: 22758281 NR Description: Unknown protein [Oryza sativa (japonica
  misc_feature (30)..(325): Homolog of NCBI NO: 28207683 NR Description: Erwinia induced protein 1 [Solanum tuberosum]
  misc_feature (10)..(314): Homolog of NCBI NO: 30687570 NR Description: expressed protein [Arabidopsis thaliana]
  misc_feature (10)..(396): Homolog of NCBI NO: 18395044 NR Description: expressed protein; protein id: At1g21880.1, by cDNA: gi_15982869 [Arabidopsis thaliana]
  misc_feature (1)..(324): Homolog of NCBI NO: 22758281 NR Description: Unknown protein [Oryza sativa (japonica
  misc_feature (1)..(330): Homolog of NCBI NO: 18398317 NR Description: expressed protein; protein id: At2g17120.1, by cDNA: 6280., supported by cDNA: gi_15810364, supported by
  misc_feature (1)..(330): Homolog of NCBI NO: 21593990 NR Description: unknown [Arabidopsis thaliana]
  misc_feature (323)..(380): Homolog of NCBI NO: 1084362 NR Description: extensin-like protein S3 - alfalfa
  misc_feature (187)..(385): Homolog of NCBI NO: 13592175 NR Description: ppg3 [Leishmania major]
MATPPTALLLLLAAAAAFHGATAKTTIEPCSGADACPALLGYKLYADMKVSEVAALFGADPAAVLAANALDFASPGAANRILPAGTPLRVPTRCACADGVRKSVAIRYAARPSDTLGSISEVVFAGLPSADQIRTANGLAAEDPDAPLNPGQELVIPLPCVCFNSTDNNLPAVYLSYVVQVGDTVESIAASHTTTVTDISNVNAMGSPIVAPGDILAIPLSACASAFPNSASDYGLLVANGTYALTAGNCVECSCGPANLNLYCMPSSLSASCSSMQCSNSSLILGNVTAQPTTGGCSVSSCNYGGYVNGTIATSLSSGLQPMCPGPHQFPPLTAVPTAANHGSYSPSPAPGPGDAGGATPGGSSLSPSNEPAGNSSQAAAINQPCRFLLIFILSVTLSLRVWIPV

SEQ ID NO: 6444 - protein, 359 aa, Zea mays subsp. mays
  peptide (1)..(359): Ceres Seq. ID no. 12404733
  misc_feature (130)..(172): Pfam Name: LysM domain Pfam Description: LysM domain
  misc_feature (130)..(172): Pfam Name: LysM domain Pfam Description: LysM domain
  misc_feature (1)..(349): Homolog of NCBI NO: 18395044 NR Description: expressed protein; protein id: At1g21880.1, by cDNA: gi_15982869 [Arabidopsis thaliana]
  misc_feature (1)..(328): Homolog of NCBI NO: 30699276 NR Description: expressed protein [Arabidopsis thaliana]
  misc_feature (1)..(267): Homolog of NCBI NO: 30687570 NR Description: expressed protein [Arabidopsis thaliana]
  misc_feature (1)..(328): Homolog of NCBI NO: 25406518 NR Description: unknown protein T5M16.22 [imported] - Arabidopsis
  misc_feature (1)..(278): Homolog of NCBI NO: 28207683 NR Description: Erwinia induced protein 1 [Solanum tuberosum]
  misc_feature (1)..(277): Homolog of NCBI NO: 22758281 NR Description: Unknown protein [Oryza sativa (japonica
  misc_feature (1)..(283): Homolog of NCBI NO: 18398317 NR Description: expressed protein; protein id: At2g17120.1, by cDNA: 6280., supported by cDNA: gi_15810364, supported by
  misc_feature (1)..(283): Homolog of NCBI NO: 21593990 NR Description: unknown [Arabidopsis thaliana]
  misc_feature (276)..(333): Homolog of NCBI NO: 1084362 NR Description: extensin-like protein S3 - alfalfa
  misc_feature (140)..(338): Homolog of NCBI NO: 13592175 NR Description: ppg3 [Leishmania major]
  misc_feature (1)..(328): Homolog of NCBI NO: 30699276 NR Description: expressed protein [Arabidopsis thaliana]
  misc_feature (1)..(267): Homolog of NCBI NO: 30687570 NR Description: expressed protein [Arabidopsis thaliana]
  misc_feature (1)..(328): Homolog of NCBI NO: 25406518 NR Description: unknown protein T5M16.22 [imported] - Arabidopsis
  misc_feature (1)..(278): Homolog of NCBI NO: 28207683 NR Description: Erwinia induced protein 1 [Solanum tuberosum]
  misc_feature (1)..(277): Homolog of NCBI NO: 22758281 NR Description: Unknown protein [Oryza sativa (japonica
  misc_feature (1)..(283): Homolog of NCBI NO: 18398317 NR Description: expressed protein; protein id: At2g17120.1, by cDNA: 6280., supported by cDNA: gi_15810364, supported by
  misc_feature (1)..(349): Homolog of NCBI NO: 18395044 NR Description: expressed protein; protein id: At1g21880.1, by cDNA: gi_15982869 [Arabidopsis thaliana]
  misc_feature (1)..(283): Homolog of NCBI NO: 21593990 NR Description: unknown [Arabidopsis thaliana]
  misc_feature (276)..(333): Homolog of NCBI NO: 1084362 NR Description: extensin-like protein S3 - alfalfa
  misc_feature (140)..(338): Homolog of NCBI NO: 13592175 NR Description: ppg3 [Leishmania major]
MKVSEVAALFGADPAAVLAANALDFASPGAANRILPAGTPLRVPTRCACADGVRKSVAIRYAARPSDTLGSISEVVFAGLPSADQIRTANGLAAEDPDAPLNPGQELVIPLPCVCFNSTDNNLPAVYLSYVVQVGDTVESIAASHTTTVTDISNVNAMGSPIVAPGDILAIPLSACASAFPNSASDYGLLVANGTYALTAGNCVECSCGPANLNLYCMPSSLSASCSSMQCSNSSLILGNVTAQPTTGGCSVSSCNYGGYVNGTIATSLSSGLQPMCPGPHQFPPLTAVPTAANHGSYSPSPAPGPGDAGGATPGGSSLSPSNEPAGNSSQAAAINQPCRFLLIFILSVTLSLRVWIPV

SEQ ID NO: 6445 - DNA, 1061 bp, Zea mays subsp. mays
  misc_feature (1)..(1061): Ceres Seq. ID no. 13598842
  misc_feature: MA Experiment ID: 108522 Result: Down-regulated in Transcription
  misc_feature: MA Experiment 108522 PARAMETER Experiment Name: Zm_42deg_Heat_P Parameter: Age (day) Value: 8
  misc_feature: MA Experiment 108522 PARAMETER Experiment Name: Zm_42deg_Heat_P Parameter: Organism Value: Zea mays
  misc_feature: MA Experiment 108522 PARAMETER Experiment Name: Zm_42deg_Heat_P Parameter: Plant Line Value: 35A19
  misc_feature: MA Experiment 108522 PARAMETER Experiment Name: Zm_42deg_Heat_P Parameter: Temperature (deg C) Value: 42 vs. 22
  misc_feature: MA Experiment 108522 PARAMETER Experiment Name: Zm_42deg_Heat_P Parameter: Timepoint (hr) Value: 1
  misc_feature: MA Experiment 108522 PARAMETER Experiment Name: Zm_42deg_Heat_P Parameter: Tissue Value: Aerial
  misc_feature: MA Experiment ID: 108535 Result: Up-regulated in Transcription
  misc_feature: MA Experiment 108535 PARAMETER Experiment Name: Zm_Meristem_P Parameter: Age (day) Value: 8
  misc_feature: MA Experiment 108535 PARAMETER Experiment Name: Zm_Meristem_P Parameter: Organism Value: Zea mays
  misc_feature: MA Experiment 108535 PARAMETER Experiment Name: Zm_Meristem_P Parameter: Plant Line Value: 35A19
  misc_feature: MA Experiment 108535 PARAMETER Experiment Name: Zm_Meristem_P Parameter: Tissue Value: Root Meristem vs. Above Root Meristem
  misc_feature: MA Experiment ID: 20000487 Result: Up-regulated in Transcription
  misc_feature: MA Experiment 20000487 PARAMETER Experiment Name: Zm_50mM_NH4NO3_L_to_H_P Parameter: Organism Value: Zea mays
  misc_feature: MA Experiment 20000487 PARAMETER Experiment Name: Zm_50mM_NH4NO3_L_to_H_P Parameter: Timepoint (hr) Value: 4
  misc_feature: MA Experiment 20000487 PARAMETER Experiment Name: Zm_50mM_NH4NO3_L_to_H_P Parameter: Tissue Value: Leaves
  misc_feature: MA Experiment 20000487 PARAMETER Experiment Name: Zm_50mM_NH4NO3_L_to_H_P Parameter: Treatment Value: 50mM NH4NO3 vs. 100mM Mannitol
  misc_feature: MA Experiment ID: 20000488 Result: Up-regulated in Transcription
  misc_feature: MA Experiment 20000488 PARAMETER Experiment Name: Zm_50mM_NH4NO3_L_to_H_P Parameter: Organism Value: Zea mays
  misc_feature: MA Experiment 20000488 PARAMETER Experiment Name: Zm_50mM_NH4NO3_L_to_H_P Parameter: Timepoint (hr) Value: 8
  misc_feature: MA Experiment 20000488 PARAMETER Experiment Name: Zm_50mM_NH4NO3_L_to_H_P Parameter: Tissue Value: Leaves
  misc_feature: MA Experiment 20000488 PARAMETER Experiment Name: Zm_50mM_NH4NO3_L_to_H_P Parameter: Treatment Value: 50mM NH4NO3 vs. 100mM Mannitol
  misc_feature: MA Experiment ID: 20000492 Result: Up-regulated in Transcription
  misc_feature: MA Experiment 20000492 PARAMETER Experiment Name: Zm_Hybrid_Seed_Dev_P Parameter: DAP Value: 12
  misc_feature: MA Experiment 20000492 PARAMETER Experiment Name: Zm_Hybrid_Seed_Dev_P Parameter: Organism Value: Zea mays
  misc_feature: MA Experiment 20000492 PARAMETER Experiment Name: Zm_Hybrid_Seed_Dev_P Parameter: Plant Line Value: 35A19
  misc_feature: MA Experiment 20000492 PARAMETER Experiment Name: Zm_Hybrid_Seed_Dev_P Parameter: Tissue Value: Fert Kernel vs. Unfert Floret
  misc_feature: MA Experiment ID: 20001606 Result: Up-regulated in Transcription
  misc_feature: MA Experiment 20001606 PARAMETER Experiment Name: Zm_50ppm_KNO3_L-to-H_P Parameter: Age (day) Value: 19
  misc_feature: MA Experiment 20001606 PARAMETER Experiment Name: Zm_50ppm_KNO3_L-to-H_P Parameter: Organism Value: Zea mays
  misc_feature: MA Experiment 20001606 PARAMETER Experiment Name: Zm_50ppm_KNO3_L-to-H_P Parameter: Plant Line Value: 35A19
  misc_feature: MA Experiment 20001606 PARAMETER Experiment Name: Zm_50ppm_KNO3_L-to-H_P Parameter: Timepoint (hr) Value: 8
  misc_feature: MA Experiment 20001606 PARAMETER Experiment Name: Zm_50ppm_KNO3_L-to-H_P Parameter: Tissue Value: Shoots
  misc_feature: MA Experiment 20001606 PARAMETER Experiment Name: Zm_50ppm_KNO3_L-to-H_P Parameter: Treatment Value: 50ppm KNO3 vs. 50ppm KCl
gtgtctcctctcttcttcctccgctccacttcctgcacccgcttcttcccccaaaggccaaaaccctaaatctcctccctccctccctccaaacacctagctgccgccggttcccgcgtatgggagggtcgcggcgcaaattgaagcgctcgcgcactaaggtccgcgtggggcttccccgccggaaacccaatgaattcaaggcggccttcgaactccccgaggcactcgccgccgccgccggggccggggcgggctgggacgcggagggcagcgtagtgaagaactacgccgcgttcggggtggtggccaacccaaacctactcggtgcgcactcccgcggcacgccgcggctcgtccagagcgcggcgctgcaggcgcccgacgtcgccgccgcgcatgcacccgtcccggagttcgagccaatcgataccggcagcgatctcgagaacgacgacctgaagtctgctcttgggaagaaaaggaaggatggcaaatctgcaccattgcaaccacttactaaagttcaacgtgtttgcattggcagattaatagagaagtacggtgatgactacaaggccatgttcatggataccaagctgaacgcgatgcagcactctgtgggtacattgaagaaactatgcgaaagacaccacgttgatggcaagatctttgtctatccactttagtattgtgccggcacctacttcagcctcagtgtactcttttcgtcccgttaatggaacaagaacaattttgcaatttgccccaaagaggaagccgcaattcagaactattgtgtacttaanaaaaaaaaaaaaaaaaaaaaaaaaaaaaaaaaaaaaaaaaaaaaaaaaaaaaaaaaaaaaaaaaaaaaaaaaaaaaaaaaaaaaaaaaaaaaaaaagaagaatttttaaaaaaaaaaaaaattttttccccccccccccccggggggggggggcgggccccctttccccctttggggggggtttttccccgccccccgggggggggtttttaccccggggggggggggaaaccccggggggccccccttttt

SEQ ID NO: 6446 - protein, 228 aa, Zea mays subsp. mays
  peptide (1)..(228): Ceres Seq. ID no. 13598843
  misc_feature (40)..(219): Homolog of NCBI NO: 18379024 NR Description: expressed protein [Arabidopsis thaliana] unknown protein [Arabidopsis thaliana] unknown [Arabidopsis thaliana] >gi|30102920|gb|AAP21378.1|
  misc_feature (40)..(151): Homolog of NCBI NO: 25372996 NR Description: hypothetical protein F22D16.13 - Arabidopsis >gi|6056416|gb|AAF02880.1|AC009525_14 Unknown protein
VSSLLPPLHFLHPLLPPKAKTLNLLPPSLQTPSCRRFPRMGGSRRKLKRSRTKVRVGLPRRKPNEFKAAFELPEALAAAAGAGAGWDAEGSVVKNYAAFGVVANPNLLGAHSRGTPRLVQSAALQAPDVAAAHAPVPEFEPIDTGSDLENDDLKSALGKKRKDGKSAPLQPLTKVQRVCIGRLIEKYGDDYKAMFMDTKLNAMQHSVGTLKKLCERHHVDGKIFVYPL

SEQ ID NO: 6447 - protein, 189 aa, Zea mays subsp. mays
  peptide (1)..(189): Ceres Seq. ID no. 13598844
  misc_feature (1)..(180): Homolog of NCBI NO: 18379024 NR Description: expressed protein [Arabidopsis thaliana] unknown protein [Arabidopsis thaliana] unknown [Arabidopsis thaliana] >gi|30102920|gb|AAP21378.1|
  misc_feature (1)..(112): Homolog of NCBI NO: 25372996 NR Description: hypothetical protein F22D16.13 - Arabidopsis >gi|6056416|gb|AAF02880.1|AC009525_14 Unknown protein
MGGSRRKLKRSRTKVRVGLPRRKPNEFKAAFELPEALAAAAGAGAGWDAEGSVVKNYAAFGVVANPNLLGAHSRGTPRLVQSAALQAPDVAAAHAPVPEFEPIDTGSDLENDDLKSALGKKRKDGKSAPLQPLTKVQRVCIGRLIEKYGDDYKAMFMDTKLNAMQHSVGTLKKLCERHHVDGKIFVYPL

SEQ ID NO: 6448 - DNA, 889 bp, Zea mays subsp. mays
  misc_feature (1)..(889): Ceres Seq. ID no. 12365562
  misc_feature: MA Experiment ID: 108543 Result: Up-regulated in Transcription
  misc_feature: MA Experiment ID: 108544 Result: Down-regulated in Transcription
  misc_feature: MA Experiment ID: 108689 Result: Up-regulated in Transcription
  misc_feature: MA Experiment 108689 PARAMETER Experiment Name: Zm_Drought_Roots_P Parameter: Age (day) Value: 9
  misc_feature: MA Experiment 108689 PARAMETER Experiment Name: Zm_Drought_Roots_P Parameter: Organism Value: Zea mays
  misc_feature: MA Experiment 108689 PARAMETER Experiment Name: Zm_Drought_Roots_P Parameter: Plant Line Value: 35A19
  misc_feature: MA Experiment 108689 PARAMETER Experiment Name: Zm_Drought_Roots_P Parameter: Timepoint (hr) Value: 24
  misc_feature: MA Experiment 108689 PARAMETER Experiment Name: Zm_Drought_Roots_P Parameter: Tissue Value: Roots
  misc_feature: MA Experiment 108689 PARAMETER Experiment Name: Zm_Drought_Roots_P Parameter: Treatment Value: Drought vs. No Drought
gttttacaaaaggcactaggcaccacctttcgtggcttcctctgctctcctccacaaaggcagggaagcagcaacactgtagcagggaggagagggtaggcagtctgtccactgtccacgctgcagaagagagagatgggggtgcgggcggcggcggcagcagtggcgctggtggcgatgatgggcatgctggcgccccgagcggcggcgcagacgccgaactgcgcggcgaagctggtcccgtgctcgtcgtacatgaacacgacggggacgccgccggacacctgctgcggcccgctcaaggacgccgtcaagaacgacctcaagtgcctctgcgatctctacgccacgccggagatcttcaaggccttcaacatcagcctcgacgaggccctcggcctctccaagcgttgcggcctcagcgacaccaccgccgcctgcaagggcctttcacctacccaatctcctccaggttcaccatcaggtggtggcagtggcagcaactccggtcatcacactctgtcggtcggtttctcaggattcatgagcttcttgtcgctagccttgtggtctgtattagcataaagtttaggatgctgcagtggacattgcctgtcttatcccacaagatgatttgcacctacgacacaatcaacatttgtcttgctgtgtattgatatggccagccagtagactgatgtctctgaaccatgtgcttgcattagactgcacaattggtccttcgcccaattgttccaaagagtgcttccatgaacttagaccgaagagtgtctccaaggtcagctgtgggaaggttcttaagtccttcgcccaattgttccaaacctctgcaagattattggtaatgtgatcacattttatctcctcc

SEQ ID NO: 6449 - protein, 224 aa, Zea mays subsp. mays
  peptide (1)..(224): Ceres Seq. ID no. 12365563
FTKGTRHHLSWLPLLSSTKAGKQQHCSREERVGSLSTVHAAEERDGGAGGGGSSGAGGDDGHAGAPSGGADAELRGEAGPVLVVHEHDGDAAGHLLRPAQGRRQERPQVPLRSLRHAGDLQGLQHQPRRGPRPLQALRPQRHHRRLQGPFTYPISSRFTIRWWQWQQLRSSHSVGRFLRIHELLVASLVVCISIKFRMLQWTLPVLSHKMICTYDTINICLAVY

SEQ ID NO: 6450 - protein, 149 aa, Zea mays subsp. mays
  peptide (1)..(149): Ceres Seq. ID no. 12365564
  misc_feature (30)..(102): Pfam Name: Protease inhibitor/seed storage/LTP family Pfam Description: Protease inhibitor/seed storage/LTP family
  misc_feature (9)..(142): Homolog of NCBI NO: 15221585 NR Description: unknown protein; protein id: At1g62790.1
  misc_feature (9)..(141): Homolog of NCBI NO: 30696757 NR Description: protease inhibitor/seed storage/lipid transfer
  misc_feature (9)..(104): Homolog of NCBI NO: 6630451 NR Description: F23N19.16 [Arabidopsis thaliana]
  misc_feature (7)..(141): Homolog of NCBI NO: 18410388 NR Description: lipid transfer protein, putative; protein id:
  misc_feature (1)..(141): Homolog of NCBI NO: 21593596 NR Description: lipid transfer protein, putative [Arabidopsis
  misc_feature (25)..(104): Homolog of NCBI NO: 15223104 NR Description: lipid transfer protein, putative; protein id: [Arabidopsis thaliana] >gi|25406043|pir||D96725 hypothetical
  misc_feature (7)..(106): Homolog of NCBI NO: 25406276 NR Description: probable lipid transfer protein F6D5.5 [imported] Arabidopsis thaliana >gi|11120788|gb|AAG30968.1|AC012396_4 protein [Arabidopsis thaliana]
  misc_feature (30)..(132): Homolog of NCBI NO: 15221052 NR Description: lipid transfer protein, putative; protein id: supported by cDNA: 30040. [Arabidopsis thaliana] F15H18.20 [Arabidopsis thaliana]
  misc_feature (26)..(121): Homolog of NCBI NO: 15219496 NR Description: hypothetical protein; protein id: At1g73550.1 thaliana] >gi|11120793|gb|AAG30973.1|AC012396_9 hypothetical
  misc_feature (26)..(120): Homolog of NCBI NO: 25406275 NR Description: hypothetical protein F6D5.6 [imported] - thaliana >gi|12323697|gb|AAG51811.1|AC079676_6 lipid transfer
MGVRAAAAAVALVAMMGMLAPRAAAQTPNCAAKLVPCSSYMNTTGTPPDTCCGPLKDAVKNDLKCLCDLYATPEIFKAFNISLDEALGLSKRCGLSDTTAACKGLSPTQSPPGSPSGGGSGSNSGHHTLSVGFSGFMSFLSLALWSVLA

SEQ ID NO: 6451 - protein, 135 aa, Zea mays subsp. mays
  peptide (1)..(135): Ceres Seq. ID no. 12365565
  misc_feature (16)..(88): Pfam Name: Protease inhibitor/seed storage/LTP family Pfam Description: Protease inhibitor/seed storage/LTP family
  misc_feature (1)..(128): Homolog of NCBI NO: 15221585 NR Description: unknown protein; protein id: At1g62790.1
  misc_feature (1)..(127): Homolog of NCBI NO: 30696757 NR Description: protease inhibitor/seed storage/lipid transfer
  misc_feature (1)..(90): Homolog of NCBI NO: 6630451 NR Description: F23N19.16 [Arabidopsis thaliana]
  misc_feature (1)..(127): Homolog of NCBI NO: 18410388 NR Description: lipid transfer protein, putative; protein id:
  misc_feature (1)..(127): Homolog of NCBI NO: 21593596 NR Description: lipid transfer protein, putative [Arabidopsis
  misc_feature (11)..(90): Homolog of NCBI NO: 15223104 NR Description: lipid transfer protein, putative; protein id: [Arabidopsis thaliana] >gi|25406043|pir||D96725 hypothetical
  misc_feature (1)..(92): Homolog of NCBI NO: 25406276 NR Description: probable lipid transfer protein F6D5.5 [imported] Arabidopsis thaliana >gi|11120788|gb|AAG30968.1|AC012396_4 protein [Arabidopsis thaliana]
  misc_feature (16)..(118): Homolog of NCBI NO: 15221052 NR Description: lipid transfer protein, putative; protein id: supported by cDNA: 30040. [Arabidopsis thaliana] F15H18.20 [Arabidopsis thaliana]
  misc_feature (12)..(107): Homolog of NCBI NO: 15219496 NR Description: hypothetical protein; protein id: At1g73550.1 thaliana] >gi|11120793|gb|AAG30973.1|AC012396_9 hypothetical
  misc_feature (12)..(106): Homolog of NCBI NO: 25406275 NR Description: hypothetical protein F6D5.6 [imported] - thaliana >gi|12323697|gb|AAG51811.1|AC079676_6 lipid transfer
MMGMLAPRAAAQTPNCAAKLVPCSSYMNTTGTPPDTCCGPLKDAVKNDLKCLCDLYATPEIFKAFNISLDEALGLSKRCGLSDTTAACKGLSPTQSPPGSPSGGGSGSNSGHHTLSVGFSGFMSFLSLALWSVLA

SEQ ID NO: 6452 - DNA, 1565 bp, Zea mays subsp. mays
  misc_feature (1)..(1565): Ceres Seq. ID no. 12344180
  misc_feature: MA Experiment ID: 108523 Result: Down-regulated in Transcription
  misc_feature: MA Experiment 108523 PARAMETER Experiment Name: Zm_42deg_Heat_P Parameter: Age (day) Value: 8
  misc_feature: MA Experiment 108523 PARAMETER Experiment Name: Zm_42deg_Heat_P Parameter: Organism Value: Zea mays
  misc_feature: MA Experiment 108523 PARAMETER Experiment Name: Zm_42deg_Heat_P Parameter: Plant Line Value: 35A19
  misc_feature: MA Experiment 108523 PARAMETER Experiment Name: Zm_42deg_Heat_P Parameter: Temperature (deg C) Value: 42 vs. 22
  misc_feature: MA Experiment 108523 PARAMETER Experiment Name: Zm_42deg_Heat_P Parameter: Timepoint (hr) Value: 6
  misc_feature: MA Experiment 108523 PARAMETER Experiment Name: Zm_42deg_Heat_P Parameter: Tissue Value: Aerial
  misc_feature: MA Experiment ID: 108543 Result: Up-regulated in Transcription
  misc_feature: MA Experiment ID: 108545 Result: Down-regulated in Transcription
  misc_feature: MA Experiment 108545 PARAMETER Experiment Name: Zm_Imbibed_Seeds_P Parameter: Age (day) Value: 3 vs. 2
  misc_feature: MA Experiment 108545 PARAMETER Experiment Name: Zm_Imbibed_Seeds_P Parameter: Organism Value: Zea mays
  misc_feature: MA Experiment 108545 PARAMETER Experiment Name: Zm_Imbibed_Seeds_P Parameter: Plant Line Value: 35A19
  misc_feature: MA Experiment 108545 PARAMETER Experiment Name: Zm_Imbibed_Seeds_P Parameter: Tissue Value: Aerial vs. Embryo
  misc_feature: MA Experiment ID: 108547 Result: Down-regulated in Transcription
  misc_feature: MA Experiment 108547 PARAMETER Experiment Name: Zm_Imbibed_Seeds_P Parameter: Age (day) Value: 4 vs. 2
  misc_feature: MA Experiment 108547 PARAMETER Experiment Name: Zm_Imbibed_Seeds_P Parameter: Organism Value: Zea mays
  misc_feature: MA Experiment 108547 PARAMETER Experiment Name: Zm_Imbibed_Seeds_P Parameter: Plant Line Value: 35A19
  misc_feature: MA Experiment 108547 PARAMETER Experiment Name: Zm_Imbibed_Seeds_P Parameter: Tissue Value: Aerial vs. Embryo
  misc_feature: MA Experiment ID: 108559 Result: Down-regulated in Transcription
  misc_feature: MA Experiment 108559 PARAMETER Experiment Name: Zm_5mM_NO_P Parameter: Age (day) Value: 8
  misc_feature: MA Experiment 108559 PARAMETER Experiment Name: Zm_5mM_NO_P Parameter: Organism Value: Zea mays
  misc_feature: MA Experiment 108559 PARAMETER Experiment Name: Zm_5mM_NO_P Parameter: Plant Line Value: 35A19
  misc_feature: MA Experiment 108559 PARAMETER Experiment Name: Zm_5mM_NO_P Parameter: Timepoint (hr) Value: 12
  misc_feature: MA Experiment 108559 PARAMETER Experiment Name: Zm_5mM_NO_P Parameter: Tissue Value: Aerial
  misc_feature: MA Experiment 108559 PARAMETER Experiment Name: Zm_5mM_NO_P Parameter: Treatment Value: 5mM NO vs. No Treatment
  misc_feature: MA Experiment ID: 108687 Result: Up-regulated in Transcription
  misc_feature: MA Experiment 108687 PARAMETER Experiment Name: Zm_Embryos-Flowers__P Parameter: Tissue Value: Embryo vs. Aerial+
  misc_feature: MA Experiment ID: 20000480 Result: Down-regulated in Transcription
  misc_feature: MA Experiment 20000480 PARAMETER Experiment Name: Zm_Drought_P Parameter: Age (day) Value: 11
  misc_feature: MA Experiment 20000480 PARAMETER Experiment Name: Zm_Drought_P Parameter: Organism Value: Zea mays
  misc_feature: MA Experiment 20000480 PARAMETER Experiment Name: Zm_Drought_P Parameter: Plant Line Value: 35A19
  misc_feature: MA Experiment 20000480 PARAMETER Experiment Name: Zm_Drought_P Parameter: Timepoint (hr) Value: 72
  misc_feature: MA Experiment 20000480 PARAMETER Experiment Name: Zm_Drought_P Parameter: Tissue Value: Aerial
  misc_feature: MA Experiment 20000480 PARAMETER Experiment Name: Zm_Drought_P Parameter: Treatment Value: Drought vs. No Drought
  misc_feature: MA Experiment ID: 20000492 Result: Up-regulated in Transcription
  misc_feature: MA Experiment 20000492 PARAMETER Experiment Name: Zm_Hybrid_Seed_Dev_P Parameter: DAP Value: 12
  misc_feature: MA Experiment 20000492 PARAMETER Experiment Name: Zm_Hybrid_Seed_Dev_P Parameter: Organism Value: Zea mays
  misc_feature: MA Experiment 20000492 PARAMETER Experiment Name: Zm_Hybrid_Seed_Dev_P Parameter: Plant Line Value: 35A19
  misc_feature: MA Experiment 20000492 PARAMETER Experiment Name: Zm_Hybrid_Seed_Dev_P Parameter: Tissue Value: Fert Kernel vs. Unfert Floret
aaacgatctccggggaatattttattccgtgggattccgatgcggccagtcgtcctcctcctcctcccctctctctcccgtttcttctagtagtagtacaaataaagaagaagctgagctgctcgaggcacggcgagggaggggagggagacacaaggcgagtgtccctactccgagggcagtccggtgtgcaagcgcatagcatagcaggagccacaagaaaaaaagccccatggattccttctcgccgagtggccggatgacacggacggcagcatcatctctggcagcgcgcgcggtcctcgcgctcctcctcatcggggtatccggttccggagccacccaggcagcgtctccccacacccaccacagtcggcagctggatgtgaaccacaaggagccagtccagacgtttcggcccatcaacattgcccaccgagggtcaaatggcgaactgcccgaagagacagcggccgcctacctgagggcgatcgaagaaggcgcggacttcatcgagacgaacgtactcgcgtccaaggacgggcatctcgtctgcttccacgatgtgacgctggacgcgaccaccgacgtcgcggaccacgcggagttcgctggcaggaagaggacctacgaggtccaaggagaagatgtcaccggatggttcatcgtggacttcactcttgaagagctcagatcactgagggtgaagcagcggttcagtttcagggaccagcggtacaacggcaagtaccagatcattacgttcgaagagtacatcctgatcgcgctctacgctgacaggaccgtcgggatctacccggagatcaagaaccccgtgttcatcaaccagcacgtgaagtggtcggacggaaagcgattcgaggacaagttcgtggagacgctgctcaggtacggctacggaggcgagtacatgtccgatggctggctccggcagccgctgttcatccagtccttcgcgccgacctcgctcatctacgtctccaacatgacggactcccccaagctgctcctgatcgacgacacgacggtcccgacgcaggacaccaaccagtcgtaccacgagataacctcggacgcctacctcgcgttcatcgggagctacgtggtggggatcgggccgtggaaggacacgctggtgcctccggacccgacagacaaccgcctgggacgccccgccgacctcgtcgcgcgagcgcacgctctgcgtctccaggtgcacccgtacaccttcaggaacgagaaccagtacctgcacttcgacttccggcaggacccctacgccgagtacgcgtactggctcgacgaggtcgccgtcgacgggctgttcaccgatttcactggtagtctgcacaagtaccaggagtggactaggccgtaccggaaggagcaggagaagacgagcccggaggcactcttgcgcgagatcgcgggcatgctcaagaacgacggctatgactgatgacttaggttgccttcagttttccccgtctgtcactctctctgtaatggttaactaaataataaagcgacggtttcatggatgc

SEQ ID NO: 6453 - protein, 415 aa, Zea mays subsp. mays
  peptide (1)..(415): Ceres Seq. ID no. 12344181
  misc_feature (55)..(414): Homolog of NCBI NO: 34909788 NR Description: putative glycerophosphoryl diester
  misc_feature (18)..(393): Homolog of NCBI NO: 15241502 NR Description: glycerophosphodiester phosphodiesterase - like protein id: At5g08030.1 [Arabidopsis thaliana]
  misc_feature (55)..(409): Homolog of NCBI NO: 15221164 NR Description: putative glycerophosphodiester phosphodiesterase; id: At1g74210.1, supported by cDNA: 24182., supported by cDNA: [Arabidopsis thaliana] >gi|25406323|pir||D96770
  misc_feature (34)..(391): Homolog of NCBI NO: 34394918 NR Description: putative glycerophosphoryl diester
  misc_feature (58)..(375): Homolog of NCBI NO: 23126501 NR Description: hypothetical protein [Nostoc punctiforme]
  misc_feature (49)..(374): Homolog of NCBI NO: 15595544 NR Description: glycerophosphoryl diester phosphodiesterase, [Pseudomonas aeruginosa PA01] >gi|11348632|pir||A83603
  misc_feature (14)..(374): Homolog of NCBI NO: 32141147 NR Description: putative glycerophosphoryl diester [Streptomyces coelicolor A3(2)] >gi|24419011|emb|CAD55283.1| glycerophosphoryl diester phosphodiesterase [Streptomyces
  misc_feature (23)..(374): Homolog of NCBI NO: 32997080 NR Description: glycerophosphoryl diester phosphodiesterase
  misc_feature (1)..(374): Homolog of NCBI NO: 23105793 NR Description: hypothetical protein [Azotobacter vinelandii]
  misc_feature (59)..(375): Homolog of NCBI NO: 16127502 NR Description: glycerophosphoryl diester phosphodiesterase crescentus CB15] >gi|25399885|pir||F87654 glycerophosphoryl
MDSFSPSGRMTRTAASSLAARAVLALLLIGVSGSGATQAASPHTHHSRQLDVNHKEPVQTFRPINIAHRGSNGELPEETAAAYLRAIEEGADFIETNVLASKDGHLVCFHDVTLDATTDVADHAEFAGRKRTYEVQGEDVTGWFIVDFTLEELRSLRVKQRFSFRDQRYNGKYQIITFEEYILIALYADRTVGIYPEIKNPVFINQHVKWSDGKRFEDKFVETLLRYGYGGEYMSDGWLRQPLFIQSFAPTSLIYVSNMTDSPKLLLIDDTTVPTQDTNQSYHEITSDAYLAFIGSYVVGIGPWKDTLVPPDPTDNRLGRPADLVARAHALRLQVHPYTFRNENQYLHFDFRQDPYAEYAYWLDEVAVDGLFTDFTGSLHKYQEWTRPYRKEQEKTSPEALLREIAGMLKNDGYD

SEQ ID NO: 6454 - protein, 406 aa, Zea mays subsp. mays
  peptide (1)..(406): Ceres Seq. ID no. 12344182
  misc_feature (46)..(405): Homolog of NCBI NO: 34909788 NR Description: putative glycerophosphoryl diester
  misc_feature (9)..(384): Homolog of NCBI NO: 15241502 NR Description: glycerophosphodiester phosphodiesterase - like protein id: At5g08030.1 [Arabidopsis thaliana]
  misc_feature (46)..(400): Homolog of NCBI NO: 15221164 NR Description: putative glycerophosphodiester phosphodiesterase; id: At1g74210.1, supported by cDNA: 24182., supported by cDNA: [Arabidopsis thaliana] >gi|25406323|pir||D96770
  misc_feature (25)..(382): Homolog of NCBI NO: 34394918 NR Description: putative glycerophosphoryl diester
  misc_feature (49)..(366): Homolog of NCBI NO: 23126501 NR Description: hypothetical protein [Nostoc punctiforme]
  misc_feature (40)..(365): Homolog of NCBI NO: 15595544 NR Description: glycerophosphoryl diester phosphodiesterase, [Pseudomonas aeruginosa PA01] >gi|11348632|pir||A83603
  misc_feature (5)..(365): Homolog of NCBI NO: 32141147 NR Description: putative glycerophosphoryl diester [Streptomyces coelicolor A3(2)] >gi|24419011|emb|CAD55283.1| glycerophosphoryl diester phosphodiesterase [Streptomyces
  misc_feature (14)..(365): Homolog of NCBI NO: 32997080 NR Description: glycerophosphoryl diester phosphodiesterase
  misc_feature (1)..(365): Homolog of NCBI NO: 23105793 NR Description: hypothetical protein [Azotobacter vinelandii]
  misc_feature (50)..(366): Homolog of NCBI NO: 16127502 NR Description: glycerophosphoryl diester phosphodiesterase crescentus CB15] >gi|25399885|pir||F87654 glycerophosphoryl
MTRTAASSLAARAVLALLLIGVSGSGATQAASPHTHHSRQLDVNHKEPVQTFRPINIAHRGSNGELPEETAAAYLRAIEEGADFIETNVLASKDGHLVCFHDVTLDATTDVADHAEFAGRKRTYEVQGEDVTGWFIVDFTLEELRSLRVKQRFSFRDQRYNGKYQIITFEEYILIALYADRTVGIYPEIKNPVFINQHVKWSDGKRFEDKFVETLLRYGYGGEYMSDGWLRQPLFIQSFAPTSLIYVSNMTDSPKLLLIDDTTVPTQDTNQSYHEITSDAYLAFIGSYVVGIGPWKDTLVPPDPTDNRLGRPADLVARAHALRLQVHPYTFRNENQYLHFDFRQDPYAEYAYWLDEVAVDGLFTDFTGSLHKYQEWTRPYRKEQEKTSPEALLREIAGMLKNDGYD

SEQ ID NO: 6455 - DNA, 1295 bp, Zea mays subsp. mays
  misc_feature (1)..(1295): Ceres Seq. ID no. 12409068
  misc_feature: MA Experiment ID: 108523 Result: Up-regulated in Transcription
  misc_feature: MA Experiment 108523 PARAMETER Experiment Name: Zm_42deg_Heat_P Parameter: Age (day) Value: 8
  misc_feature: MA Experiment 108523 PARAMETER Experiment Name: Zm_42deg_Heat_P Parameter: Organism Value: Zea mays
  misc_feature: MA Experiment 108523 PARAMETER Experiment Name: Zm_42deg_Heat_P Parameter: Plant Line Value: 35A19
  misc_feature: MA Experiment 108523 PARAMETER Experiment Name: Zm_42deg_Heat_P Parameter: Temperature (deg C) Value: 42 vs. 22
  misc_feature: MA Experiment 108523 PARAMETER Experiment Name: Zm_42deg_Heat_P Parameter: Timepoint (hr) Value: 6
  misc_feature: MA Experiment 108523 PARAMETER Experiment Name: Zm_42deg_Heat_P Parameter: Tissue Value: Aerial
aatcaagtgacggttacattcttatcgtaaatagtttttgcacaaatagaacggaaaaaaggaacaatttttgtggaggtgactcctcgcctgtgtcgtcaaatcctccacaccctggactggagtggctgctgctcgtgcccggcgatgagcggcggcgggcccggaggtgcgtgcgggccggactcccgcgtggagaccatctcccggctggcgcagtggcgcatcgataccttcggcccctgctcctaccgccggtcggacccctttaagctcggcatctggaactggtacctgtcggtggagaagagccgctccatctttgtgcgcctcttcccggagcccggccgggtggccaaggagcagccccctctcgcgcgcttcctgctccgcgtctcctgggccggcccgccgcgacgctcctgcgtctcccctgtgcacgagcatctcctgcgtaccagcgatgattttatatggcaagtcgatgcgatgccccatgggcgttttacgattgatgttgagtttctagacctgaggatagccacgaacaatgctacggaatcgtcatcggtgtggccaaacgaaggcatggtgcagaagatcgcgagcaagagcgccctgggctgcctgtcgcacatgctggcggactccatccacgcggacgtgaccatcaacacgacggacggggtgctgaaggcgcacaaggcggtgctggcggcgtgctcccccgtgttcaagagcatgttcgtgcacgacctgagggagaaggagtcgtcgacggtggacatcggcgacatgtgcgtggagtcgtgctcggcgctgctgggtttcgtgtacgggacgatcgagcaggggcagttctggaagcaccggctgccgctgctggcggcggcggacaagtacgggatcggcgacatcaaggactgctgcgaggagagcctgctggaggacataggctcgggcaacgtgctggagcggctccacgtggcgtggctgtaccggctggagcggctgaagaaagggtgcctcacctacctgttcgtgttcgggaagatctatgacgtgagggacgagatgcacggcttcttccaccacgcggaccgcgagctcatgcacgacatgttccaggaggtgctcagcgtgtggaagcccatgtgaatggaagtgtccctttccacgcgagctgtgtgtgtgtgtgtgtgtcgtgcttgttcagtcagcagtgtgtggagagcatgctggttatgcatatttgaaacgaaaaggatgctcagaatttgaatggaagctaaatt

SEQ ID NO: 6456 - protein, 336 aa, Zea mays subsp. mays
  peptide (1)..(336): Ceres Seq. ID no. 12409069
  misc_feature (161)..(269): Pfam Name: BTB/POZ domain Pfam Description: BTB/POZ domain
  misc_feature (49)..(336): Homolog of NCBI NO: 38637050 NR Description: POZ domain protein family-like [Oryza sativa
  misc_feature (13)..(336): Homolog of NCBI NO: 15219092 NR Description: unknown protein; protein id: At1g21780.1, by cDNA: 36526. [Arabidopsis thaliana] >gi|25518571|pir||E86351
  misc_feature (15)..(334): Homolog of NCBI NO: 15222771 NR Description: hypothetical protein; protein id: At1g55760.1
  misc_feature (15)..(301): Homolog of NCBI NO: 8778495 NR Description: F20N2.15 [Arabidopsis thaliana]
  misc_feature (144)..(299): Homolog of NCBI NO: 34858199 NR Description: similar to POZ 56 protein [Rattus norvegicus]
  misc_feature (151)..(299): Homolog of NCBI NO: 27661061 NR Description: similar to speckle-type POZ protein [Homo
  misc_feature (151)..(299): Homolog of NCBI NO: 34858214 NR Description: similar to speckle-type POZ protein-like 1; POZ
  misc_feature (169)..(300): Homolog of NCBI NO: 34766460 NR Description: TDPOZ4 [Mus musculus]
  misc_feature (183)..(299): Homolog of NCBI NO: 34858197 NR Description: similar to speckle-type POZ protein-like 1; POZ
  misc_feature (161)..(336): Homolog of NCBI NO: 34858183 NR Description: similar to speckle-type POZ protein-like 1; POZ
MSGGGPGGACGPDSRVETISRLAQWRIDTFGPCSYRRSDPFKLGIWNWYLSVEKSRSIFVRLFPEPGRVAKEQPPLARFLLRVSWAGPPRRSCVSPVHEHLLRTSDDFIWQVDAMPHGRFTIDVEFLDLRIATNNATESSSVWPNEGMVQKIASKSALGCLSHMLADSIHADVTINTTDGVLKAHKAVLAACSPVFKSMFVHDLREKESSTVDIGDMCVESCSALLGFVYGTIEQGQFWKHRLPLLAAADKYGIGDIKDCCEESLLEDIGSGNVLERLHVAWLYRLERLKKGCLTYLFVFGKIYDVRDEMHGFFHHADRELMHDMFQEVLSVWKPM

SEQ ID NO: 6457 - protein, 222 aa, Zea mays subsp. mays
  peptide (1)..(222): Ceres Seq. ID no. 12409070
  misc_feature (47)..(155): Pfam Name: BTB/POZ domain Pfam Description: BTB/POZ domain
  misc_feature (1)..(222): Homolog of NCBI NO: 38637050 NR Description: POZ domain protein family-like [Oryza sativa
  misc_feature (1)..(222): Homolog of NCBI NO: 15219092 NR Description: unknown protein; protein id: At1g21780.1, by cDNA: 36526. [Arabidopsis thaliana] >gi|25518571|pir||E86351
  misc_feature (1)..(220): Homolog of NCBI NO: 15222771 NR Description: hypothetical protein; protein id: At1g55760.1
  misc_feature (1)..(187): Homolog of NCBI NO: 8778495 NR Description: F20N2.15 [Arabidopsis thaliana]
  misc_feature (30)..(185): Homolog of NCBI NO: 34858199 NR Description: similar to POZ 56 protein [Rattus norvegicus]
  misc_feature (37)..(185): Homolog of NCBI NO: 27661061 NR Description: similar to speckle-type POZ protein [Homo
  misc_feature (37)..(185): Homolog of NCBI NO: 34858214 NR Description: similar to speckle-type POZ protein-like 1; POZ
  misc_feature (55)..(186): Homolog of NCBI NO: 34766460 NR Description: TDPOZ4 [Mus musculus]
  misc_feature (69)..(185): Homolog of NCBI NO: 34858197 NR Description: similar to speckle-type POZ protein-like 1; POZ
  misc_feature (47)..(222): Homolog of NCBI NO: 34858183 NR Description: similar to speckle-type POZ protein-like 1; POZ
MPHGRFTIDVEFLDLRIATNNATESSSVWPNEGMVQKIASKSALGCLSHMLADSIHADVTINTTDGVLKAHKAVLAACSPVFKSMFVHDLREKESSTVDIGDMCVESCSALLGFVYGTIEQGQFWKHRLPLLAAADKYGIGDIKDCCEESLLEDIGSGNVLERLHVAWLYRLERLKKGCLTYLFVFGKIYDVRDEMHGFFHHADRELMHDMFQEVLSVWKPM

SEQ ID NO: 6458 - protein, 189 aa, Zea mays subsp. mays
  peptide (1)..(189): Ceres Seq. ID no. 12409071
  misc_feature (14)..(122): Pfam Name: BTB/POZ domain Pfam Description: BTB/POZ domain
  misc_feature (1)..(189): Homolog of NCBI NO: 38637050 NR Description: POZ domain protein family-like [Oryza sativa
  misc_feature (1)..(189): Homolog of NCBI NO: 15219092 NR Description: unknown protein; protein id: At1g21780.1, by cDNA: 36526. [Arabidopsis thaliana] >gi|25518571|pir||E86351
  misc_feature (1)..(187): Homolog of NCBI NO: 15222771 NR Description: hypothetical protein; protein id: At1g55760.1
  misc_feature (1)..(154): Homolog of NCBI NO: 8778495 NR Description: F20N2.15 [Arabidopsis thaliana]
  misc_feature (1)..(152): Homolog of NCBI NO: 34858199 NR Description: similar to POZ 56 protein [Rattus norvegicus]
  misc_feature (4)..(152): Homolog of NCBI NO: 27661061 NR Description: similar to speckle-type POZ protein [Homo
  misc_feature (4)..(152): Homolog of NCBI NO: 34858214 NR Description: similar to speckle-type POZ protein-like 1; POZ
  misc_feature (22)..(153): Homolog of NCBI NO: 34766460 NR Description: TDPOZ4 [Mus musculus]
  misc_feature (36)..(152): Homolog of NCBI NO: 34858197 NR Description: similar to speckle-type POZ protein-like 1; POZ
  misc_feature (14)..(189): Homolog of NCBI NO: 34858183 NR Description: similar to speckle-type POZ protein-like 1; POZ
MVQKIASKSALGCLSHMLADSIHADVTINTTDGVLKAHKAVLAACSPVFKSMFVHDLREKESSTVDIGDMCVESCSALLGFVYGTIEQGQFWKHRLPLLAAADKYGIGDIKDCCEESLLEDIGSGNVLERLHVAWLYRLERLKKGCLTYLFVFGKIYDVRDEMHGFFHHADRELMHDMFQEVLSVWKPM

SEQ ID NO: 6459 - DNA, 621 bp, Zea mays subsp. mays
  misc_feature (1)..(621): Ceres Seq. ID no. 12403452
  misc_feature: MA Experiment ID: 108527 Result: Up-regulated in Transcription
  misc_feature: MA Experiment 108527 PARAMETER Experiment Name: Zm_5mM_NO_P Parameter: Age (day) Value: 8
  misc_feature: MA Experiment 108527 PARAMETER Experiment Name: Zm_5mM_NO_P Parameter: Organism Value: Zea mays
  misc_feature: MA Experiment 108527 PARAMETER Experiment Name: Zm_5mM_NO_P Parameter: Plant Line Value: 35A19
  misc_feature: MA Experiment 108527 PARAMETER Experiment Name: Zm_5mM_NO_P Parameter: Timepoint (hr) Value: 6
  misc_feature: MA Experiment 108527 PARAMETER Experiment Name: Zm_5mM_NO_P Parameter: Tissue Value: Aerial
  misc_feature: MA Experiment 108527 PARAMETER Experiment Name: Zm_5mM_NO_P Parameter: Treatment Value: 5mM NO vs. No Treatment
  misc_feature: MA Experiment ID: 108529 Result: Up-regulated in Transcription
  misc_feature: MA Experiment 108529 PARAMETER Experiment Name: Zm_Imbibed_Seeds_P Parameter: Age (day) Value: 5 vs. 2
  misc_feature: MA Experiment 108529 PARAMETER Experiment Name: Zm_Imbibed_Seeds_P Parameter: Organism Value: Zea mays
  misc_feature: MA Experiment 108529 PARAMETER Experiment Name: Zm_Imbibed_Seeds_P Parameter: Plant Line Value: 35A19
  misc_feature: MA Experiment 108529 PARAMETER Experiment Name: Zm_Imbibed_Seeds_P Parameter: Tissue Value: Roots vs. Embryo
  misc_feature: MA Experiment ID: 108535 Result: Down-regulated in Transcription
  misc_feature: MA Experiment 108535 PARAMETER Experiment Name: Zm_Meristem_P Parameter: Age (day) Value: 8
  misc_feature: MA Experiment 108535 PARAMETER Experiment Name: Zm_Meristem_P Parameter: Organism Value: Zea mays
  misc_feature: MA Experiment 108535 PARAMETER Experiment Name: Zm_Meristem_P Parameter: Plant Line Value: 35A19
  misc_feature: MA Experiment 108535 PARAMETER Experiment Name: Zm_Meristem_P Parameter: Tissue Value: Root Meristem vs. Above Root Meristem
  misc_feature: MA Experiment ID: 108545 Result: Down-regulated in Transcription
  misc_feature: MA Experiment 108545 PARAMETER Experiment Name: Zm_Imbibed_Seeds_P Parameter: Age (day) Value: 3 vs. 2
  misc_feature: MA Experiment 108545 PARAMETER Experiment Name: Zm_Imbibed_Seeds_P Parameter: Organism Value: Zea mays
  misc_feature: MA Experiment 108545 PARAMETER Experiment Name: Zm_Imbibed_Seeds_P Parameter: Plant Line Value: 35A19
  misc_feature: MA Experiment 108545 PARAMETER Experiment Name: Zm_Imbibed_Seeds_P Parameter: Tissue Value: Aerial vs. Embryo
  misc_feature: MA Experiment ID: 108546 Result: Up-regulated in Transcription
  misc_feature: MA Experiment 108546 PARAMETER Experiment Name: Zm_Imbibed_Seeds_P Parameter: Age (day) Value: 3 vs. 2
  misc_feature: MA Experiment 108546 PARAMETER Experiment Name: Zm_Imbibed_Seeds_P Parameter: Organism Value: Zea mays
  misc_feature: MA Experiment 108546 PARAMETER Experiment Name: Zm_Imbibed_Seeds_P Parameter: Plant Line Value: 35A19
  misc_feature: MA Experiment 108546 PARAMETER Experiment Name: Zm_Imbibed_Seeds_P Parameter: Tissue Value: Roots vs. Embryo
  misc_feature: MA Experiment ID: 108556 Result: Up-regulated in Transcription
  misc_feature: MA Experiment 108556 PARAMETER Experiment Name: Zm_Drought_P Parameter: Age (day) Value: 9
  misc_feature: MA Experiment 108556 PARAMETER Experiment Name: Zm_Drought_P Parameter: Organism Value: Zea mays
  misc_feature: MA Experiment 108556 PARAMETER Experiment Name: Zm_Drought_P Parameter: Plant Line Value: 35A19
  misc_feature: MA Experiment 108556 PARAMETER Experiment Name: Zm_Drought_P Parameter: Timepoint (hr) Value: 24
  misc_feature: MA Experiment 108556 PARAMETER Experiment Name: Zm_Drought_P Parameter: Tissue Value: Aerial
  misc_feature: MA Experiment 108556 PARAMETER Experiment Name: Zm_Drought_P Parameter: Treatment Value: Drought vs. No Drought
  misc_feature: MA Experiment ID: 108559 Result: Up-regulated in Transcription
  misc_feature: MA Experiment 108559 PARAMETER Experiment Name: Zm_5mM_NO_P Parameter: Age (day) Value: 8
  misc_feature: MA Experiment 108559 PARAMETER Experiment Name: Zm_5mM_NO_P Parameter: Organism Value: Zea mays
  misc_feature: MA Experiment 108559 PARAMETER Experiment Name: Zm_5mM_NO_P Parameter: Plant Line Value: 35A19
  misc_feature: MA Experiment 108559 PARAMETER Experiment Name: Zm_5mM_NO_P Parameter: Timepoint (hr) Value: 12
  misc_feature: MA Experiment 108559 PARAMETER Experiment Name: Zm_5mM_NO_P Parameter: Tissue Value: Aerial
  misc_feature: MA Experiment 108559 PARAMETER Experiment Name: Zm_5mM_NO_P Parameter: Treatment Value: 5mM NO vs. No Treatment
  misc_feature: MA Experiment ID: 108688 Result: Down-regulated in Transcription
  misc_feature: MA Experiment 108688 PARAMETER Experiment Name: Zm_Embryos-Flowers__P Parameter: Tissue Value: Immature Flowers vs. Aerial+
  misc_feature: MA Experiment ID: 20000108 Result: Down-regulated in Transcription
  misc_feature: MA Experiment 20000108 PARAMETER Experiment Name: Zm_Root-Tips_P Parameter: Age (day) Value: 12
  misc_feature: MA Experiment 20000108 PARAMETER Experiment Name: Zm_Root-Tips_P Parameter: Organism Value: Zea mays
  misc_feature: MA Experiment 20000108 PARAMETER Experiment Name: Zm_Root-Tips_P Parameter: Tissue Value: Root tips vs. Root mid region    35
  misc_feature: MA Experiment 20000108 PARAMETER Experiment Name: Zm_Root-Tips_P Parameter: Tissue Value: Root tips vs. Root mid region   Sequence Listing-Misc Features (4)
  misc_feature: MA Experiment ID: 20000479 Result: Up-regulated in Transcription
  misc_feature: MA Experiment 20000479 PARAMETER Experiment Name: Zm_Drought_P Parameter: Age (day) Value: 10
  misc_feature: MA Experiment 20000479 PARAMETER Experiment Name: Zm_Drought_P Parameter: Organism Value: Zea mays
  misc_feature: MA Experiment 20000479 PARAMETER Experiment Name: Zm_Drought_P Parameter: Plant Line Value: 35A19
  misc_feature: MA Experiment 20000479 PARAMETER Experiment Name: Zm_Drought_P Parameter: Timepoint (hr) Value: 48
  misc_feature: MA Experiment 20000479 PARAMETER Experiment Name: Zm_Drought_P Parameter: Tissue Value: Aerial
  misc_feature: MA Experiment 20000479 PARAMETER Experiment Name: Zm_Drought_P Parameter: Treatment Value: Drought vs. No Drought
  misc_feature: MA Experiment ID: 20000480 Result: Up-regulated in Transcription
  misc_feature: MA Experiment 20000480 PARAMETER Experiment Name: Zm_Drought_P Parameter: Age (day) Value: 11
  misc_feature: MA Experiment 20000480 PARAMETER Experiment Name: Zm_Drought_P Parameter: Organism Value: Zea mays
  misc_feature: MA Experiment 20000480 PARAMETER Experiment Name: Zm_Drought_P Parameter: Plant Line Value: 35A19
  misc_feature: MA Experiment 20000480 PARAMETER Experiment Name: Zm_Drought_P Parameter: Timepoint (hr) Value: 72
  misc_feature: MA Experiment 20000480 PARAMETER Experiment Name: Zm_Drought_P Parameter: Tissue Value: Aerial
  misc_feature: MA Experiment 20000480 PARAMETER Experiment Name: Zm_Drought_P Parameter: Treatment Value: Drought vs. No Drought
  misc_feature: MA Experiment ID: 20000492 Result: Up-regulated in Transcription
  misc_feature: MA Experiment 20000492 PARAMETER Experiment Name: Zm_Hybrid_Seed_Dev_P Parameter: DAP Value: 12
  misc_feature: MA Experiment 20000492 PARAMETER Experiment Name: Zm_Hybrid_Seed_Dev_P Parameter: Organism Value: Zea mays
  misc_feature: MA Experiment 20000492 PARAMETER Experiment Name: Zm_Hybrid_Seed_Dev_P Parameter: Plant Line Value: 35A19
  misc_feature: MA Experiment 20000492 PARAMETER Experiment Name: Zm_Hybrid_Seed_Dev_P Parameter: Tissue Value: Fert Kernel vs. Unfert Floret
atgagaggagagaagaaaggccatcagtgatgaacgctttcgagttaatctctacgtctcagggcctcaatctcgggacgctcttcgagaagcaaacgggttctgttaagcgagaaacaaggtttgcgtcaaggcttcctgcaaatgagatactgtcgaagatcgaagcagcagcgggacccatgggcttcaacgttcagaagcgcaactataagctgaagctgcaaggggagaaccctggaaggaaaggtcagctggccatcgcaacagaggttttcgaggtcacgccttccctgtacatggttgagctgcgcaagtccaacggcgacacccttgaattccacaagttctaccacaacatctcaaatggactgaaggacgtgatgtggaagccggagagcggcatcgtggaaggcgacgaggcgcggcaaaggaggtccccgtgatgggggtctgcaaccaagttttagaagtagcgctgcagataactagtcatcagggagcctggcgggaactgagcctgtgactgcttcctgtttgtttggatgttttgtttttgtctaaggtgctttctgactaaagtatgctggataatgtgaatgaagaatgtgcagagttttc

SEQ ID NO: 6460 - protein, 147 aa, Zea mays subsp. mays
  peptide (1)..(147): Ceres Seq. ID no. 12403453
  misc_feature (7)..(66): Pfam Name: NAF domain Pfam Description: NAF domain
  misc_feature (1)..(147): Homolog of NCBI NO: 34393400 NR Description: putative CBL-interacting protein kinase 23 [Oryza
  misc_feature (1)..(130): Homolog of NCBI NO: 18397430 NR Description: serine/threonine kinase, putative; protein id: supported by cDNA: gi_14486385, supported by cDNA: gi_15912282,
  misc_feature (1)..(130): Homolog of NCBI NO: 25387051 NR Description: probable serine/threonine kinase [imported] - thaliana >gi|12320856|gb|AAG50566.1|AC073506_8 serine/threonine
  misc_feature (3)..(142): Homolog of NCBI NO: 19172407 NR Description: putative serine threonine kinase [Sandersonia
  misc_feature (1)..(133): Homolog of NCBI NO: 34902248 NR Description: Putative serine/threonine kinase [Oryza sativa
  misc_feature (3)..(137): Homolog of NCBI NO: 14423524 NR Description: similar to wpk4 protein kinase [Arabidopsis >gi|20259788|gb|AAM13241.1| similar to wpk4 protein kinase
  misc_feature (3)..(137): Homolog of NCBI NO: 30677898 NR Description: CBL-interacting protein kinase 9 [Arabidopsis
  misc_feature (3)..(137): Homolog of NCBI NO: 15223317 NR Description: serine threonine kinase, putative; protein id: supported by cDNA: gi_14423523, supported by cDNA: gi_20259787
  misc_feature (1)..(132): Homolog of NCBI NO: 7446371 NR Description: probable serine/threonine kinase (EC 2.7.1.-) - sorghum >gi|2632252|emb|CAA73067.1| serine/threonine kinase
  misc_feature (3)..(137): Homolog of NCBI NO: 25387057 NR Description: protein T25K16.13 [imported] - Arabidopsis >gi|6715641|gb|AAF26468.1|AC007323_9 T25K16.13 [Arabidopsis
ERREERPSVMNAFELISTSQGLNLGTLFEKQTGSVKRETRFASRLPANEILSKIEAAAGPMGFNVQKRNYKLKLQGENPGRKGQLAIATEVFEVTPSLYMVELRKSNGDTLEFHKFYHNISNGLKDVMWKPESGIVEGDEARQRRSP

SEQ ID NO: 6461 - protein, 138 aa, Zea mays subsp. mays
  peptide (1)..(138): Ceres Seq. ID no. 12403454
  misc_feature (1)..(57): Pfam Name: NAF domain Pfam Description: NAF domain
  misc_feature (1)..(138): Homolog of NCBI NO: 34393400 NR Description: putative CBL-interacting protein kinase 23 [Oryza
  misc_feature (1)..(121): Homolog of NCBI NO: 18397430 NR Description: serine/threonine kinase, putative; protein id: supported by cDNA: gi_14486385, supported by cDNA: gi_15912282,
  misc_feature (1)..(121): Homolog of NCBI NO: 25387051 NR Description: probable serine/threonine kinase [imported] - thaliana >gi|12320856|gb|AAG50566.1|AC073506_8 serine/threonine
  misc_feature (1)..(133): Homolog of NCBI NO: 19172407 NR Description: putative serine threonine kinase [Sandersonia
  misc_feature (1)..(124): Homolog of NCBI NO: 34902248 NR Description: Putative serine/threonine kinase [Oryza sativa
  misc_feature (1)..(128): Homolog of NCBI NO: 14423524 NR Description: similar to wpk4 protein kinase [Arabidopsis >gi|20259788|gb|AAM13241.1| similar to wpk4 protein kinase
  misc_feature (1)..(128): Homolog of NCBI NO: 15223317 NR Description: serine threonine kinase, putative; protein id: supported by cDNA: gi_14423523, supported by cDNA: gi_20259787
  misc_feature (1)..(128): Homolog of NCBI NO: 30677898 NR Description: CBL-interacting protein kinase 9 [Arabidopsis
  misc_feature (1)..(123): Homolog of NCBI NO: 7446371 NR Description: probable serine/threonine kinase (EC 2.7.1.-) - sorghum >gi|2632252|emb|CAA73067.1| serine/threonine kinase
  misc_feature (1)..(128): Homolog of NCBI NO: 25387057 NR Description: protein T25K16.13 [imported] - Arabidopsis >gi|6715641|gb|AAF26468.1|AC007323_9 T25K16.13 [Arabidopsis
MNAFELISTSQGLNLGTLFEKQTGSVKRETRFASRLPANEILSKIEAAAGPMGFNVQKRNYKLKLQGENPGRKGQLAIATEVFEVTPSLYMVELRKSNGDTLEFHKFYHNISNGLKDVMWKPESGIVEGDEARQRRSP

SEQ ID NO: 6462 - protein, 87 aa, Zea mays subsp. mays
  peptide (1)..(87): Ceres Seq. ID no. 12403455
  misc_feature (1)..(70): Homolog of NCBI NO: 18397430 NR Description: serine/threonine kinase, putative; protein id: supported by cDNA: gi_14486385, supported by cDNA: gi_15912282,
  misc_feature (1)..(70): Homolog of NCBI NO: 25387051 NR Description: probable serine/threonine kinase [imported] - thaliana >gi|12320856|gb|AAG50566.1|AC073506_8 serine/threonine
  misc_feature (1)..(82): Homolog of NCBI NO: 19172407 NR Description: putative serine threonine kinase [Sandersonia
  misc_feature (1)..(73): Homolog of NCBI NO: 34902248 NR Description: Putative serine/threonine kinase [Oryza sativa
  misc_feature (1)..(77): Homolog of NCBI NO: 14423524 NR Description: similar to wpk4 protein kinase [Arabidopsis >gi|20259788|gb|AAM13241.1| similar to wpk4 protein kinase
  misc_feature (1)..(77): Homolog of NCBI NO: 30677898 NR Description: CBL-interacting protein kinase 9 [Arabidopsis
  misc_feature (1)..(77): Homolog of NCBI NO: 15223317 NR Description: serine threonine kinase, putative; protein id: supported by cDNA: gi_14423523, supported by cDNA: gi_20259787
  misc_feature (1)..(72): Homolog of NCBI NO: 7446371 NR Description: probable serine/threonine kinase (EC 2.7.1.-) - sorghum >gi|2632252|emb|CAA73067.1| serine/threonine kinase
  misc_feature (1)..(77): Homolog of NCBI NO: 25387057 NR Description: protein T25K16.13 [imported] - Arabidopsis >gi|6715641|gb|AAF26468.1|AC007323_9 T25K16.13 [Arabidopsis
  misc_feature (1)..(87): Homolog of NCBI NO: 34393400 NR Description: putative CBL-interacting protein kinase 23 [Oryza
MGFNVQKRNYKLKLQGENPGRKGQLAIATEVFEVTPSLYMVELRKSNGDTLEFHKFYHNISNGLKDVMWKPESGIVEGDEARQRRSP

SEQ ID NO: 6463 - DNA, 1252 bp, Zea mays subsp. mays
  misc_feature (1)..(1252): Ceres Seq. ID no. 12360523
  misc_feature: MA Experiment ID: 108528 Result: Up-regulated in Transcription
  misc_feature: MA Experiment 108528 PARAMETER Experiment Name: Zm_Imbibed_Seeds_P Parameter: Age (day) Value: 5 vs. 2
  misc_feature: MA Experiment 108528 PARAMETER Experiment Name: Zm_Imbibed_Seeds_P Parameter: Organism Value: Zea mays
  misc_feature: MA Experiment 108528 PARAMETER Experiment Name: Zm_Imbibed_Seeds_P Parameter: Plant Line Value: 35A19
  misc_feature: MA Experiment 108528 PARAMETER Experiment Name: Zm_Imbibed_Seeds_P Parameter: Tissue Value: Aerial vs. Embryo
  misc_feature: MA Experiment ID: 108530 Result: Up-regulated in Transcription
  misc_feature: MA Experiment 108530 PARAMETER Experiment Name: Zm_Imbibed_Seeds_P Parameter: Age (day) Value: 6 vs. 2
  misc_feature: MA Experiment 108530 PARAMETER Experiment Name: Zm_Imbibed_Seeds_P Parameter: Organism Value: Zea mays
  misc_feature: MA Experiment 108530 PARAMETER Experiment Name: Zm_Imbibed_Seeds_P Parameter: Plant Line Value: 35A19
  misc_feature: MA Experiment 108530 PARAMETER Experiment Name: Zm_Imbibed_Seeds_P Parameter: Tissue Value: Aerial vs. Embryo
  misc_feature: MA Experiment ID: 108545 Result: Up-regulated in Transcription
  misc_feature: MA Experiment 108545 PARAMETER Experiment Name: Zm_Imbibed_Seeds_P Parameter: Age (day) Value: 3 vs. 2
  misc_feature: MA Experiment 108545 PARAMETER Experiment Name: Zm_Imbibed_Seeds_P Parameter: Organism Value: Zea mays
  misc_feature: MA Experiment 108545 PARAMETER Experiment Name: Zm_Imbibed_Seeds_P Parameter: Plant Line Value: 35A19
  misc_feature: MA Experiment 108545 PARAMETER Experiment Name: Zm_Imbibed_Seeds_P Parameter: Tissue Value: Aerial vs. Embryo
  misc_feature: MA Experiment ID: 108547 Result: Up-regulated in Transcription
  misc_feature: MA Experiment 108547 PARAMETER Experiment Name: Zm_Imbibed_Seeds_P Parameter: Age (day) Value: 4 vs. 2
  misc_feature: MA Experiment 108547 PARAMETER Experiment Name: Zm_Imbibed_Seeds_P Parameter: Organism Value: Zea mays
  misc_feature: MA Experiment 108547 PARAMETER Experiment Name: Zm_Imbibed_Seeds_P Parameter: Plant Line Value: 35A19
  misc_feature: MA Experiment 108547 PARAMETER Experiment Name: Zm_Imbibed_Seeds_P Parameter: Tissue Value: Aerial vs. Embryo
gcacgagaccattacctagaacatcctaatcgaaaaaaccccgtcagcccgtgcggccgtgccctctgcctcctctgccactcctcgcccaaagcgccagaggcgcagcccgagccacaggttgcctcctctccctctcctcgtggcctcgtccttctcgttcaagacgaaaccgtacgcgagcgagctggtgagggaggaagagcagggaggtgggatcaggccggctccatggacgccacgctcctcctcctccccgccaactgcacggccgccgccagcgggcggatgcggcctcgactgcctgcaggcccacatgtggcttcccctggtccctccgcgcggccaaggacctccatccgggcctcagccgtgtccgcagccctcgccgttcgtggcctcccgcaacacgcttccgtggccgggcaaagcactggaagttatagggttggtgatgttatgaccaaaagggaagagctccatgttgtgaaaccaacaacttcagttgatgacgcccttgagatgctggtgaagcataggatctctggctttcctgttattgatgatgactggaatttggttggcgttgtgtcagattatgatttattggcactggatacaatatcaggagctggaccggctgaagcagacatatttcctgaggtggatagcacttggaagacatttcatgagatacagaagcttttgagcaaaaccaacgggaaggttattgctgatgttatgaccccagcgcctctcgtggtgcgtgaaacaactaaccttgaagatgctgcaaggttactccttgtgactaagtaccgcaggcttccagtggtcgatagctcaggcaaactggttgggatcattacaagagggaacgtcgtccaagccgccctcgaaatcaagaaaaaggttgaagggacactctgagatgactacctccaggtatcctttttgctgccacatggggggcttaggacttggacacatctctagttggcaactgatcaatcaaagcgactgtcagagtgagcgatgaaagtcgctatgtttatgaagatttgcccggagaagcacaggtgtatgtgtagtgtttgttatatatgctgatgcagtccttgctggccaaaacacaggttaccgattgttctggtttcctgggcttctttggacaccaaattcttaacctaggtcttgtttgggtgcacacgtatctagttcaacttacttgtattgaggttcattgaagtgc

SEQ ID NO: 6464 - protein, 309 aa, Zea mays subsp. mays
  peptide (1)..(309): Ceres Seq. ID no. 12360524
  misc_feature (154)..(207): Pfam Name: CBS domain Pfam Description: CBS domain
  misc_feature (123)..(309): Homolog of NCBI NO: 34015153 NR Description: putative CBS domain containing protein [Oryza
  misc_feature (78)..(303): Homolog of NCBI NO: 15234564 NR Description: putative protein; protein id: At4g36910.1
  misc_feature (119)..(308): Homolog of NCBI NO: 18418376 NR Description: putative protein; protein id: At4g34120.1, by cDNA: gi_13430837, supported by cDNA: gi_15810600 [Arabidopsis >gi|13430838|gb|AAK26041.1|AF360331_1 unknown protein
  misc_feature (119)..(209): Homolog of NCBI NO: 7486280 NR Description: hypothetical protein F28A23.120 - Arabidopsis >gi|2911050|emb|CAA17560.1| putative protein [Arabidopsis >gi|7270361|emb|CAB80129.1| putative protein [Arabidopsis
  misc_feature (227)..(288): Homolog of NCBI NO: 7486280 NR Description: hypothetical protein F28A23.120 - Arabidopsis >gi|2911050|emb|CAA17560.1| putative protein [Arabidopsis >gi|7270361|emb|CAB80129.1| putative protein [Arabidopsis
  misc_feature (150)..(297): Homolog of NCBI NO: 17231305 NR Description: hypothetical protein [Nostoc sp. PCC 7120]
  misc_feature (147)..(297): Homolog of NCBI NO: 16331252 NR Description: IMP dehydrogenase [Synechocystis sp. PCC 6803]
  misc_feature (150)..(297): Homolog of NCBI NO: 23040753 NR Description: hypothetical protein [Trichodesmium erythraeum
  misc_feature (149)..(297): Homolog of NCBI NO: 15678671 NR Description: conserved protein [Methanothermobacter
  misc_feature (150)..(297): Homolog of NCBI NO: 23127710 NR Description: hypothetical protein [Nostoc punctiforme]
ARDHYLEHPNRKNPVSPCGRALCLLCHSSPKAPEAQPEPQVASSPSPRGLVLLVQDETVRERAGEGGRAGRWDQAGSMDATLLLLPANCTAAASGRMRPRLPAGPHVASPGPSARPRTSIRASAVSAALAVRGLPQHASVAGQSTGSYRVGDVMTKREELHVVKPTTSVDDALEMLVKHRISGFPVIDDDWNLVGVVSDYDLLALDTISGAGPAEADIFPEVDSTWKTFHEIQKLLSKTNGKVIADVMTPAPLVVRETTNLEDAARLLLVTKYRRLPVVDSSGKLVGIITRGNVVQAALEIKKKVEGTL

SEQ ID NO: 6465 - protein, 232 aa, Zea mays subsp. mays
  peptide (1)..(232): Ceres Seq. ID no. 12360525
  misc_feature (77)..(130): Pfam Name: CBS domain Pfam Description: CBS domain
  misc_feature (46)..(232): Homolog of NCBI NO: 34015153 NR Description: putative CBS domain containing protein [Oryza
  misc_feature (1)..(226): Homolog of NCBI NO: 15234564 NR Description: putative protein; protein id: At4g36910.1
  misc_feature (42)..(231): Homolog of NCBI NO: 18418376 NR Description: putative protein; protein id: At4g34120.1, by cDNA: gi_13430837, supported by cDNA: gi_15810600 [Arabidopsis >gi|13430838|gb|AAK26041.1|AF360331_1 unknown protein
  misc_feature (42)..(132): Homolog of NCBI NO: 7486280 NR Description: hypothetical protein F28A23.120 - Arabidopsis >gi|2911050|emb|CAA17560.1| putative protein [Arabidopsis >gi|7270361|emb|CAB80129.1| putative protein [Arabidopsis
  misc_feature (150)..(211): Homolog of NCBI NO: 7486280 NR Description: hypothetical protein F28A23.120 - Arabidopsis >gi|2911050|emb|CAA17560.1| putative protein [Arabidopsis >gi|7270361|emb|CAB80129.1| putative protein [Arabidopsis
  misc_feature (73)..(220): Homolog of NCBI NO: 17231305 NR Description: hypothetical protein [Nostoc sp. PCC 7120]
  misc_feature (70)..(220): Homolog of NCBI NO: 16331252 NR Description: IMP dehydrogenase [Synechocystis sp. PCC 6803]
  misc_feature (73)..(220): Homolog of NCBI NO: 23040753 NR Description: hypothetical protein [Trichodesmium erythraeum
  misc_feature (72)..(220): Homolog of NCBI NO: 15678671 NR Description: conserved protein [Methanothermobacter
  misc_feature (73)..(220): Homolog of NCBI NO: 23127710 NR Description: hypothetical protein [Nostoc punctiforme]
MDATLLLLPANCTAAASGRMRPRLPAGPHVASPGPSARPRTSIRASAVSAALAVRGLPQHASVAGQSTGSYRVGDVMTKREELHVVKPTTSVDDALEMLVKHRISGFPVIDDDWNLVGVVSDYDLLALDTISGAGPAEADIFPEVDSTWKTFHEIQKLLSKTNGKVIADVMTPAPLVVRETTNLEDAARLLLVTKYRRLPVVDSSGKLVGIITRGNVVQAALEIKKKVEGTL

SEQ ID NO: 6466 - protein, 213 aa, Zea mays subsp. mays
  peptide (1)..(213): Ceres Seq. ID no. 12360526
  misc_feature (58)..(111): Pfam Name: CBS domain Pfam Description: CBS domain
  misc_feature (27)..(213): Homolog of NCBI NO: 34015153 NR Description: putative CBS domain containing protein [Oryza
  misc_feature (1)..(207): Homolog of NCBI NO: 15234564 NR Description: putative protein; protein id: At4g36910.1
  misc_feature (23)..(212): Homolog of NCBI NO: 18418376 NR Description: putative protein; protein id: At4g34120.1, by cDNA: gi_13430837, supported by cDNA: gi_15810600 [Arabidopsis >gi|13430838|gb|AAK26041.1|AF360331_1 unknown protein
  misc_feature (23)..(113): Homolog of NCBI NO: 7486280 NR Description: hypothetical protein F28A23.120 - Arabidopsis >gi|2911050|emb|CAA17560.1| putative protein [Arabidopsis >gi|7270361|emb|CAB80129.1| putative protein [Arabidopsis
  misc_feature (131)..(192): Homolog of NCBI NO: 7486280 NR Description: hypothetical protein F28A23.120 - Arabidopsis >gi|2911050|emb|CAA17560.1| putative protein [Arabidopsis >gi|7270361|emb|CAB80129.1| putative protein [Arabidopsis
  misc_feature (54)..(201): Homolog of NCBI NO: 17231305 NR Description: hypothetical protein [Nostoc sp. PCC 7120]
  misc_feature (51)..(201): Homolog of NCBI NO: 16331252 NR Description: IMP dehydrogenase [Synechocystis sp. PCC 6803]
  misc_feature (54)..(201): Homolog of NCBI NO: 23040753 NR Description: hypothetical protein [Trichodesmium erythraeum
  misc_feature (53)..(201): Homolog of NCBI NO: 15678671 NR Description: conserved protein [Methanothermobacter
  misc_feature (54)..(201): Homolog of NCBI NO: 23127710 NR Description: hypothetical protein [Nostoc punctiforme]
MRPRLPAGPHVASPGPSARPRTSIRASAVSAALAVRGLPQHASVAGQSTGSYRVGDVMTKREELHVVKPTTSVDDALEMLVKHRISGFPVIDDDWNLVGVVSDYDLLALDTISGAGPAEADIFPEVDSTWKTFHEIQKLLSKTNGKVIADVMTPAPLVVRETTNLEDAARLLLVTKYRRLPVVDSSGKLVGIITRGNVVQAALEIKKKVEGTL

SEQ ID NO: 6467 - DNA, 759 bp, Zea mays subsp. mays
  misc_feature (1)..(759): Ceres Seq. ID no. 12343174
  misc_feature: MA Experiment ID: 108544 Result: Up-regulated in Transcription
aggatgctgcggctgcgctggcgtgccgtcctccccccactcccactccctccgctgcctggcttgcttcgccgcctgcctccgcaccggcgcgccctctcgtcctcttccggctctatcccgcttccaccgccggtgatggaggcttcctacaagtttgggccctacaaaatcgacgccagggaggtcttccacgccacgcccctctcctacgccatggtgaatctccgcccgctgctcccgggtcatgttcttgtgtgccccaagcgtgaagtgaaaagattcgccgatctaagttctgatgagattagtgacttatgggttactgcaaaggaagttggtgcacgtcttgagcagtaccacaaagcatcttcacttacctttgctatccaggatggtcctcaagctggccaaacagttgcacatgtccacatccacctcatcccaaggaagaaaggggattttgagaaaaatgatgaaatatatgatgcgattgatgtgaaggagaaagaattgaaggagaagcttgacctggacatcgagaggaaagataggagcatggaagagatggctaatgaggccaatgagtaccgtgctctttttagttagtttctaagctgagctgactgtttgctagaaataaggtttgctacctgttcttcattgttgcagttcagttatggttgcgcactgacattgtgatgatgtcccgttctgtaccgtggagaattaataatttgttgcaaggaatgcattctc

SEQ ID NO: 6468 - protein, 202 aa, Zea mays subsp. mays
  peptide (1)..(202): Ceres Seq. ID no. 12343175
  misc_feature (47)..(202): Homolog of NCBI NO: 27542770 NR Description: ATPase-like protein [Sorghum bicolor]
  misc_feature (49)..(201): Homolog of NCBI NO: 27808510 NR Description: At5g58240 [Arabidopsis thaliana]
  misc_feature (49)..(201): Homolog of NCBI NO: 8777325 NR Description: bis(5'-adenosyl)-triphosphatase-like protein
  misc_feature (49)..(201): Homolog of NCBI NO: 30697031 NR Description: bis(5'-adenosyl)-triphosphatase-related; also
  misc_feature (49)..(202): Homolog of NCBI NO: 37589828 NR Description: Unknown (protein for MGC:73176) [Danio rerio]
  misc_feature (47)..(201): Homolog of NCBI NO: 28828402 NR Description: similar to diadenosine tetraphosphatase
  misc_feature (50)..(201): Homolog of NCBI NO: 11120730 NR Description: fragile histidine triad protein [Rattus >gi|9587672|gb|AAF89328.1|AF170064_1 fragile histidine triad
  misc_feature (50)..(201): Homolog of NCBI NO: 4503719 NR Description: fragile histidine triad gene; bis(5'-adenosyl)-
  misc_feature (50)..(201): Homolog of NCBI NO: 15215093 NR Description: Similar to fragile histidine triad gene [Mus
  misc_feature (50)..(201): Homolog of NCBI NO: 3318791 NR Description: Substrate Analog (Ib2) Complex With The His 96
RMLRLRWRAVLPPLPLPPLPGLLRRLPPHRRALSSSSGSIPLPPPVMEASYKFGPYKIDAREVFHATPLSYAMVNLRPLLPGHVLVCPKREVKRFADLSSDEISDLWVTAKEVGARLEQYHKASSLTFAIQDGPQAGQTVAHVHIHLIPRKKGDFEKNDEIYDAIDVKEKELKEKLDLDIERKDRSMEEMANEANEYRALFS

SEQ ID NO: 6469 - protein, 201 aa, Zea mays subsp. mays
  peptide (1)..(201): Ceres Seq. ID no. 12343176
  misc_feature (46)..(201): Homolog of NCBI NO: 27542770 NR Description: ATPase-like protein [Sorghum bicolor]
  misc_feature (48)..(200): Homolog of NCBI NO: 27808510 NR Description: At5g58240 [Arabidopsis thaliana]
  misc_feature (48)..(200): Homolog of NCBI NO: 8777325 NR Description: bis(5'-adenosyl)-triphosphatase-like protein
  misc_feature (48)..(200): Homolog of NCBI NO: 30697031 NR Description: bis(5'-adenosyl)-triphosphatase-related; also
  misc_feature (48)..(201): Homolog of NCBI NO: 37589828 NR Description: Unknown (protein for MGC:73176) [Danio rerio]
  misc_feature (46)..(200): Homolog of NCBI NO: 28828402 NR Description: similar to diadenosine tetraphosphatase
  misc_feature (49)..(200): Homolog of NCBI NO: 11120730 NR Description: fragile histidine triad protein [Rattus >gi|9587672|gb|AAF89328.1|AF170064_1 fragile histidine triad
  misc_feature (49)..(200): Homolog of NCBI NO: 4503719 NR Description: fragile histidine triad gene; bis(5'-adenosyl)-
  misc_feature (49)..(200): Homolog of NCBI NO: 15215093 NR Description: Similar to fragile histidine triad gene [Mus
  misc_feature (49)..(200): Homolog of NCBI NO: 3318791 NR Description: Substrate Analog (Ib2) Complex With The His 96
MLRLRWRAVLPPLPLPPLPGLLRRLPPHRRALSSSSGSIPLPPPVMEASYKFGPYKIDAREVFHATPLSYAMVNLRPLLPGHVLVCPKREVKRFADLSSDEISDLWVTAKEVGARLEQYHKASSLTFAIQDGPQAGQTVAHVHIHLIPRKKGDFEKNDEIYDAIDVKEKELKEKLDLDIERKDRSMEEMANEANEYRALFS

SEQ ID NO: 6470 - protein, 156 aa, Zea mays subsp. mays
  peptide (1)..(156): Ceres Seq. ID no. 12343177
  misc_feature (1)..(156): Homolog of NCBI NO: 27542770 NR Description: ATPase-like protein [Sorghum bicolor]
  misc_feature (3)..(155): Homolog of NCBI NO: 27808510 NR Description: At5g58240 [Arabidopsis thaliana]
  misc_feature (3)..(155): Homolog of NCBI NO: 8777325 NR Description: bis(5'-adenosyl)-triphosphatase-like protein
  misc_feature (3)..(155): Homolog of NCBI NO: 30697031 NR Description: bis(5'-adenosyl)-triphosphatase-related; also
  misc_feature (3)..(156): Homolog of NCBI NO: 37589828 NR Description: Unknown (protein for MGC:73176) [Danio rerio]
  misc_feature (1)..(155): Homolog of NCBI NO: 28828402 NR Description: similar to diadenosine tetraphosphatase
  misc_feature (4)..(155): Homolog of NCBI NO: 11120730 NR Description: fragile histidine triad protein [Rattus >gi|9587672|gb|AAF89328.1|AF170064_1 fragile histidine triad
  misc_feature (4)..(155): Homolog of NCBI NO: 4503719 NR Description: fragile histidine triad gene; bis(5'-adenosyl)-
  misc_feature (4)..(155): Homolog of NCBI NO: 15215093 NR Description: Similar to fragile histidine triad gene [Mus
  misc_feature (4)..(155): Homolog of NCBI NO: 3318791 NR Description: Substrate Analog (Ib2) Complex With The His 96
MEASYKFGPYKIDAREVFHATPLSYAMVNLRPLLPGHVLVCPKREVKRFADLSSDEISDLWVTAKEVGARLEQYHKASSLTFAIQDGPQAGQTVAHVHIHLIPRKKGDFEKNDEIYDAIDVKEKELKEKLDLDIERKDRSMEEMANEANEYRALFS

SEQ ID NO: 6471 - DNA, 692 bp, Zea mays subsp. mays
  misc_feature (1)..(692): Ceres Seq. ID no. 12401633
  misc_feature: MA Experiment ID: 108528 Result: Up-regulated in Transcription
  misc_feature: MA Experiment 108528 PARAMETER Experiment Name: Zm_Imbibed_Seeds_P Parameter: Age (day) Value: 5 vs. 2
  misc_feature: MA Experiment 108528 PARAMETER Experiment Name: Zm_Imbibed_Seeds_P Parameter: Organism Value: Zea mays
  misc_feature: MA Experiment 108528 PARAMETER Experiment Name: Zm_Imbibed_Seeds_P Parameter: Plant Line Value: 35A19
  misc_feature: MA Experiment 108528 PARAMETER Experiment Name: Zm_Imbibed_Seeds_P Parameter: Tissue Value: Aerial vs. Embryo
  misc_feature: MA Experiment ID: 108529 Result: Down-regulated in Transcription
  misc_feature: MA Experiment 108529 PARAMETER Experiment Name: Zm_Imbibed_Seeds_P Parameter: Age (day) Value: 5 vs. 2
  misc_feature: MA Experiment 108529 PARAMETER Experiment Name: Zm_Imbibed_Seeds_P Parameter: Organism Value: Zea mays
  misc_feature: MA Experiment 108529 PARAMETER Experiment Name: Zm_Imbibed_Seeds_P Parameter: Plant Line Value: 35A19
  misc_feature: MA Experiment 108529 PARAMETER Experiment Name: Zm_Imbibed_Seeds_P Parameter: Tissue Value: Roots vs. Embryo
  misc_feature: MA Experiment ID: 108530 Result: Up-regulated in Transcription
  misc_feature: MA Experiment 108530 PARAMETER Experiment Name: Zm_Imbibed_Seeds_P Parameter: Age (day) Value: 6 vs. 2
  misc_feature: MA Experiment 108530 PARAMETER Experiment Name: Zm_Imbibed_Seeds_P Parameter: Organism Value: Zea mays
  misc_feature: MA Experiment 108530 PARAMETER Experiment Name: Zm_Imbibed_Seeds_P Parameter: Plant Line Value: 35A19
  misc_feature: MA Experiment 108530 PARAMETER Experiment Name: Zm_Imbibed_Seeds_P Parameter: Tissue Value: Aerial vs. Embryo
  misc_feature: MA Experiment ID: 108536 Result: Down-regulated in Transcription
  misc_feature: MA Experiment 108536 PARAMETER Experiment Name: Zm_Meristem_P Parameter: Age (day) Value: 8
  misc_feature: MA Experiment 108536 PARAMETER Experiment Name: Zm_Meristem_P Parameter: Organism Value: Zea mays
  misc_feature: MA Experiment 108536 PARAMETER Experiment Name: Zm_Meristem_P Parameter: Plant Line Value: 35A19
  misc_feature: MA Experiment 108536 PARAMETER Experiment Name: Zm_Meristem_P Parameter: Tissue Value: Shoot Meristem vs. Above Shoot Meristem
  misc_feature: MA Experiment ID: 108543 Result: Up-regulated in Transcription
  misc_feature: MA Experiment ID: 108545 Result: Up-regulated in Transcription
  misc_feature: MA Experiment 108545 PARAMETER Experiment Name: Zm_Imbibed_Seeds_P Parameter: Age (day) Value: 3 vs. 2
  misc_feature: MA Experiment 108545 PARAMETER Experiment Name: Zm_Imbibed_Seeds_P Parameter: Organism Value: Zea mays
  misc_feature: MA Experiment 108545 PARAMETER Experiment Name: Zm_Imbibed_Seeds_P Parameter: Plant Line Value: 35A19
  misc_feature: MA Experiment 108545 PARAMETER Experiment Name: Zm_Imbibed_Seeds_P Parameter: Tissue Value: Aerial vs. Embryo
  misc_feature: MA Experiment ID: 108546 Result: Down-regulated in Transcription
  misc_feature: MA Experiment 108546 PARAMETER Experiment Name: Zm_Imbibed_Seeds_P Parameter: Age (day) Value: 3 vs. 2
  misc_feature: MA Experiment 108546 PARAMETER Experiment Name: Zm_Imbibed_Seeds_P Parameter: Organism Value: Zea mays
  misc_feature: MA Experiment 108546 PARAMETER Experiment Name: Zm_Imbibed_Seeds_P Parameter: Plant Line Value: 35A19
  misc_feature: MA Experiment 108546 PARAMETER Experiment Name: Zm_Imbibed_Seeds_P Parameter: Tissue Value: Roots vs. Embryo
  misc_feature: MA Experiment ID: 108547 Result: Up-regulated in Transcription
  misc_feature: MA Experiment 108547 PARAMETER Experiment Name: Zm_Imbibed_Seeds_P Parameter: Age (day) Value: 4 vs. 2
  misc_feature: MA Experiment 108547 PARAMETER Experiment Name: Zm_Imbibed_Seeds_P Parameter: Organism Value: Zea mays
  misc_feature: MA Experiment 108547 PARAMETER Experiment Name: Zm_Imbibed_Seeds_P Parameter: Plant Line Value: 35A19
  misc_feature: MA Experiment 108547 PARAMETER Experiment Name: Zm_Imbibed_Seeds_P Parameter: Tissue Value: Aerial vs. Embryo
  misc_feature: MA Experiment ID: 108597 Result: Down-regulated in Transcription
  misc_feature: MA Experiment 108597 PARAMETER Experiment Name: Zm_100uM_ABA_P Parameter: Age (day) Value: 9
  misc_feature: MA Experiment 108597 PARAMETER Experiment Name: Zm_100uM_ABA_P Parameter: Organism Value: Zea mays
  misc_feature: MA Experiment 108597 PARAMETER Experiment Name: Zm_100uM_ABA_P Parameter: Plant Line Value: 35A19
  misc_feature: MA Experiment 108597 PARAMETER Experiment Name: Zm_100uM_ABA_P Parameter: Timepoint (hr) Value: 24
  misc_feature: MA Experiment 108597 PARAMETER Experiment Name: Zm_100uM_ABA_P Parameter: Tissue Value: Aerial
  misc_feature: MA Experiment 108597 PARAMETER Experiment Name: Zm_100uM_ABA_P Parameter: Treatment Value: 100uM ABA vs. No Treatment
  misc_feature: MA Experiment ID: 108687 Result: Down-regulated in Transcription
  misc_feature: MA Experiment 108687 PARAMETER Experiment Name: Zm_Embryos-Flowers__P Parameter: Tissue Value: Embryo vs. Aerial+
  misc_feature: MA Experiment ID: 20000480 Result: Down-regulated in Transcription
  misc_feature: MA Experiment 20000480 PARAMETER Experiment Name: Zm_Drought_P Parameter: Age (day) Value: 11
  misc_feature: MA Experiment 20000480 PARAMETER Experiment Name: Zm_Drought_P Parameter: Organism Value: Zea mays
  misc_feature: MA Experiment 20000480 PARAMETER Experiment Name: Zm_Drought_P Parameter: Plant Line Value: 35A19
  misc_feature: MA Experiment 20000480 PARAMETER Experiment Name: Zm_Drought_P Parameter: Timepoint (hr) Value: 72
  misc_feature: MA Experiment 20000480 PARAMETER Experiment Name: Zm_Drought_P Parameter: Tissue Value: Aerial
  misc_feature: MA Experiment 20000480 PARAMETER Experiment Name: Zm_Drought_P Parameter: Treatment Value: Drought vs. No Drought
  misc_feature: MA Experiment ID: 20000534 Result: Down-regulated in Transcription
  misc_feature: MA Experiment 20000534 PARAMETER Experiment Name: Zm_Hybrid_Pollen_P Parameter: Age (day) Value: 8
  misc_feature: MA Experiment 20000534 PARAMETER Experiment Name: Zm_Hybrid_Pollen_P Parameter: Organism Value: Zea mays
  misc_feature: MA Experiment 20000534 PARAMETER Experiment Name: Zm_Hybrid_Pollen_P Parameter: Plant Line Value: 35A19
  misc_feature: MA Experiment 20000534 PARAMETER Experiment Name: Zm_Hybrid_Pollen_P Parameter: Tissue Value: Pollen vs. Aerial
  misc_feature: MA Experiment ID: 20000626 Result: Down-regulated in Transcription
  misc_feature: MA Experiment 20000626 PARAMETER Experiment Name: Zm_Herbicide-Treatments_P Parameter: Timepoint (hr) Value: 12
  misc_feature: MA Experiment 20000626 PARAMETER Experiment Name: Zm_Herbicide-Treatments_P Parameter: Tissue Value: Aerial
  misc_feature: MA Experiment 20000626 PARAMETER Experiment Name: Zm_Herbicide-Treatments_P Parameter: Treatment Value: Roundup vs. No Treatment
  misc_feature: MA Experiment ID: 20000627 Result: Down-regulated in Transcription
  misc_feature: MA Experiment 20000627 PARAMETER Experiment Name: Zm_Herbicide-Treatments_P Parameter: Timepoint (hr) Value: 12
  misc_feature: MA Experiment 20000627 PARAMETER Experiment Name: Zm_Herbicide-Treatments_P Parameter: Tissue Value: Aerial
  misc_feature: MA Experiment 20000627 PARAMETER Experiment Name: Zm_Herbicide-Treatments_P Parameter: Treatment Value: Finale vs. No Treatment
  misc_feature: MA Experiment ID: 20000630 Result: Down-regulated in Transcription
  misc_feature: MA Experiment 20000630 PARAMETER Experiment Name: Zm_Herbicide-Treatments_P Parameter: Timepoint (hr) Value: 4
  misc_feature: MA Experiment 20000630 PARAMETER Experiment Name: Zm_Herbicide-Treatments_P Parameter: Tissue Value: Aerial
  misc_feature: MA Experiment 20000630 PARAMETER Experiment Name: Zm_Herbicide-Treatments_P Parameter: Treatment Value: Roundup vs. No Treatment
  misc_feature: MA Experiment ID: 20000633 Result: Up-regulated in Transcription
  misc_feature: MA Experiment 20000633 PARAMETER Experiment Name: Zm_Herbicide-Treatments_P Parameter: Timepoint (hr) Value: 4
  misc_feature: MA Experiment 20000633 PARAMETER Experiment Name: Zm_Herbicide-Treatments_P Parameter: Tissue Value: Aerial
  misc_feature: MA Experiment 20000633 PARAMETER Experiment Name: Zm_Herbicide-Treatments_P Parameter: Treatment Value: Trimec vs. No Treatment
  misc_feature: MA Experiment ID: 20001608 Result: Up-regulated in Transcription
  misc_feature: MA Experiment 20001608 PARAMETER Experiment Name: Zm_50ppm_KNO3_L-to-H_P Parameter: Age (day) Value: 21
  misc_feature: MA Experiment 20001608 PARAMETER Experiment Name: Zm_50ppm_KNO3_L-to-H_P Parameter: Organism Value: Zea mays
  misc_feature: MA Experiment 20001608 PARAMETER Experiment Name: Zm_50ppm_KNO3_L-to-H_P Parameter: Plant Line Value: 35A19
  misc_feature: MA Experiment 20001608 PARAMETER Experiment Name: Zm_50ppm_KNO3_L-to-H_P Parameter: Timepoint (hr) Value: 48
  misc_feature: MA Experiment 20001608 PARAMETER Experiment Name: Zm_50ppm_KNO3_L-to-H_P Parameter: Tissue Value: Shoots
  misc_feature: MA Experiment 20001608 PARAMETER Experiment Name: Zm_50ppm_KNO3_L-to-H_P Parameter: Treatment Value: 50ppm KNO3 vs. 50ppm KCl
atcatcgcttgcacttgcagcgtcacaagcaaaccgaagctagtcagtcacacacagctctccagcttccatccacaaagaagaaggaaacaagctaaccatgatgatgagcgccaagaagattgctcatctcgccaagaaatggcagaggatggccgcgcaagggaggaagcgcctcaccttgggggcggcggcggcaaaggaagtcgacgagtgctgcggctctgtggcgagcaagggccattgtgcggtgtacacggccgacggggcacggttcgaggtgccgctggcgtgccttagcacccctgtcttcagggagctcctgcagatgtcacaggaggagttcggcttcgcgggcggcgatggcaggatcacgctgccctgcgacgcggcggtcatggagtacgccatgtgtttgctcaggagaggagcctctgctgagctagagcaggcgttccttagcaccatggccatgtcatgccactgtgccatctacatggcgccgtatgttggacgagccaggcagcagcagatcgttgtttagttagttgctgttccgtgtatgtagacgtgtagtgtagagcaatgattttaactaggtgggtactattattcaaagccttctgatccagcaaccgatcaagtgaggtgttgtaagtacaagagaataaagagatatgattcttgtttcg

SEQ ID NO: 6472 - protein, 147 aa, Zea mays subsp. mays
  peptide (1)..(147): Ceres Seq. ID no. 12401634
  misc_feature (2)..(108): Pfam Name: Auxin responsive protein Pfam Description: Auxin responsive protein
  misc_feature (2)..(142): Homolog of NCBI NO: 32187718 NR Description: auxin induced protein [Zea mays]
  misc_feature (2)..(130): Homolog of NCBI NO: 20149052 NR Description: auxin-induced SAUR-like protein [Capsicum annuum]
  misc_feature (2)..(147): Homolog of NCBI NO: 21592571 NR Description: auxin-induced protein, putative [Arabidopsis
  misc_feature (2)..(147): Homolog of NCBI NO: 18397101 NR Description: auxin-induced protein, putative; protein id:
  misc_feature (1)..(147): Homolog of NCBI NO: 18397123 NR Description: auxin-induced protein, putative; protein id:
  misc_feature (1)..(124): Homolog of NCBI NO: 26452075 NR Description: putative auxin-induced protein [Arabidopsis
  misc_feature (1)..(147): Homolog of NCBI NO: 26452170 NR Description: putative auxin-induced protein [Arabidopsis
  misc_feature (1)..(124): Homolog of NCBI NO: 15218924 NR Description: auxin-induced protein, putative; protein id: supported by cDNA: 4119. [Arabidopsis thaliana]
  misc_feature (2)..(131): Homolog of NCBI NO: 15218951 NR Description: auxin-induced protein, putative; protein id: supported by cDNA: gi_18700092, supported by cDNA: gi_20453356
  misc_feature (2)..(131): Homolog of NCBI NO: 38603942 NR Description: At1g29420 [Arabidopsis thaliana]
MMMSAKKIAHLAKKWQRMAAQGRKRLTLGAAAAKEVDECCGSVASKGHCAVYTADGARFEVPLACLSTPVFRELLQMSQEEFGFAGGDGRITLPCDAAVMEYAMCLLRRGASAELEQAFLSTMAMSCHCAIYMAPYVGRARQQQIVV

SEQ ID NO: 6473 - protein, 146 aa, Zea mays subsp. mays
  peptide (1)..(146): Ceres Seq. ID no. 12401635
  misc_feature (1)..(107): Pfam Name: Auxin responsive protein Pfam Description: Auxin responsive protein
  misc_feature (1)..(141): Homolog of NCBI NO: 32187718 NR Description: auxin induced protein [Zea mays]
  misc_feature (1)..(129): Homolog of NCBI NO: 20149052 NR Description: auxin-induced SAUR-like protein [Capsicum annuum]
  misc_feature (1)..(146): Homolog of NCBI NO: 21592571 NR Description: auxin-induced protein, putative [Arabidopsis
  misc_feature (1)..(146): Homolog of NCBI NO: 18397101 NR Description: auxin-induced protein, putative; protein id:
  misc_feature (1)..(146): Homolog of NCBI NO: 18397123 NR Description: auxin-induced protein, putative; protein id:
  misc_feature (1)..(123): Homolog of NCBI NO: 26452075 NR Description: putative auxin-induced protein [Arabidopsis
  misc_feature (1)..(146): Homolog of NCBI NO: 26452170 NR Description: putative auxin-induced protein [Arabidopsis
  misc_feature (1)..(123): Homolog of NCBI NO: 15218924 NR Description: auxin-induced protein, putative; protein id: supported by cDNA: 4119. [Arabidopsis thaliana]
  misc_feature (1)..(130): Homolog of NCBI NO: 15218951 NR Description: auxin-induced protein, putative; protein id: supported by cDNA: gi_18700092, supported by cDNA: gi_20453356
  misc_feature (1)..(130): Homolog of NCBI NO: 38603942 NR Description: At1g29420 [Arabidopsis thaliana]
MMSAKKIAHLAKKWQRMAAQGRKRLTLGAAAAKEVDECCGSVASKGHCAVYTADGARFEVPLACLSTPVFRELLQMSQEEFGFAGGDGRITLPCDAAVMEYAMCLLRRGASAELEQAFLSTMAMSCHCAIYMAPYVGRARQQQIVV

SEQ ID NO: 6474 - protein, 145 aa, Zea mays subsp. mays
  peptide (1)..(145): Ceres Seq. ID no. 12401636
  misc_feature (1)..(106): Pfam Name: Auxin responsive protein Pfam Description: Auxin responsive protein
  misc_feature (1)..(140): Homolog of NCBI NO: 32187718 NR Description: auxin induced protein [Zea mays]
  misc_feature (1)..(128): Homolog of NCBI NO: 20149052 NR Description: auxin-induced SAUR-like protein [Capsicum annuum]
  misc_feature (1)..(145): Homolog of NCBI NO: 21592571 NR Description: auxin-induced protein, putative [Arabidopsis
  misc_feature (1)..(145): Homolog of NCBI NO: 18397101 NR Description: auxin-induced protein, putative; protein id:
  misc_feature (1)..(145): Homolog of NCBI NO: 18397123 NR Description: auxin-induced protein, putative; protein id:
  misc_feature (1)..(122): Homolog of NCBI NO: 26452075 NR Description: putative auxin-induced protein [Arabidopsis
  misc_feature (1)..(145): Homolog of NCBI NO: 26452170 NR Description: putative auxin-induced protein [Arabidopsis
  misc_feature (1)..(122): Homolog of NCBI NO: 15218924 NR Description: auxin-induced protein, putative; protein id: supported by cDNA: 4119. [Arabidopsis thaliana]
  misc_feature (1)..(129): Homolog of NCBI NO: 15218951 NR Description: auxin-induced protein, putative; protein id: supported by cDNA: gi_18700092, supported by cDNA: gi_20453356
  misc_feature (1)..(129): Homolog of NCBI NO: 38603942 NR Description: At1g29420 [Arabidopsis thaliana]
MSAKKIAHLAKKWQRMAAQGRKRLTLGAAAAKEVDECCGSVASKGHCAVYTADGARFEVPLACLSTPVFRELLQMSQEEFGFAGGDGRITLPCDAAVMEYAMCLLRRGASAELEQAFLSTMAMSCHCAIYMAPYVGRARQQQIVV

SEQ ID NO: 6475 - DNA, 1765 bp, Zea mays subsp. mays
  misc_feature (1)..(1765): Ceres Seq. ID no. 13492636
  misc_feature: MA Experiment ID: 108556 Result: Down-regulated in Transcription
  misc_feature: MA Experiment 108556 PARAMETER Experiment Name: Zm_Drought_P Parameter: Age (day) Value: 9
  misc_feature: MA Experiment 108556 PARAMETER Experiment Name: Zm_Drought_P Parameter: Organism Value: Zea mays
  misc_feature: MA Experiment 108556 PARAMETER Experiment Name: Zm_Drought_P Parameter: Plant Line Value: 35A19
  misc_feature: MA Experiment 108556 PARAMETER Experiment Name: Zm_Drought_P Parameter: Timepoint (hr) Value: 24
  misc_feature: MA Experiment 108556 PARAMETER Experiment Name: Zm_Drought_P Parameter: Tissue Value: Aerial
  misc_feature: MA Experiment 108556 PARAMETER Experiment Name: Zm_Drought_P Parameter: Treatment Value: Drought vs. No Drought
  misc_feature: MA Experiment ID: 20000535 Result: Down-regulated in Transcription
  misc_feature: MA Experiment 20000535 PARAMETER Experiment Name: Zm_Hybrid_Seed_Dev_P Parameter: DAP Value: 30 vs. 12
  misc_feature: MA Experiment 20000535 PARAMETER Experiment Name: Zm_Hybrid_Seed_Dev_P Parameter: Organism Value: Zea mays
  misc_feature: MA Experiment 20000535 PARAMETER Experiment Name: Zm_Hybrid_Seed_Dev_P Parameter: Plant Line Value: 35A19
  misc_feature: MA Experiment 20000535 PARAMETER Experiment Name: Zm_Hybrid_Seed_Dev_P Parameter: Tissue Value: Embryo vs. Unfert Floret
ctccccaaaattctcatctagtcaccggccattccgttgtgtccataggctgtcagtcacttccagtcctagcccactcctccgatgctccaatcatcaacactctctacctgtgtccgtgtgctcttctcctctgcaccaccaaccaaccagtgctgtcctccgccgatccactgacctaccgcgagcgccaatggcgacccgccgcggtcctcgccgccacattagcgctgttcctcggcgccgccgccgcaacggccgcgacggctgcggcggaggcggaccggatcggcaggctgccgggccagccgccggtcaacttctccatgtactccggctacgtcaccgtggacgcggcggcggggcgggccctcttctactggttcatcgaggcggccggcgtgcccgcggagtccgcgccgctcgtgctgtggctcaacggcgggcccgggtgctcctccgtcggctacggcgcgtcagaggagctcggcgccttccggatcaacgccgacggcaggacgctctacttgaacccctacccctggaataaagtggcgaacatgctgttcttggactcgccggccggcgtcggctactcatactccaactccacctccgatctgtacactgccggtgacaacaagacagcccatgactcgtacaatttcttggtgaactggctggagcggtttccacaatacaagcatcgcgatttctacatcacaggagagagctacgcaggccactacgtgcctcagttgtctcagctagtctaccggaacaacaaaggcatcgagaagccgatcctaaacttcaaaggcttcatggttggaaatgcggtaattgacgattaccacgacttcatcggcacattcgagtacttgtggacgcacgggctgatctctgacgaaacctacgagaagctgcggcttgcctgccagttcgacgtatctgagcatgcgtcgaaggagtgcaacaaggtcttcgacatcgccgaggccgaggaaggcaatatcgatgcgtacagcatctacacgccgacttgcaagaagacttcactccacaagcgcaggctaatcagaggaagaacgccctggttgcccagagggtacgatccctgcacggagaagtactccacgaagtactacaacctacctgaggtgcagagagctctacacgccaatgtcaccggaataccgtatccctgggtaacctgcagtgacccagtgtatgatttttggaaagattcaccgaggtccatgcttcctatctaccgtgaactcatcgccgcgggcataaggatatgggttttcagtggcgacgctgattccgttgtcccgctcaccgcgacaaggtactccattgacgccctctttctaccgactatcacgaactggtatccttggtacgacgacgaagaggtcggtgggtggtgccaggtgtacgaggggctgacactggtgacggtccgaggcgcagggcacgaggttcccctgcaccggccgcggcagggcctgaagctgttcgagcacttcctgcggggtgagcccatgcccaggcctgtagatagcgtccagtcgttttagaactggttgctgtctccccgcttggtgaaggaggagacctggctgcgctgcgcattcttgttgctgtaaactcatccgtcacactccgttgttaggatggatttgctgaaaatcagaacataatgttgctcgtttcagtgagcagattgggtatttagcaatgtctcgttttgacagtg

SEQ ID NO: 6476 - protein, 527 aa, Zea mays subsp. mays
  peptide (1)..(527): Ceres Seq. ID no. 13492637
  misc_feature (80)..(527): Homolog of NCBI NO: 34895992 NR Description: putative carboxypeptidase D [Oryza sativa
  misc_feature (72)..(518): Homolog of NCBI NO: 34908012 NR Description: putative carboxypeptidase D [Oryza sativa
  misc_feature (68)..(518): Homolog of NCBI NO: 7428204 NR Description: carboxypeptidase D (EC 3.4.16.6) precursor -
  misc_feature (68)..(518): Homolog of NCBI NO: 20455471 NR Description: Serine carboxypeptidase II precursor
  misc_feature (84)..(518): Homolog of NCBI NO: 15227493 NR Description: serine carboxypeptidase -related [Arabidopsis
  misc_feature (71)..(518): Homolog of NCBI NO: 15231911 NR Description: serine carboxypeptidase -related [Arabidopsis >gi|6648211|gb|AAF21209.1|AC013483_33 putative serine
  misc_feature (205)..(527): Homolog of NCBI NO: 2493493 NR Description: Serine carboxypeptidase II-1 precursor (CP-MII.1)
  misc_feature (93)..(518): Homolog of NCBI NO: 7428205 NR Description: carboxypeptidase D (EC 3.4.16.6) - wheat
  misc_feature (73)..(524): Homolog of NCBI NO: 18417667 NR Description: serine carboxypeptidase -related [Arabidopsis >gi|15293049|gb|AAK93635.1| putative serine carboxypeptidase II thaliana] >gi|22136958|gb|AAM91708.1| putative serine
  misc_feature (75)..(519): Homolog of NCBI NO: 13877871 NR Description: putative serine carboxypeptidase II [Arabidopsis
  misc_feature (80)..(527): Homolog of NCBI NO: 34895992 NR Description: putative carboxypeptidase D [Oryza sativa
  misc_feature (72)..(518): Homolog of NCBI NO: 34908012 NR Description: putative carboxypeptidase D [Oryza sativa
  misc_feature (68)..(518): Homolog of NCBI NO: 7428204 NR Description: carboxypeptidase D (EC 3.4.16.6) precursor -
  misc_feature (68)..(518): Homolog of NCBI NO: 20455471 NR Description: Serine carboxypeptidase II precursor
  misc_feature (84)..(518): Homolog of NCBI NO: 15227493 NR Description: serine carboxypeptidase -related [Arabidopsis
  misc_feature (71)..(518): Homolog of NCBI NO: 15231911 NR Description: serine carboxypeptidase -related [Arabidopsis >gi|6648211|gb|AAF21209.1|AC013483_33 putative serine
  misc_feature (205)..(527): Homolog of NCBI NO: 2493493 NR Description: Serine carboxypeptidase II-1 precursor (CP-MII.1)
  misc_feature (93)..(518): Homolog of NCBI NO: 7428205 NR Description: carboxypeptidase D (EC 3.4.16.6) - wheat
  misc_feature (73)..(524): Homolog of NCBI NO: 18417667 NR Description: serine carboxypeptidase -related [Arabidopsis >gi|15293049|gb|AAK93635.1| putative serine carboxypeptidase II thaliana] >gi|22136958|gb|AAM91708.1| putative serine
  misc_feature (75)..(519): Homolog of NCBI NO: 13877871 NR Description: putative serine carboxypeptidase II [Arabidopsis
PQNSHLVTGHSVVSIGCQSLPVLAHSSDAPIINTLYLCPCALLLCTTNQPVLSSADPLTYRERQWRPAAVLAATLALFLGAAAATAATAAAEADRIGRLPGQPPVNFSMYSGYVTVDAAAGRALFYWFIEAAGVPAESAPLVLWLNGGPGCSSVGYGASEELGAFRINADGRTLYLNPYPWNKVANMLFLDSPAGVGYSYSNSTSDLYTAGDNKTAHDSYNFLVNWLERFPQYKHRDFYITGESYAGHYVPQLSQLVYRNNKGIEKPILNFKGFMVGNAVIDDYHDFIGTFEYLWTHGLISDETYEKLRLACQFDVSEHASKECNKVFDIAEAEEGNIDAYSIYTPTCKKTSLHKRRLIRGRTPWLPRGYDPCTEKYSTKYYNLPEVQRALHANVTGIPYPWVTCSDPVYDFWKDSPRSMLPIYRELIAAGIRIWVFSGDADSVVPLTATRYSIDALFLPTITNWYPWYDDEEVGGWCQVYEGLTLVTVRGAGHEVPLHRPRQGLKLFEHFLRGEPMPRPVDSVQSF

SEQ ID NO: 6477 - protein, 419 aa, Zea mays subsp. mays
  peptide (1)..(419): Ceres Seq. ID no. 13492638
  misc_feature (1)..(419): Homolog of NCBI NO: 34895992 NR Description: putative carboxypeptidase D [Oryza sativa
  misc_feature (1)..(410): Homolog of NCBI NO: 34908012 NR Description: putative carboxypeptidase D [Oryza sativa
  misc_feature (1)..(410): Homolog of NCBI NO: 7428204 NR Description: carboxypeptidase D (EC 3.4.16.6) precursor -
  misc_feature (1)..(410): Homolog of NCBI NO: 20455471 NR Description: Serine carboxypeptidase II precursor
  misc_feature (1)..(410): Homolog of NCBI NO: 15227493 NR Description: serine carboxypeptidase -related [Arabidopsis
  misc_feature (1)..(410): Homolog of NCBI NO: 15231911 NR Description: serine carboxypeptidase -related [Arabidopsis >gi|6648211|gb|AAF21209.1|AC013483_33 putative serine
  misc_feature (97)..(419): Homolog of NCBI NO: 2493493 NR Description: Serine carboxypeptidase II-1 precursor (CP-MII.1)
  misc_feature (1)..(410): Homolog of NCBI NO: 7428205 NR Description: carboxypeptidase D (EC 3.4.16.6) - wheat
  misc_feature (1)..(416): Homolog of NCBI NO: 18417667 NR Description: serine carboxypeptidase -related [Arabidopsis >gi|15293049|gb|AAK93635.1| putative serine carboxypeptidase II thaliana] >gi|22136958|gb|AAM91708.1| putative serine
  misc_feature (1)..(411): Homolog of NCBI NO: 13877871 NR Description: putative serine carboxypeptidase II [Arabidopsis
  misc_feature (97)..(419): Homolog of NCBI NO: 2493493 NR Description: Serine carboxypeptidase II-1 precursor (CP-MII.1)
  misc_feature (1)..(410): Homolog of NCBI NO: 7428205 NR Description: carboxypeptidase D (EC 3.4.16.6) - wheat
  misc_feature (1)..(416): Homolog of NCBI NO: 18417667 NR Description: serine carboxypeptidase -related [Arabidopsis >gi|15293049|gb|AAK93635.1| putative serine carboxypeptidase II thaliana] >gi|22136958|gb|AAM91708.1| putative serine
  misc_feature (1)..(411): Homolog of NCBI NO: 13877871 NR Description: putative serine carboxypeptidase II [Arabidopsis
  misc_feature (1)..(419): Homolog of NCBI NO: 34895992 NR Description: putative carboxypeptidase D [Oryza sativa
  misc_feature (1)..(410): Homolog of NCBI NO: 34908012 NR Description: putative carboxypeptidase D [Oryza sativa
  misc_feature (1)..(410): Homolog of NCBI NO: 7428204 NR Description: carboxypeptidase D (EC 3.4.16.6) precursor -
  misc_feature (1)..(410): Homolog of NCBI NO: 20455471 NR Description: Serine carboxypeptidase II precursor
  misc_feature (1)..(410): Homolog of NCBI NO: 15227493 NR Description: serine carboxypeptidase -related [Arabidopsis
  misc_feature (1)..(410): Homolog of NCBI NO: 15231911 NR Description: serine carboxypeptidase -related [Arabidopsis >gi|6648211|gb|AAF21209.1|AC013483_33 putative serine
MYSGYVTVDAAAGRALFYWFIEAAGVPAESAPLVLWLNGGPGCSSVGYGASEELGAFRINADGRTLYLNPYPWNKVANMLFLDSPAGVGYSYSNSTSDLYTAGDNKTAHDSYNFLVNWLERFPQYKHRDFYITGESYAGHYVPQLSQLVYRNNKGIEKPILNFKGFMVGNAVIDDYHDFIGTFEYLWTHGLISDETYEKLRLACQFDVSEHASKECNKVFDIAEAEEGNIDAYSIYTPTCKKTSLHKRRLIRGRTPWLPRGYDPCTEKYSTKYYNLPEVQRALHANVTGIPYPWVTCSDPVYDFWKDSPRSMLPIYRELIAAGIRIWVFSGDADSVVPLTATRYSIDALFLPTITNWYPWYDDEEVGGWCQVYEGLTLVTVRGAGHEVPLHRPRQGLKLFEHFLRGEPMPRPVDSVQSF

SEQ ID NO: 6478 - protein, 341 aa, Zea mays subsp. mays
  peptide (1)..(341): Ceres Seq. ID no. 13492639
  misc_feature (1)..(341): Homolog of NCBI NO: 34895992 NR Description: putative carboxypeptidase D [Oryza sativa
  misc_feature (1)..(332): Homolog of NCBI NO: 34908012 NR Description: putative carboxypeptidase D [Oryza sativa
  misc_feature (1)..(332): Homolog of NCBI NO: 7428204 NR Description: carboxypeptidase D (EC 3.4.16.6) precursor -
  misc_feature (1)..(332): Homolog of NCBI NO: 20455471 NR Description: Serine carboxypeptidase II precursor
  misc_feature (1)..(332): Homolog of NCBI NO: 15227493 NR Description: serine carboxypeptidase -related [Arabidopsis
  misc_feature (1)..(332): Homolog of NCBI NO: 15231911 NR Description: serine carboxypeptidase -related [Arabidopsis >gi|6648211|gb|AAF21209.1|AC013483_33 putative serine
  misc_feature (19)..(341): Homolog of NCBI NO: 2493493 NR Description: Serine carboxypeptidase II-1 precursor (CP-MII.1)
  misc_feature (1)..(332): Homolog of NCBI NO: 7428205 NR Description: carboxypeptidase D (EC 3.4.16.6) - wheat
  misc_feature (1)..(338): Homolog of NCBI NO: 18417667 NR Description: serine carboxypeptidase -related [Arabidopsis >gi|15293049|gb|AAK93635.1| putative serine carboxypeptidase II thaliana] >gi|22136958|gb|AAM91708.1| putative serine
  misc_feature (1)..(333): Homolog of NCBI NO: 13877871 NR Description: putative serine carboxypeptidase II [Arabidopsis
  misc_feature (1)..(341): Homolog of NCBI NO: 34895992 NR Description: putative carboxypeptidase D [Oryza sativa
  misc_feature (1)..(332): Homolog of NCBI NO: 34908012 NR Description: putative carboxypeptidase D [Oryza sativa
  misc_feature (1)..(332): Homolog of NCBI NO: 7428204 NR Description: carboxypeptidase D (EC 3.4.16.6) precursor -
  misc_feature (1)..(332): Homolog of NCBI NO: 20455471 NR Description: Serine carboxypeptidase II precursor
  misc_feature (1)..(332): Homolog of NCBI NO: 15227493 NR Description: serine carboxypeptidase -related [Arabidopsis
  misc_feature (1)..(332): Homolog of NCBI NO: 15231911 NR Description: serine carboxypeptidase -related [Arabidopsis >gi|6648211|gb|AAF21209.1|AC013483_33 putative serine
  misc_feature (19)..(341): Homolog of NCBI NO: 2493493 NR Description: Serine carboxypeptidase II-1 precursor (CP-MII.1)
  misc_feature (1)..(332): Homolog of NCBI NO: 7428205 NR Description: carboxypeptidase D (EC 3.4.16.6) - wheat
  misc_feature (1)..(338): Homolog of NCBI NO: 18417667 NR Description: serine carboxypeptidase -related [Arabidopsis >gi|15293049|gb|AAK93635.1| putative serine carboxypeptidase II thaliana] >gi|22136958|gb|AAM91708.1| putative serine
  misc_feature (1)..(333): Homolog of NCBI NO: 13877871 NR Description: putative serine carboxypeptidase II [Arabidopsis
MLFLDSPAGVGYSYSNSTSDLYTAGDNKTAHDSYNFLVNWLERFPQYKHRDFYITGESYAGHYVPQLSQLVYRNNKGIEKPILNFKGFMVGNAVIDDYHDFIGTFEYLWTHGLISDETYEKLRLACQFDVSEHASKECNKVFDIAEAEEGNIDAYSIYTPTCKKTSLHKRRLIRGRTPWLPRGYDPCTEKYSTKYYNLPEVQRALHANVTGIPYPWVTCSDPVYDFWKDSPRSMLPIYRELIAAGIRIWVFSGDADSVVPLTATRYSIDALFLPTITNWYPWYDDEEVGGWCQVYEGLTLVTVRGAGHEVPLHRPRQGLKLFEHFLRGEPMPRPVDSVQSF

SEQ ID NO: 6479 - DNA, 1318 bp, Zea mays subsp. mays
  misc_feature (1)..(1318): Ceres Seq. ID no. 12365566
  misc_feature: MA Experiment ID: 108523 Result: Down-regulated in Transcription
  misc_feature: MA Experiment 108523 PARAMETER Experiment Name: Zm_42deg_Heat_P Parameter: Age (day) Value: 8
  misc_feature: MA Experiment 108523 PARAMETER Experiment Name: Zm_42deg_Heat_P Parameter: Organism Value: Zea mays
  misc_feature: MA Experiment 108523 PARAMETER Experiment Name: Zm_42deg_Heat_P Parameter: Plant Line Value: 35A19
  misc_feature: MA Experiment 108523 PARAMETER Experiment Name: Zm_42deg_Heat_P Parameter: Temperature (deg C) Value: 42 vs. 22
  misc_feature: MA Experiment 108523 PARAMETER Experiment Name: Zm_42deg_Heat_P Parameter: Timepoint (hr) Value: 6
  misc_feature: MA Experiment 108523 PARAMETER Experiment Name: Zm_42deg_Heat_P Parameter: Tissue Value: Aerial
  misc_feature: MA Experiment ID: 108535 Result: Up-regulated in Transcription
  misc_feature: MA Experiment 108535 PARAMETER Experiment Name: Zm_Meristem_P Parameter: Age (day) Value: 8
  misc_feature: MA Experiment 108535 PARAMETER Experiment Name: Zm_Meristem_P Parameter: Organism Value: Zea mays
  misc_feature: MA Experiment 108535 PARAMETER Experiment Name: Zm_Meristem_P Parameter: Plant Line Value: 35A19
  misc_feature: MA Experiment 108535 PARAMETER Experiment Name: Zm_Meristem_P Parameter: Tissue Value: Root Meristem vs. Above Root Meristem
  misc_feature: MA Experiment ID: 108543 Result: Up-regulated in Transcription
  misc_feature: MA Experiment ID: 108597 Result: Down-regulated in Transcription
  misc_feature: MA Experiment 108597 PARAMETER Experiment Name: Zm_100uM_ABA_P Parameter: Age (day) Value: 9
  misc_feature: MA Experiment 108597 PARAMETER Experiment Name: Zm_100uM_ABA_P Parameter: Organism Value: Zea mays
  misc_feature: MA Experiment 108597 PARAMETER Experiment Name: Zm_100uM_ABA_P Parameter: Plant Line Value: 35A19
  misc_feature: MA Experiment 108597 PARAMETER Experiment Name: Zm_100uM_ABA_P Parameter: Timepoint (hr) Value: 24
  misc_feature: MA Experiment 108597 PARAMETER Experiment Name: Zm_100uM_ABA_P Parameter: Tissue Value: Aerial
  misc_feature: MA Experiment 108597 PARAMETER Experiment Name: Zm_100uM_ABA_P Parameter: Treatment Value: 100uM ABA vs. No Treatment
  misc_feature: MA Experiment ID: 20000477 Result: Down-regulated in Transcription
  misc_feature: MA Experiment 20000477 PARAMETER Experiment Name: Zm_5mM_SA_P Parameter: Age (day) Value: 10
  misc_feature: MA Experiment 20000477 PARAMETER Experiment Name: Zm_5mM_SA_P Parameter: Organism Value: Zea mays
  misc_feature: MA Experiment 20000477 PARAMETER Experiment Name: Zm_5mM_SA_P Parameter: Plant Line Value: 35A19
  misc_feature: MA Experiment 20000477 PARAMETER Experiment Name: Zm_5mM_SA_P Parameter: Timepoint (hr) Value: 48
  misc_feature: MA Experiment 20000477 PARAMETER Experiment Name: Zm_5mM_SA_P Parameter: Tissue Value: Aerial
  misc_feature: MA Experiment 20000477 PARAMETER Experiment Name: Zm_5mM_SA_P Parameter: Treatment Value: 5mM SA vs. No Treatment
  misc_feature: MA Experiment ID: 20000478 Result: Down-regulated in Transcription
  misc_feature: MA Experiment 20000478 PARAMETER Experiment Name: Zm_5mM_SA_P Parameter: Age (day) Value: 11
  misc_feature: MA Experiment 20000478 PARAMETER Experiment Name: Zm_5mM_SA_P Parameter: Organism Value: Zea mays
  misc_feature: MA Experiment 20000478 PARAMETER Experiment Name: Zm_5mM_SA_P Parameter: Plant Line Value: 35A19
  misc_feature: MA Experiment 20000478 PARAMETER Experiment Name: Zm_5mM_SA_P Parameter: Timepoint (hr) Value: 72
  misc_feature: MA Experiment 20000478 PARAMETER Experiment Name: Zm_5mM_SA_P Parameter: Tissue Value: Aerial
  misc_feature: MA Experiment 20000478 PARAMETER Experiment Name: Zm_5mM_SA_P Parameter: Treatment Value: 5mM SA vs. No Treatment
  misc_feature: MA Experiment ID: 20000479 Result: Down-regulated in Transcription
  misc_feature: MA Experiment 20000479 PARAMETER Experiment Name: Zm_Drought_P Parameter: Age (day) Value: 10
  misc_feature: MA Experiment 20000479 PARAMETER Experiment Name: Zm_Drought_P Parameter: Organism Value: Zea mays
  misc_feature: MA Experiment 20000479 PARAMETER Experiment Name: Zm_Drought_P Parameter: Plant Line Value: 35A19
  misc_feature: MA Experiment 20000479 PARAMETER Experiment Name: Zm_Drought_P Parameter: Timepoint (hr) Value: 48
  misc_feature: MA Experiment 20000479 PARAMETER Experiment Name: Zm_Drought_P Parameter: Tissue Value: Aerial
  misc_feature: MA Experiment 20000479 PARAMETER Experiment Name: Zm_Drought_P Parameter: Treatment Value: Drought vs. No Drought
  misc_feature: MA Experiment ID: 20000480 Result: Down-regulated in Transcription
  misc_feature: MA Experiment 20000480 PARAMETER Experiment Name: Zm_Drought_P Parameter: Age (day) Value: 11
  misc_feature: MA Experiment 20000480 PARAMETER Experiment Name: Zm_Drought_P Parameter: Organism Value: Zea mays
  misc_feature: MA Experiment 20000480 PARAMETER Experiment Name: Zm_Drought_P Parameter: Plant Line Value: 35A19
  misc_feature: MA Experiment 20000480 PARAMETER Experiment Name: Zm_Drought_P Parameter: Timepoint (hr) Value: 72
  misc_feature: MA Experiment 20000480 PARAMETER Experiment Name: Zm_Drought_P Parameter: Tissue Value: Aerial
  misc_feature: MA Experiment 20000480 PARAMETER Experiment Name: Zm_Drought_P Parameter: Treatment Value: Drought vs. No Drought
  misc_feature: MA Experiment ID: 20000487 Result: Down-regulated in Transcription
  misc_feature: MA Experiment 20000487 PARAMETER Experiment Name: Zm_50mM_NH4NO3_L_to_H_P Parameter: Organism Value: Zea mays
  misc_feature: MA Experiment 20000487 PARAMETER Experiment Name: Zm_50mM_NH4NO3_L_to_H_P Parameter: Timepoint (hr) Value: 4
  misc_feature: MA Experiment 20000487 PARAMETER Experiment Name: Zm_50mM_NH4NO3_L_to_H_P Parameter: Tissue Value: Leaves
  misc_feature: MA Experiment 20000487 PARAMETER Experiment Name: Zm_50mM_NH4NO3_L_to_H_P Parameter: Treatment Value: 50mM NH4NO3 vs. 100mM Mannitol
  misc_feature: MA Experiment ID: 20000492 Result: Up-regulated in Transcription
  misc_feature: MA Experiment 20000492 PARAMETER Experiment Name: Zm_Hybrid_Seed_Dev_P Parameter: DAP Value: 12
  misc_feature: MA Experiment 20000492 PARAMETER Experiment Name: Zm_Hybrid_Seed_Dev_P Parameter: Organism Value: Zea mays
  misc_feature: MA Experiment 20000492 PARAMETER Experiment Name: Zm_Hybrid_Seed_Dev_P Parameter: Plant Line Value: 35A19
  misc_feature: MA Experiment 20000492 PARAMETER Experiment Name: Zm_Hybrid_Seed_Dev_P Parameter: Tissue Value: Fert Kernel vs. Unfert Floret
  misc_feature: MA Experiment ID: 20000626 Result: Down-regulated in Transcription
  misc_feature: MA Experiment 20000626 PARAMETER Experiment Name: Zm_Herbicide-Treatments_P Parameter: Timepoint (hr) Value: 12
  misc_feature: MA Experiment 20000626 PARAMETER Experiment Name: Zm_Herbicide-Treatments_P Parameter: Tissue Value: Aerial
  misc_feature: MA Experiment 20000626 PARAMETER Experiment Name: Zm_Herbicide-Treatments_P Parameter: Treatment Value: Roundup vs. No Treatment
  misc_feature: MA Experiment ID: 20000632 Result: Down-regulated in Transcription
  misc_feature: MA Experiment 20000632 PARAMETER Experiment Name: Zm_Herbicide-Treatments_P Parameter: Timepoint (hr) Value: 4
  misc_feature: MA Experiment 20000632 PARAMETER Experiment Name: Zm_Herbicide-Treatments_P Parameter: Tissue Value: Aerial
  misc_feature: MA Experiment 20000632 PARAMETER Experiment Name: Zm_Herbicide-Treatments_P Parameter: Treatment Value: Glean vs. No Treatment
aagcaaccagaaccatacaattcttgccaaagcagaatctatttaacggcgacaacacaaccaaagcgtggcattcttccttccttctttccttcaccaatggccacgagaatagccttgtgtcttctcggccacgtcctcctcgccgtcgcgtcgatggcagtggcggcggcggccggtgacgcgggcaagatcggcatctgccacggccgcgttggcagtaacctcccgccgccgtcggccgccgcggcactgctcaagcggaacgggatcaccaaggcgcggctcttcctgccggacccggccgtgctcccggccttcgccgcggcgggcatcgacctcatggtgggcgtgcccaacgagaacctcaccttcctggccgcggcggggcccgagggcgcggcgcagtggctgcggtccgcggtcctgggcccacgcccccgccgagcgcgtccggtgcctcgccgtcggcaacgaggtgctgtacaacaaccagttctatgcgcctcacctcgtgccggccatgcggaacctgcacgccgcgctcgccaccctggggctggacggcagggtcaaggtctcctccgcgcacgcctcctcggtgctggccgcctcgtacccgccctccgccggcgcgttcgacgccgcctccctccccgtcctccgccccatgctgcggttcctggccgacaccggtgcgcccttcatggtgaacgcctaccctttcatcagccacgtgaacgacccggcgaacgtgcagctcgcgtacgcgctcttcggagcgggcgcggcgccggtgcaggacggcgcgctggtgtacacgaacctgttcgacgccacggtagacgcgctggtggccgcgctggagaaggaggggttcggcggcgtgccggtcgcggtgaccgagaccgggtggccaaccgcggggcacccggccgccaccccgcagaacgccgcagcgtacaacgccaagattgtggagagggcggcgcgcggcgtcggcacgccgaagcggcccggcgtgcccgtggaggtgttcctgttcgacttgtacgacgaggacggcaagcccggccccgagttcgagcgccactttggcatcttcagggcggacggcagtaaggcgtatgacatcaactttgcctagagctggtagtttctggagcgatggacggcttgttgattagtggatcaactggtgtatgctgaagaaaaaatgcctcacatcccctcttgttttacatgtctcgtgactactgtgtcgtttattgatttattatagttgcccacatgcgaagactaataactgattcttagc

SEQ ID NO: 6480 - protein, 373 aa, Zea mays subsp. mays
  peptide (1)..(373): Ceres Seq. ID no. 12365567
  misc_feature (65)..(142): Pfam Name: Glycosyl hydrolases family 17 Pfam Description: Glycosyl hydrolases family 17
  misc_feature (34)..(142): Homolog of NCBI NO: 1076625 NR Description: glucan endo-1,3-beta-D-glucosidase (EC 3.2.1.39)
  misc_feature (34)..(143): Homolog of NCBI NO: 6006371 NR Description: Similar to hypothetical protein - potato (S31196)
  misc_feature (46)..(142): Homolog of NCBI NO: 37531294 NR Description: putative beta-1,3-glucanase [Oryza sativa
  misc_feature (34)..(147): Homolog of NCBI NO: 6073860 NR Description: beta-1, 3-glucananse [Musa acuminata]
  misc_feature (48)..(143): Homolog of NCBI NO: 31126737 NR Description: putative beta 1,3-glucanase [Oryza sativa
  misc_feature (46)..(147): Homolog of NCBI NO: 11279331 NR Description: beta-1,3-glucanase (EC 3.2.1.-) precursor
  misc_feature (34)..(142): Homolog of NCBI NO: 34908492 NR Description: putative beta-1,3-glucanase [Oryza sativa
  misc_feature (65)..(147): Homolog of NCBI NO: 6448757 NR Description: beta-1,3-glucanase [Musa acuminata]
  misc_feature (48)..(142): Homolog of NCBI NO: 7447966 NR Description: 1,3-beta-glucanase (EC 3.2.1.-) PRm 6b - maize
  misc_feature (48)..(151): Homolog of NCBI NO: 1352327 NR Description: Glucan endo-1,3-beta-glucosidase, acidic isoform
KQPEPYNSCQSRIYLTATTQPKRGILPSFFPSPMATRIALCLLGHVLLAVASMAVAAAAGDAGKIGICHGRVGSNLPPPSAAAALLKRNGITKARLFLPDPAVLPAFAAAGIDLMVGVPNENLTFLAAAGPEGAAQWLRSAVLGPRPRRARPVPRRRQRGAVQQPVLCASPRAGHAEPARRARHPGAGRQGQGLLRARLLGAGRLVPALRRRVRRRLPPRPPPHAAVPGRHRCALHGERLPFHQPRERPGERAARVRALRSGRGAGAGRRAGVHEPVRRHGRRAGGRAGEGGVRRRAGRGDRDRVANRGAPGRHPAERRSVQRQDCGEGGARRRHAEAARRARGGVPVRLVRRGRQARPRVRAPLWHLQGGRQ

SEQ ID NO: 6481 - protein, 340 aa, Zea mays subsp. mays
  peptide (1)..(340): Ceres Seq. ID no. 12365568
  misc_feature (32)..(109): Pfam Name: Glycosyl hydrolases family 17 Pfam Description: Glycosyl hydrolases family 17
  misc_feature (1)..(109): Homolog of NCBI NO: 1076625 NR Description: glucan endo-1,3-beta-D-glucosidase (EC 3.2.1.39)
  misc_feature (1)..(110): Homolog of NCBI NO: 6006371 NR Description: Similar to hypothetical protein - potato (S31196)
  misc_feature (13)..(109): Homolog of NCBI NO: 37531294 NR Description: putative beta-1,3-glucanase [Oryza sativa
  misc_feature (1)..(114): Homolog of NCBI NO: 6073860 NR Description: beta-1, 3-glucananse [Musa acuminata]
  misc_feature (15)..(110): Homolog of NCBI NO: 31126737 NR Description: putative beta 1,3-glucanase [Oryza sativa
  misc_feature (13)..(114): Homolog of NCBI NO: 11279331 NR Description: beta-1,3-glucanase (EC 3.2.1.-) precursor
  misc_feature (1)..(109): Homolog of NCBI NO: 34908492 NR Description: putative beta-1,3-glucanase [Oryza sativa
  misc_feature (32)..(114): Homolog of NCBI NO: 6448757 NR Description: beta-1,3-glucanase [Musa acuminata]
  misc_feature (15)..(109): Homolog of NCBI NO: 7447966 NR Description: 1,3-beta-glucanase (EC 3.2.1.-) PRm 6b - maize
  misc_feature (15)..(118): Homolog of NCBI NO: 1352327 NR Description: Glucan endo-1,3-beta-glucosidase, acidic isoform
MATRIALCLLGHVLLAVASMAVAAAAGDAGKIGICHGRVGSNLPPPSAAAALLKRNGITKARLFLPDPAVLPAFAAAGIDLMVGVPNENLTFLAAAGPEGAAQWLRSAVLGPRPRRARPVPRRRQRGAVQQPVLCASPRAGHAEPARRARHPGAGRQGQGLLRARLLGAGRLVPALRRRVRRRLPPRPPPHAAVPGRHRCALHGERLPFHQPRERPGERAARVRALRSGRGAGAGRRAGVHEPVRRHGRRAGGRAGEGGVRRRAGRGDRDRVANRGAPGRHPAERRSVQRQDCGEGGARRRHAEAARRARGGVPVRLVRRGRQARPRVRAPLWHLQGGRQ

SEQ ID NO: 6482 - protein, 321 aa, Zea mays subsp. mays
  peptide (1)..(321): Ceres Seq. ID no. 12365569
  misc_feature (13)..(90): Pfam Name: Glycosyl hydrolases family 17 Pfam Description: Glycosyl hydrolases family 17
  misc_feature (1)..(90): Homolog of NCBI NO: 1076625 NR Description: glucan endo-1,3-beta-D-glucosidase (EC 3.2.1.39)
  misc_feature (1)..(91): Homolog of NCBI NO: 6006371 NR Description: Similar to hypothetical protein - potato (S31196)
  misc_feature (1)..(90): Homolog of NCBI NO: 37531294 NR Description: putative beta-1,3-glucanase [Oryza sativa
  misc_feature (1)..(95): Homolog of NCBI NO: 6073860 NR Description: beta-1, 3-glucananse [Musa acuminata]
  misc_feature (1)..(91): Homolog of NCBI NO: 31126737 NR Description: putative beta 1,3-glucanase [Oryza sativa
  misc_feature (1)..(95): Homolog of NCBI NO: 11279331 NR Description: beta-1,3-glucanase (EC 3.2.1.-) precursor
  misc_feature (1)..(90): Homolog of NCBI NO: 34908492 NR Description: putative beta-1,3-glucanase [Oryza sativa
  misc_feature (13)..(95): Homolog of NCBI NO: 6448757 NR Description: beta-1,3-glucanase [Musa acuminata]
  misc_feature (1)..(90): Homolog of NCBI NO: 7447966 NR Description: 1,3-beta-glucanase (EC 3.2.1.-) PRm 6b - maize
  misc_feature (1)..(99): Homolog of NCBI NO: 1352327 NR Description: Glucan endo-1,3-beta-glucosidase, acidic isoform
MAVAAAAGDAGKIGICHGRVGSNLPPPSAAAALLKRNGITKARLFLPDPAVLPAFAAAGIDLMVGVPNENLTFLAAAGPEGAAQWLRSAVLGPRPRRARPVPRRRQRGAVQQPVLCASPRAGHAEPARRARHPGAGRQGQGLLRARLLGAGRLVPALRRRVRRRLPPRPPPHAAVPGRHRCALHGERLPFHQPRERPGERAARVRALRSGRGAGAGRRAGVHEPVRRHGRRAGGRAGEGGVRRRAGRGDRDRVANRGAPGRHPAERRSVQRQDCGEGGARRRHAEAARRARGGVPVRLVRRGRQARPRVRAPLWHLQGGRQ

SEQ ID NO: 6483 - DNA, 1287 bp, Zea mays subsp. mays
  misc_feature (1)..(1287): Ceres Seq. ID no. 12403690
  misc_feature: MA Experiment ID: 108523 Result: Down-regulated in Transcription
  misc_feature: MA Experiment 108523 PARAMETER Experiment Name: Zm_42deg_Heat_P Parameter: Age (day) Value: 8
  misc_feature: MA Experiment 108523 PARAMETER Experiment Name: Zm_42deg_Heat_P Parameter: Organism Value: Zea mays
  misc_feature: MA Experiment 108523 PARAMETER Experiment Name: Zm_42deg_Heat_P Parameter: Plant Line Value: 35A19
  misc_feature: MA Experiment 108523 PARAMETER Experiment Name: Zm_42deg_Heat_P Parameter: Temperature (deg C) Value: 42 vs. 22
  misc_feature: MA Experiment 108523 PARAMETER Experiment Name: Zm_42deg_Heat_P Parameter: Timepoint (hr) Value: 6
  misc_feature: MA Experiment 108523 PARAMETER Experiment Name: Zm_42deg_Heat_P Parameter: Tissue Value: Aerial
  misc_feature: MA Experiment ID: 108527 Result: Down-regulated in Transcription
  misc_feature: MA Experiment 108527 PARAMETER Experiment Name: Zm_5mM_NO_P Parameter: Age (day) Value: 8
  misc_feature: MA Experiment 108527 PARAMETER Experiment Name: Zm_5mM_NO_P Parameter: Organism Value: Zea mays
  misc_feature: MA Experiment 108527 PARAMETER Experiment Name: Zm_5mM_NO_P Parameter: Plant Line Value: 35A19
  misc_feature: MA Experiment 108527 PARAMETER Experiment Name: Zm_5mM_NO_P Parameter: Timepoint (hr) Value: 6
  misc_feature: MA Experiment 108527 PARAMETER Experiment Name: Zm_5mM_NO_P Parameter: Tissue Value: Aerial
  misc_feature: MA Experiment 108527 PARAMETER Experiment Name: Zm_5mM_NO_P Parameter: Treatment Value: 5mM NO vs. No Treatment
  misc_feature: MA Experiment ID: 108528 Result: Down-regulated in Transcription
  misc_feature: MA Experiment 108528 PARAMETER Experiment Name: Zm_Imbibed_Seeds_P Parameter: Age (day) Value: 5 vs. 2
  misc_feature: MA Experiment 108528 PARAMETER Experiment Name: Zm_Imbibed_Seeds_P Parameter: Organism Value: Zea mays
  misc_feature: MA Experiment 108528 PARAMETER Experiment Name: Zm_Imbibed_Seeds_P Parameter: Plant Line Value: 35A19
  misc_feature: MA Experiment 108528 PARAMETER Experiment Name: Zm_Imbibed_Seeds_P Parameter: Tissue Value: Aerial vs. Embryo
  misc_feature: MA Experiment ID: 108530 Result: Down-regulated in Transcription
  misc_feature: MA Experiment 108530 PARAMETER Experiment Name: Zm_Imbibed_Seeds_P Parameter: Age (day) Value: 6 vs. 2
  misc_feature: MA Experiment 108530 PARAMETER Experiment Name: Zm_Imbibed_Seeds_P Parameter: Organism Value: Zea mays
  misc_feature: MA Experiment 108530 PARAMETER Experiment Name: Zm_Imbibed_Seeds_P Parameter: Plant Line Value: 35A19
  misc_feature: MA Experiment 108530 PARAMETER Experiment Name: Zm_Imbibed_Seeds_P Parameter: Tissue Value: Aerial vs. Embryo
  misc_feature: MA Experiment ID: 108535 Result: Down-regulated in Transcription
  misc_feature: MA Experiment 108535 PARAMETER Experiment Name: Zm_Meristem_P Parameter: Age (day) Value: 8
  misc_feature: MA Experiment 108535 PARAMETER Experiment Name: Zm_Meristem_P Parameter: Organism Value: Zea mays
  misc_feature: MA Experiment 108535 PARAMETER Experiment Name: Zm_Meristem_P Parameter: Plant Line Value: 35A19
  misc_feature: MA Experiment 108535 PARAMETER Experiment Name: Zm_Meristem_P Parameter: Tissue Value: Root Meristem vs. Above Root Meristem
  misc_feature: MA Experiment ID: 108543 Result: Up-regulated in Transcription
  misc_feature: MA Experiment ID: 108544 Result: Up-regulated in Transcription
  misc_feature: MA Experiment ID: 108545 Result: Down-regulated in Transcription
  misc_feature: MA Experiment 108545 PARAMETER Experiment Name: Zm_Imbibed_Seeds_P Parameter: Age (day) Value: 3 vs. 2
  misc_feature: MA Experiment 108545 PARAMETER Experiment Name: Zm_Imbibed_Seeds_P Parameter: Organism Value: Zea mays
  misc_feature: MA Experiment 108545 PARAMETER Experiment Name: Zm_Imbibed_Seeds_P Parameter: Plant Line Value: 35A19
  misc_feature: MA Experiment 108545 PARAMETER Experiment Name: Zm_Imbibed_Seeds_P Parameter: Tissue Value: Aerial vs. Embryo
  misc_feature: MA Experiment ID: 108597 Result: Down-regulated in Transcription
  misc_feature: MA Experiment 108597 PARAMETER Experiment Name: Zm_100uM_ABA_P Parameter: Age (day) Value: 9
  misc_feature: MA Experiment 108597 PARAMETER Experiment Name: Zm_100uM_ABA_P Parameter: Organism Value: Zea mays
  misc_feature: MA Experiment 108597 PARAMETER Experiment Name: Zm_100uM_ABA_P Parameter: Plant Line Value: 35A19
  misc_feature: MA Experiment 108597 PARAMETER Experiment Name: Zm_100uM_ABA_P Parameter: Timepoint (hr) Value: 24
  misc_feature: MA Experiment 108597 PARAMETER Experiment Name: Zm_100uM_ABA_P Parameter: Tissue Value: Aerial
  misc_feature: MA Experiment 108597 PARAMETER Experiment Name: Zm_100uM_ABA_P Parameter: Treatment Value: 100uM ABA vs. No Treatment
  misc_feature: MA Experiment ID: 20000478 Result: Down-regulated in Transcription
  misc_feature: MA Experiment 20000478 PARAMETER Experiment Name: Zm_5mM_SA_P Parameter: Age (day) Value: 11
  misc_feature: MA Experiment 20000478 PARAMETER Experiment Name: Zm_5mM_SA_P Parameter: Organism Value: Zea mays
  misc_feature: MA Experiment 20000478 PARAMETER Experiment Name: Zm_5mM_SA_P Parameter: Plant Line Value: 35A19
  misc_feature: MA Experiment 20000478 PARAMETER Experiment Name: Zm_5mM_SA_P Parameter: Timepoint (hr) Value: 72
  misc_feature: MA Experiment 20000478 PARAMETER Experiment Name: Zm_5mM_SA_P Parameter: Tissue Value: Aerial
  misc_feature: MA Experiment 20000478 PARAMETER Experiment Name: Zm_5mM_SA_P Parameter: Treatment Value: 5mM SA vs. No Treatment
  misc_feature: MA Experiment ID: 20000479 Result: Down-regulated in Transcription
  misc_feature: MA Experiment 20000479 PARAMETER Experiment Name: Zm_Drought_P Parameter: Age (day) Value: 10
  misc_feature: MA Experiment 20000479 PARAMETER Experiment Name: Zm_Drought_P Parameter: Organism Value: Zea mays
  misc_feature: MA Experiment 20000479 PARAMETER Experiment Name: Zm_Drought_P Parameter: Plant Line Value: 35A19
  misc_feature: MA Experiment 20000479 PARAMETER Experiment Name: Zm_Drought_P Parameter: Timepoint (hr) Value: 48
  misc_feature: MA Experiment 20000479 PARAMETER Experiment Name: Zm_Drought_P Parameter: Tissue Value: Aerial
  misc_feature: MA Experiment 20000479 PARAMETER Experiment Name: Zm_Drought_P Parameter: Treatment Value: Drought vs. No Drought
  misc_feature: MA Experiment ID: 20000480 Result: Down-regulated in Transcription
  misc_feature: MA Experiment 20000480 PARAMETER Experiment Name: Zm_Drought_P Parameter: Age (day) Value: 11
  misc_feature: MA Experiment 20000480 PARAMETER Experiment Name: Zm_Drought_P Parameter: Organism Value: Zea mays
  misc_feature: MA Experiment 20000480 PARAMETER Experiment Name: Zm_Drought_P Parameter: Plant Line Value: 35A19
  misc_feature: MA Experiment 20000480 PARAMETER Experiment Name: Zm_Drought_P Parameter: Timepoint (hr) Value: 72
  misc_feature: MA Experiment 20000480 PARAMETER Experiment Name: Zm_Drought_P Parameter: Tissue Value: Aerial
  misc_feature: MA Experiment 20000480 PARAMETER Experiment Name: Zm_Drought_P Parameter: Treatment Value: Drought vs. No Drought
  misc_feature: MA Experiment ID: 20000535 Result: Down-regulated in Transcription
  misc_feature: MA Experiment 20000535 PARAMETER Experiment Name: Zm_Hybrid_Seed_Dev_P Parameter: DAP Value: 30 vs. 12
  misc_feature: MA Experiment 20000535 PARAMETER Experiment Name: Zm_Hybrid_Seed_Dev_P Parameter: Organism Value: Zea mays
  misc_feature: MA Experiment 20000535 PARAMETER Experiment Name: Zm_Hybrid_Seed_Dev_P Parameter: Plant Line Value: 35A19
  misc_feature: MA Experiment 20000535 PARAMETER Experiment Name: Zm_Hybrid_Seed_Dev_P Parameter: Tissue Value: Embryo vs. Unfert Floret
aaacacccagtggttcaggctggccaaagttatgagttatctgccctgtcctcccaaactaatctagtcccaggaaactaatttcaacacacaactggacgacggtgcgttgcgttggtggccgccggcgacgatgtcgtcgtccgcgggcgacaagaggaagaagacggcgtgcgtgaccggagggaacgggtacatcggctccgcgctcatcaagatgctgctggaggacggatacgccgtcaagacgacggtcaggaacccagacgacatggacaagaactcccacctcaagggcctgcagcagctcgggccgctgacggtcctccgcggcgacatggacgaggagggcagcttcgacgacgccgtcgccggctgcgactacgtcttcctcgtcgccgcaccggtgaacctcgcagcacaggatccagagaaagagcagatcgagccgtccgtccgaggcacgctgaacgcgatgaggtcgtgcgcgaaggccgggacggtgcggcgcgtgatcctgacctcgtcggtggccggagtctacatcaggccggacctgctgcaactgcgaggcgacgggcacgtgctggacgaggagtcctggtccgacgtcgagtacctcagagccaacaggccaccgacctgggggtactgcgtgtcgaaggtgctcctcgagaaggaggcgtgcaggttcgcgggcgagcacggcatcagcctggtcaccgtctgccccgtcatcaccgtgggcgcggcgccggcgcccaaggtccgcacgagcatcatcgacagcctctccatgctgtccggcgacgagcgagggctcgccgtgctcaaaggcatcgagaagacctccggcgcggtgcagctggtccacgtcgacgacctctgccgcgccgagctgttcctggcagaggcggcggcggccgacgggaggtacatctgctgcggcctcaacacgaccgtcctcgagctcgcgcgtttcctggcacacaagtacccgcagtacggcgtgaaaacaaacctccacgacgatgaacagcagctactcgagaagccgagggtgaaggtgtcgtcggagaagctcgtccgggaagggtttgagtacaggcacaacacgctggacgagatctacgacaatgtggtcgagtacgtcaaggcgttagggattctgccctactgatacttagatgcccgagcttaattaagtaggagggcagcatatatgttgtcggacatatacgagtcttggaaagtacttaaataatttatggacatatttttcattgg

SEQ ID NO: 6484 - protein, 348 aa, Zea mays subsp. mays
  peptide (1)..(348): Ceres Seq. ID no. 12403691
  misc_feature (13)..(159): Pfam Name: 3-beta hydroxysteroid dehydrogenase/isomerase family Pfam Description: 3-beta hydroxysteroid dehydrogenase/isomerase
  misc_feature (10)..(348): Homolog of NCBI NO: 39546249 NR Description: OSJNBa0089N06.19 [Oryza sativa (japonica
  misc_feature (5)..(347): Homolog of NCBI NO: 39546252 NR Description: OSJNBa0089N06.22 [Oryza sativa (japonica
  misc_feature (45)..(323): Homolog of NCBI NO: 39546254 NR Description: OSJNBa0089N06.24 [Oryza sativa (japonica
  misc_feature (10)..(29): Homolog of NCBI NO: 39546254 NR Description: OSJNBa0089N06.24 [Oryza sativa (japonica
  misc_feature (10)..(300): Homolog of NCBI NO: 39546251 NR Description: OSJNBa0089N06.21 [Oryza sativa (japonica
  misc_feature (304)..(348): Homolog of NCBI NO: 39546251 NR Description: OSJNBa0089N06.21 [Oryza sativa (japonica
  misc_feature (10)..(345): Homolog of NCBI NO: 27966032 NR Description: anthocyanidin reductase [Medicago truncatula]
  misc_feature (11)..(346): Homolog of NCBI NO: 15220598 NR Description: dihydroflavonol 4-reductase, putative; protein At1g61720.1, supported by cDNA: gi_6689825 [Arabidopsis thaliana] Leucoanthocyanidin reductase (LAR) (BANYULS) (Anthocyanin spotted
  misc_feature (11)..(346): Homolog of NCBI NO: 6689826 NR Description: DFR-like protein [Arabidopsis thaliana]
  misc_feature (1)..(347): Homolog of NCBI NO: 1706374 NR Description: DIHYDROFLAVONOL-4-REDUCTASE (DFR)
MSSSAGDKRKKTACVTGGNGYIGSALIKMLLEDGYAVKTTVRNPDDMDKNSHLKGLQQLGPLTVLRGDMDEEGSFDDAVAGCDYVFLVAAPVNLAAQDPEKEQIEPSVRGTLNAMRSCAKAGTVRRVILTSSVAGVYIRPDLLQLRGDGHVLDEESWSDVEYLRANRPPTWGYCVSKVLLEKEACRFAGEHGISLVTVCPVITVGAAPAPKVRTSIIDSLSMLSGDERGLAVLKGIEKTSGAVQLVHVDDLCRAELFLAEAAAADGRYICCGLNTTVLELARFLAHKYPQYGVKTNLHDDEQQLLEKPRVKVSSEKLVREGFEYRHNTLDEIYDNVVEYVKALGILPY

SEQ ID NO: 6485 - protein, 320 aa, Zea mays subsp. mays
  peptide (1)..(320): Ceres Seq. ID no. 12403692
  misc_feature (1)..(131): Pfam Name: 3-beta hydroxysteroid dehydrogenase/isomerase family Pfam Description: 3-beta hydroxysteroid dehydrogenase/isomerase
  misc_feature (1)..(320): Homolog of NCBI NO: 39546249 NR Description: OSJNBa0089N06.19 [Oryza sativa (japonica
  misc_feature (1)..(319): Homolog of NCBI NO: 39546252 NR Description: OSJNBa0089N06.22 [Oryza sativa (japonica
  misc_feature (17)..(295): Homolog of NCBI NO: 39546254 NR Description: OSJNBa0089N06.24 [Oryza sativa (japonica
  misc_feature (1)..(272): Homolog of NCBI NO: 39546251 NR Description: OSJNBa0089N06.21 [Oryza sativa (japonica
  misc_feature (276)..(320): Homolog of NCBI NO: 39546251 NR Description: OSJNBa0089N06.21 [Oryza sativa (japonica
  misc_feature (1)..(317): Homolog of NCBI NO: 27966032 NR Description: anthocyanidin reductase [Medicago truncatula]
  misc_feature (1)..(318): Homolog of NCBI NO: 15220598 NR Description: dihydroflavonol 4-reductase, putative; protein At1g61720.1, supported by cDNA: gi_6689825 [Arabidopsis thaliana] Leucoanthocyanidin reductase (LAR) (BANYULS) (Anthocyanin spotted
  misc_feature (1)..(318): Homolog of NCBI NO: 6689826 NR Description: DFR-like protein [Arabidopsis thaliana]
  misc_feature (1)..(319): Homolog of NCBI NO: 1706374 NR Description: DIHYDROFLAVONOL-4-REDUCTASE (DFR)
  misc_feature (1)..(319): Homolog of NCBI NO: 7427700 NR Description: dihydrokaempferol 4-reductase (EC 1.1.1.219) B -
MLLEDGYAVKTTVRNPDDMDKNSHLKGLQQLGPLTVLRGDMDEEGSFDDAVAGCDYVFLVAAPVNLAAQDPEKEQIEPSVRGTLNAMRSCAKAGTVRRVILTSSVAGVYIRPDLLQLRGDGHVLDEESWSDVEYLRANRPPTWGYCVSKVLLEKEACRFAGEHGISLVTVCPVITVGAAPAPKVRTSIIDSLSMLSGDERGLAVLKGIEKTSGAVQLVHVDDLCRAELFLAEAAAADGRYICCGLNTTVLELARFLAHKYPQYGVKTNLHDDEQQLLEKPRVKVSSEKLVREGFEYRHNTLDEIYDNVVEYVKALGILPY

SEQ ID NO: 6486 - protein, 302 aa, Zea mays subsp. mays
  peptide (1)..(302): Ceres Seq. ID no. 12403693
  misc_feature (1)..(113): Pfam Name: 3-beta hydroxysteroid dehydrogenase/isomerase family Pfam Description: 3-beta hydroxysteroid dehydrogenase/isomerase
  misc_feature (1)..(302): Homolog of NCBI NO: 39546249 NR Description: OSJNBa0089N06.19 [Oryza sativa (japonica
  misc_feature (1)..(301): Homolog of NCBI NO: 39546252 NR Description: OSJNBa0089N06.22 [Oryza sativa (japonica
  misc_feature (1)..(277): Homolog of NCBI NO: 39546254 NR Description: OSJNBa0089N06.24 [Oryza sativa (japonica
  misc_feature (1)..(254): Homolog of NCBI NO: 39546251 NR Description: OSJNBa0089N06.21 [Oryza sativa (japonica
  misc_feature (258)..(302): Homolog of NCBI NO: 39546251 NR Description: OSJNBa0089N06.21 [Oryza sativa (japonica
  misc_feature (1)..(299): Homolog of NCBI NO: 27966032 NR Description: anthocyanidin reductase [Medicago truncatula]
  misc_feature (1)..(300): Homolog of NCBI NO: 15220598 NR Description: dihydroflavonol 4-reductase, putative; protein At1g61720.1, supported by cDNA: gi_6689825 [Arabidopsis thaliana] Leucoanthocyanidin reductase (LAR) (BANYULS) (Anthocyanin spotted
  misc_feature (1)..(300): Homolog of NCBI NO: 6689826 NR Description: DFR-like protein [Arabidopsis thaliana]
  misc_feature (1)..(301): Homolog of NCBI NO: 1706374 NR Description: DIHYDROFLAVONOL-4-REDUCTASE (DFR)
  misc_feature (1)..(301): Homolog of NCBI NO: 7427700 NR Description: dihydrokaempferol 4-reductase (EC 1.1.1.219) B -
MDKNSHLKGLQQLGPLTVLRGDMDEEGSFDDAVAGCDYVFLVAAPVNLAAQDPEKEQIEPSVRGTLNAMRSCAKAGTVRRVILTSSVAGVYIRPDLLQLRGDGHVLDEESWSDVEYLRANRPPTWGYCVSKVLLEKEACRFAGEHGISLVTVCPVITVGAAPAPKVRTSIIDSLSMLSGDERGLAVLKGIEKTSGAVQLVHVDDLCRAELFLAEAAAADGRYICCGLNTTVLELARFLAHKYPQYGVKTNLHDDEQQLLEKPRVKVSSEKLVREGFEYRHNTLDEIYDNVVEYVKALGILPY

SEQ ID NO: 6487 - DNA, 1190 bp, Zea mays subsp. mays
  misc_feature (1)..(1190): Ceres Seq. ID no. 12351164
  misc_feature: MA Experiment ID: 108523 Result: Down-regulated in Transcription
  misc_feature: MA Experiment 108523 PARAMETER Experiment Name: Zm_42deg_Heat_P Parameter: Age (day) Value: 8
  misc_feature: MA Experiment 108523 PARAMETER Experiment Name: Zm_42deg_Heat_P Parameter: Organism Value: Zea mays
  misc_feature: MA Experiment 108523 PARAMETER Experiment Name: Zm_42deg_Heat_P Parameter: Plant Line Value: 35A19
  misc_feature: MA Experiment 108523 PARAMETER Experiment Name: Zm_42deg_Heat_P Parameter: Temperature (deg C) Value: 42 vs. 22
  misc_feature: MA Experiment 108523 PARAMETER Experiment Name: Zm_42deg_Heat_P Parameter: Timepoint (hr) Value: 6
  misc_feature: MA Experiment 108523 PARAMETER Experiment Name: Zm_42deg_Heat_P Parameter: Tissue Value: Aerial
  misc_feature: MA Experiment ID: 108527 Result: Down-regulated in Transcription
  misc_feature: MA Experiment 108527 PARAMETER Experiment Name: Zm_5mM_NO_P Parameter: Age (day) Value: 8
  misc_feature: MA Experiment 108527 PARAMETER Experiment Name: Zm_5mM_NO_P Parameter: Organism Value: Zea mays
  misc_feature: MA Experiment 108527 PARAMETER Experiment Name: Zm_5mM_NO_P Parameter: Plant Line Value: 35A19
  misc_feature: MA Experiment 108527 PARAMETER Experiment Name: Zm_5mM_NO_P Parameter: Timepoint (hr) Value: 6
  misc_feature: MA Experiment 108527 PARAMETER Experiment Name: Zm_5mM_NO_P Parameter: Tissue Value: Aerial
  misc_feature: MA Experiment 108527 PARAMETER Experiment Name: Zm_5mM_NO_P Parameter: Treatment Value: 5mM NO vs. No Treatment
  misc_feature: MA Experiment ID: 108528 Result: Down-regulated in Transcription
  misc_feature: MA Experiment 108528 PARAMETER Experiment Name: Zm_Imbibed_Seeds_P Parameter: Age (day) Value: 5 vs. 2
  misc_feature: MA Experiment 108528 PARAMETER Experiment Name: Zm_Imbibed_Seeds_P Parameter: Organism Value: Zea mays
  misc_feature: MA Experiment 108528 PARAMETER Experiment Name: Zm_Imbibed_Seeds_P Parameter: Plant Line Value: 35A19
  misc_feature: MA Experiment 108528 PARAMETER Experiment Name: Zm_Imbibed_Seeds_P Parameter: Tissue Value: Aerial vs. Embryo
  misc_feature: MA Experiment ID: 108530 Result: Down-regulated in Transcription
  misc_feature: MA Experiment 108530 PARAMETER Experiment Name: Zm_Imbibed_Seeds_P Parameter: Age (day) Value: 6 vs. 2
  misc_feature: MA Experiment 108530 PARAMETER Experiment Name: Zm_Imbibed_Seeds_P Parameter: Organism Value: Zea mays
  misc_feature: MA Experiment 108530 PARAMETER Experiment Name: Zm_Imbibed_Seeds_P Parameter: Plant Line Value: 35A19
  misc_feature: MA Experiment 108530 PARAMETER Experiment Name: Zm_Imbibed_Seeds_P Parameter: Tissue Value: Aerial vs. Embryo
  misc_feature: MA Experiment ID: 108536 Result: Down-regulated in Transcription
  misc_feature: MA Experiment 108536 PARAMETER Experiment Name: Zm_Meristem_P Parameter: Age (day) Value: 8
  misc_feature: MA Experiment 108536 PARAMETER Experiment Name: Zm_Meristem_P Parameter: Organism Value: Zea mays
  misc_feature: MA Experiment 108536 PARAMETER Experiment Name: Zm_Meristem_P Parameter: Plant Line Value: 35A19
  misc_feature: MA Experiment 108536 PARAMETER Experiment Name: Zm_Meristem_P Parameter: Tissue Value: Shoot Meristem vs. Above Shoot Meristem
  misc_feature: MA Experiment ID: 108543 Result: Up-regulated in Transcription
  misc_feature: MA Experiment ID: 108544 Result: Down-regulated in Transcription
  misc_feature: MA Experiment ID: 108545 Result: Down-regulated in Transcription
  misc_feature: MA Experiment 108545 PARAMETER Experiment Name: Zm_Imbibed_Seeds_P Parameter: Age (day) Value: 3 vs. 2
  misc_feature: MA Experiment 108545 PARAMETER Experiment Name: Zm_Imbibed_Seeds_P Parameter: Organism Value: Zea mays
  misc_feature: MA Experiment 108545 PARAMETER Experiment Name: Zm_Imbibed_Seeds_P Parameter: Plant Line Value: 35A19
  misc_feature: MA Experiment 108545 PARAMETER Experiment Name: Zm_Imbibed_Seeds_P Parameter: Tissue Value: Aerial vs. Embryo
  misc_feature: MA Experiment ID: 108547 Result: Down-regulated in Transcription
  misc_feature: MA Experiment 108547 PARAMETER Experiment Name: Zm_Imbibed_Seeds_P Parameter: Age (day) Value: 4 vs. 2
  misc_feature: MA Experiment 108547 PARAMETER Experiment Name: Zm_Imbibed_Seeds_P Parameter: Organism Value: Zea mays
  misc_feature: MA Experiment 108547 PARAMETER Experiment Name: Zm_Imbibed_Seeds_P Parameter: Plant Line Value: 35A19
  misc_feature: MA Experiment 108547 PARAMETER Experiment Name: Zm_Imbibed_Seeds_P Parameter: Tissue Value: Aerial vs. Embryo
  misc_feature: MA Experiment ID: 108559 Result: Down-regulated in Transcription
  misc_feature: MA Experiment 108559 PARAMETER Experiment Name: Zm_5mM_NO_P Parameter: Age (day) Value: 8
  misc_feature: MA Experiment 108559 PARAMETER Experiment Name: Zm_5mM_NO_P Parameter: Organism Value: Zea mays
  misc_feature: MA Experiment 108559 PARAMETER Experiment Name: Zm_5mM_NO_P Parameter: Plant Line Value: 35A19
  misc_feature: MA Experiment 108559 PARAMETER Experiment Name: Zm_5mM_NO_P Parameter: Timepoint (hr) Value: 12
  misc_feature: MA Experiment 108559 PARAMETER Experiment Name: Zm_5mM_NO_P Parameter: Tissue Value: Aerial
  misc_feature: MA Experiment 108559 PARAMETER Experiment Name: Zm_5mM_NO_P Parameter: Treatment Value: 5mM NO vs. No Treatment
  misc_feature: MA Experiment ID: 20001614 Result: Up-regulated in Transcription
  misc_feature: MA Experiment 20001614 PARAMETER Experiment Name: Zm_50ppm_KNO3_L-to-H_P Parameter: Age (day) Value: 21
  misc_feature: MA Experiment 20001614 PARAMETER Experiment Name: Zm_50ppm_KNO3_L-to-H_P Parameter: Organism Value: Zea mays
  misc_feature: MA Experiment 20001614 PARAMETER Experiment Name: Zm_50ppm_KNO3_L-to-H_P Parameter: Plant Line Value: 35A19
  misc_feature: MA Experiment 20001614 PARAMETER Experiment Name: Zm_50ppm_KNO3_L-to-H_P Parameter: Timepoint (hr) Value: 48
  misc_feature: MA Experiment 20001614 PARAMETER Experiment Name: Zm_50ppm_KNO3_L-to-H_P Parameter: Tissue Value: Roots
  misc_feature: MA Experiment 20001614 PARAMETER Experiment Name: Zm_50ppm_KNO3_L-to-H_P Parameter: Treatment Value: 50ppm KNO3 vs. 50ppm KCl
agaaccacagaccaagaagtgccctccactttgtaagctcgtttccgaaaagagctctagagccgccacacacacacacaccatggcaccgcgttctctgctggcagtgctcgccgtcgccgccctcgcgctcttgcacgccgcctcggccaagtcgtcgtggcttgacaggaggttcaccacggacggcaccgtccgcacgggatacgacgattcgggccagcaggtggtgatgctccgcctcgaccagcactccggcgctgccggcttcaactccaaggagcagtacctttacggcgagttcagcgtcgagatgaagctcatccgggggaactccgccggcaccgtctcgtgcttctacctctcttccggcgacggcgacgggtcgcgacgagatcgacatggagttcatgggcaactcgagcggggcagccggtggtgctgaacaccaacgtgtgggccagcggcgacggcaagaaggagcaccagttcgacctctggttcgacccctccgccgactaccacacctacaccatcatctggaacccgaccaacatcctgttcaaggtcgacgacctcttcatccgctccttcaagcgctacgccgacctgccgtacccgagctccaggcccatgacgctgcacgccacgctgtgggacggcagctactgggccaccgagaagggcagggtcggcatcgactggtccgacgcgcccttcgtcgtctcctaccgcagctactacgccagcgcctgcgtcagcggcggcgcgtgccgggccgccggcagcggcgggtggatgaacaggcagcttgacagcgccgagtggggcaccgtcaggtgggcggagcgcaacttcatgcgctacaactactgccaggatgggtggaggttcccgcaaggactccccgccgagtgcgcccgccactgatatgcgtccgccggttaattcttcgtcgacgatccagcttggcgtcgtttgttctttgttttgttgggtattcttttttttctacgggtatatgattcttgctcttctttgtggatttgtgattaaaaagcagccctgcagcttgcaacgtgtgggcggttgttgtacaccttgcttttcctaaaccgaagcatgtattttatttttaatcgtgcctttggacgatacaggcatgcagcatatatagtatttacgtacgc

SEQ ID NO: 6488 - protein, 147 aa, Zea mays subsp. mays
  peptide (1)..(147): Ceres Seq. ID no. 12351165
  misc_feature (65)..(128): Pfam Name: Glycosyl hydrolases family 16 Pfam Description: Glycosyl hydrolases family 16
  misc_feature (28)..(128): Homolog of NCBI NO: 7447410 NR Description: xyloglucan endo-1,4-beta-D-glucanase (EC 3.2.1.-) barley >gi|1890573|emb|CAA63661.1| xyloglucan
  misc_feature (28)..(128): Homolog of NCBI NO: 40253521 NR Description: putative end-xyloglucan transferase [Oryza sativa
  misc_feature (28)..(125): Homolog of NCBI NO: 7447415 NR Description: xyloglucan endotransglycosylase (EC 2.4.1.-) - >gi|1885312|emb|CAA62848.1| similar to Xyloglucan
  misc_feature (28)..(125): Homolog of NCBI NO: 14330334 NR Description: Xet2 protein [Festuca pratensis]
  misc_feature (28)..(128): Homolog of NCBI NO: 7447411 NR Description: end-xyloglucan transferase (EC 2.4.1.-) - rice
  misc_feature (36)..(127): Homolog of NCBI NO: 32489753 NR Description: OSJNBb0015N08.5 [Oryza sativa (japonica
  misc_feature (35)..(132): Homolog of NCBI NO: 7447403 NR Description: xyloglucan endo-1,4-beta-D-glucanase (EC 3.2.1.-)
  misc_feature (75)..(123): Homolog of NCBI NO: 8886865 NR Description: xyloglucan endotransglycosylase XET1 [Asparagus
  misc_feature (37)..(123): Homolog of NCBI NO: 7447413 NR Description: xyloglucan endo-1,4-beta-D-glucanase (EC 3.2.1.-) barley >gi|1890577|emb|CAA63663.1| xyloglucan
  misc_feature (28)..(123): Homolog of NCBI NO: 29500891 NR Description: putative xyloglucan endotransglycosylase [Cucumis >gi|29500899|emb|CAD87533.1| putative xyloglucan
EPQTKKCPPLCKLVSEKSSRAATHTHTMAPRSLLAVLAVAALALLHAASAKSSWLDRRFTTDGTVRTGYDDSGQQVVMLRLDQHSGAAGFNSKEQYLYGEFSVEMKLIRGNSAGTVSCFYLSSGDGDGSRRDRHGVHGQLERGSRWC

SEQ ID NO: 6489 - protein, 137 aa, Zea mays subsp. mays
  peptide (1)..(137): Ceres Seq. ID no. 12351166
  misc_feature (1)..(14): Homolog of NCBI NO: 13592175 NR Description: ppg3 [Leishmania major]
  misc_feature (1)..(14): Homolog of NCBI NO: 13592175 NR Description: ppg3 [Leishmania major]
  misc_feature (1)..(14): Homolog of NCBI NO: 13592175 NR Description: ppg3 [Leishmania major]
  misc_feature (1)..(29): Homolog of NCBI NO: 13592175 NR Description: ppg3 [Leishmania major]
  misc_feature (1)..(14): Homolog of NCBI NO: 13592175 NR Description: ppg3 [Leishmania major]
  misc_feature (1)..(14): Homolog of NCBI NO: 13592175 NR Description: ppg3 [Leishmania major]
  misc_feature (1)..(14): Homolog of NCBI NO: 13592175 NR Description: ppg3 [Leishmania major]
  misc_feature (1)..(29): Homolog of NCBI NO: 5420387 NR Description: proteophosphoglycan [Leishmania major]
  misc_feature (1)..(21): Homolog of NCBI NO: 17384256 NR Description: mucin 5 [Homo sapiens]
  misc_feature (1)..(14): Homolog of NCBI NO: 11359723 NR Description: proteophosphoglycan, membrane-associated - Leishmania major (fragment) >gi|5420389|emb|CAB46680.1|
MEFMGNSSGAAGGAEHQRVGQRRRQEGAPVRPLVRPLRRLPHLHHHLEPDQHPVQGRRPLHPLLQALRRPAVPELQAHDAARHAVGRQLLGHREGQGRHRLVRRALRRLLPQLLRQRLRQRRRVPGRRQRRVDEQAA

SEQ ID NO: 6490 - protein, 134 aa, Zea mays subsp. mays
  peptide (1)..(134): Ceres Seq. ID no. 12351167
  misc_feature (1)..(11): Homolog of NCBI NO: 13592175 NR Description: ppg3 [Leishmania major]
  misc_feature (1)..(11): Homolog of NCBI NO: 13592175 NR Description: ppg3 [Leishmania major]
  misc_feature (1)..(11): Homolog of NCBI NO: 13592175 NR Description: ppg3 [Leishmania major]
  misc_feature (1)..(26): Homolog of NCBI NO: 13592175 NR Description: ppg3 [Leishmania major]
  misc_feature (1)..(11): Homolog of NCBI NO: 13592175 NR Description: ppg3 [Leishmania major]
  misc_feature (1)..(11): Homolog of NCBI NO: 13592175 NR Description: ppg3 [Leishmania major]
  misc_feature (1)..(11): Homolog of NCBI NO: 13592175 NR Description: ppg3 [Leishmania major]
  misc_feature (1)..(26): Homolog of NCBI NO: 5420387 NR Description: proteophosphoglycan [Leishmania major]
  misc_feature (1)..(18): Homolog of NCBI NO: 17384256 NR Description: mucin 5 [Homo sapiens]
  misc_feature (1)..(11): Homolog of NCBI NO: 11359723 NR Description: proteophosphoglycan, membrane-associated - Leishmania major (fragment) >gi|5420389|emb|CAB46680.1|
MGNSSGAAGGAEHQRVGQRRRQEGAPVRPLVRPLRRLPHLHHHLEPDQHPVQGRRPLHPLLQALRRPAVPELQAHDAARHAVGRQLLGHREGQGRHRLVRRALRRLLPQLLRQRLRQRRRVPGRRQRRVDEQAA

SEQ ID NO: 6491 - protein, 120 aa, Zea mays subsp. mays
  peptide (1)..(120): Ceres Seq. ID no. 12351168
  misc_feature (38)..(101): Pfam Name: Glycosyl hydrolases family 16 Pfam Description: Glycosyl hydrolases family 16
  misc_feature (1)..(101): Homolog of NCBI NO: 7447410 NR Description: xyloglucan endo-1,4-beta-D-glucanase (EC 3.2.1.-) barley >gi|1890573|emb|CAA63661.1| xyloglucan
  misc_feature (1)..(101): Homolog of NCBI NO: 40253521 NR Description: putative end-xyloglucan transferase [Oryza sativa
  misc_feature (1)..(98): Homolog of NCBI NO: 7447415 NR Description: xyloglucan endotransglycosylase (EC 2.4.1.-) - >gi|1885312|emb|CAA62848.1| similar to Xyloglucan
  misc_feature (1)..(98): Homolog of NCBI NO: 14330334 NR Description: Xet2 protein [Festuca pratensis]
  misc_feature (1)..(101): Homolog of NCBI NO: 7447411 NR Description: end-xyloglucan transferase (EC 2.4.1.-) - rice
  misc_feature (9)..(100): Homolog of NCBI NO: 32489753 NR Description: OSJNBb0015N08.5 [Oryza sativa (japonica
  misc_feature (8)..(105): Homolog of NCBI NO: 7447403 NR Description: xyloglucan endo-1,4-beta-D-glucanase (EC 3.2.1.-)
  misc_feature (48)..(96): Homolog of NCBI NO: 8886865 NR Description: xyloglucan endotransglycosylase XET1 [Asparagus
  misc_feature (10)..(96): Homolog of NCBI NO: 7447413 NR Description: xyloglucan endo-1,4-beta-D-glucanase (EC 3.2.1.-) barley >gi|1890577|emb|CAA63663.1| xyloglucan
  misc_feature (1)..(96): Homolog of NCBI NO: 29500891 NR Description: putative xyloglucan endotransglycosylase [Cucumis >gi|29500899|emb|CAD87533.1| putative xyloglucan
MAPRSLLAVLAVAALALLHAASAKSSWLDRRFTTDGTVRTGYDDSGQQVVMLRLDQHSGAAGFNSKEQYLYGEFSVEMKLIRGNSAGTVSCFYLSSGDGDGSRRDRHGVHGQLERGSRWC

SEQ ID NO: 6492 - DNA, 1035 bp, Zea mays subsp. mays
  misc_feature (1)..(1035): Ceres Seq. ID no. 12403456
  misc_feature: MA Experiment ID: 108535 Result: Up-regulated in Transcription
  misc_feature: MA Experiment 108535 PARAMETER Experiment Name: Zm_Meristem_P Parameter: Age (day) Value: 8
  misc_feature: MA Experiment 108535 PARAMETER Experiment Name: Zm_Meristem_P Parameter: Organism Value: Zea mays
  misc_feature: MA Experiment 108535 PARAMETER Experiment Name: Zm_Meristem_P Parameter: Plant Line Value: 35A19
  misc_feature: MA Experiment 108535 PARAMETER Experiment Name: Zm_Meristem_P Parameter: Tissue Value: Root Meristem vs. Above Root Meristem
  misc_feature: MA Experiment ID: 108544 Result: Down-regulated in Transcription
  misc_feature: MA Experiment ID: 20000487 Result: Up-regulated in Transcription
  misc_feature: MA Experiment 20000487 PARAMETER Experiment Name: Zm_50mM_NH4NO3_L_to_H_P Parameter: Organism Value: Zea mays
  misc_feature: MA Experiment 20000487 PARAMETER Experiment Name: Zm_50mM_NH4NO3_L_to_H_P Parameter: Timepoint (hr) Value: 4
  misc_feature: MA Experiment 20000487 PARAMETER Experiment Name: Zm_50mM_NH4NO3_L_to_H_P Parameter: Tissue Value: Leaves
  misc_feature: MA Experiment 20000487 PARAMETER Experiment Name: Zm_50mM_NH4NO3_L_to_H_P Parameter: Treatment Value: 50mM NH4NO3 vs. 100mM Mannitol
  misc_feature: MA Experiment ID: 20000488 Result: Up-regulated in Transcription
  misc_feature: MA Experiment 20000488 PARAMETER Experiment Name: Zm_50mM_NH4NO3_L_to_H_P Parameter: Organism Value: Zea mays
  misc_feature: MA Experiment 20000488 PARAMETER Experiment Name: Zm_50mM_NH4NO3_L_to_H_P Parameter: Timepoint (hr) Value: 8
  misc_feature: MA Experiment 20000488 PARAMETER Experiment Name: Zm_50mM_NH4NO3_L_to_H_P Parameter: Tissue Value: Leaves
  misc_feature: MA Experiment 20000488 PARAMETER Experiment Name: Zm_50mM_NH4NO3_L_to_H_P Parameter: Treatment Value: 50mM NH4NO3 vs. 100mM Mannitol
  misc_feature: MA Experiment ID: 20000534 Result: Down-regulated in Transcription
  misc_feature: MA Experiment 20000534 PARAMETER Experiment Name: Zm_Hybrid_Pollen_P Parameter: Age (day) Value: 8
  misc_feature: MA Experiment 20000534 PARAMETER Experiment Name: Zm_Hybrid_Pollen_P Parameter: Organism Value: Zea mays
  misc_feature: MA Experiment 20000534 PARAMETER Experiment Name: Zm_Hybrid_Pollen_P Parameter: Plant Line Value: 35A19
  misc_feature: MA Experiment 20000534 PARAMETER Experiment Name: Zm_Hybrid_Pollen_P Parameter: Tissue Value: Pollen vs. Aerial
  misc_feature: MA Experiment ID: 20000535 Result: Up-regulated in Transcription
  misc_feature: MA Experiment 20000535 PARAMETER Experiment Name: Zm_Hybrid_Seed_Dev_P Parameter: DAP Value: 30 vs. 12
  misc_feature: MA Experiment 20000535 PARAMETER Experiment Name: Zm_Hybrid_Seed_Dev_P Parameter: Organism Value: Zea mays
  misc_feature: MA Experiment 20000535 PARAMETER Experiment Name: Zm_Hybrid_Seed_Dev_P Parameter: Plant Line Value: 35A19
  misc_feature: MA Experiment 20000535 PARAMETER Experiment Name: Zm_Hybrid_Seed_Dev_P Parameter: Tissue Value: Embryo vs. Unfert Floret
aacatataaattacgtgctccctcttcgccgccgtctctcgcgccgccacttccctcccgacccactcgcccaaaaccgtagcgccctcgcctgctcgccgccgccgtcgttgcgagctccccatcttcctccgttaaccatggcgacccagatcagcaagaagaagaagttcgtcagcgacggcgtgttctacgccgagctcaatgagatgctgacgcgggagctcgcggaggacggctactccggcgtggaggtgcgtgtcacaccgatgcgcacggagatcatcatccgcgcaacgcgcacgcagaacgtgctcggcgagaagggccgcaggatcagggagctcacgtctgtggtccagaagaggttcaacttccccgagaacggcgtcgagctctacgccgagaaggtcgtcaaccgcggcctctgcgccatcgcgcaggctgagtccctccgctacaagctcctcggaggccttgccgtccggagggcctgctatggtgttcttcgctttgttatggagagtggtgccgagggttgtgaggtcattgtgagtggaaagctcagggctcaaagagccaagtccatgaagttcaaggatggctacatgatctcatctggtcagccagtgaatgagtacatcgactcagctgtgagacacgtcctcctcagacagggtgttctgggtatcaaggtgaagatcatgcttgactgggacccgaagggcaaggttggcccgatcacccctcttccggacctggtgaccatccataccccgaaggaggaggacgagctgcgccctcctgtcttggcagctgaggtctaaggtcccaacagcgtcctcgaaatggcagtttgatcgggtcctagctaggtttgatcttatgataagggcagtgctaagacagttcgttccgtgtcacttctgtttaaaattaagttttgccgagacaagctatatgtaccggatgaaagtgtggttccttattgtatgctctggaattttatttttggtatgtttatttttttgccct

SEQ ID NO: 6493 - protein, 274 aa, Zea mays subsp. mays
  peptide (1)..(274): Ceres Seq. ID no. 12403457
  misc_feature (150)..(234): Pfam Name: Ribosomal protein S3, C-terminal domain Pfam Description: Ribosomal protein S3, C-terminal domain
  misc_feature (47)..(270): Homolog of NCBI NO: 22204124 NR Description: putative 40S ribosomal protein S3 [Triticum
  misc_feature (49)..(274): Homolog of NCBI NO: 14192875 NR Description: Putative 40S ribosomal protein; contains
  misc_feature (47)..(263): Homolog of NCBI NO: 15238533 NR Description: 40S ribosomal protein S3; protein id: supported by cDNA: 10394., supported by cDNA: gi_16604317, by cDNA: gi_20466074 [Arabidopsis thaliana]
  misc_feature (47)..(272): Homolog of NCBI NO: 15232352 NR Description: 40S ribosomal protein S3, putative; protein id: supported by cDNA: 9568., supported by cDNA: gi_14334697, by cDNA: gi_16226457, supported by cDNA: gi_16323403 [Arabidopsis
  misc_feature (47)..(272): Homolog of NCBI NO: 15225107 NR Description: 40S ribosomal protein S3, putative; protein id: supported by cDNA: gi_14190418, supported by cDNA: gi_15028252, by cDNA: gi_15450570, supported by cDNA: gi_15451083, protein
  misc_feature (47)..(269): Homolog of NCBI NO: 28374213 NR Description: similar to 40S ribosomal protein S3 [Danio rerio]
  misc_feature (47)..(262): Homolog of NCBI NO: 37595356 NR Description: ribosomal protein S3 [Danio rerio]
  misc_feature (47)..(262): Homolog of NCBI NO: 38512247 NR Description: Ribosomal protein S3 [Silurana tropicalis]
  misc_feature (47)..(273): Homolog of NCBI NO: 12847921 NR Description: unnamed protein product [Mus musculus]
  misc_feature (47)..(273): Homolog of NCBI NO: 6755372 NR Description: ribosomal protein S3 [Mus musculus] similar to ribosomal protein S3 [Mus musculus] [Rattus >gi|1173253|sp|P17073|RS3_MOUSE 40S ribosomal protein S3
HINYVLPLRRRLSRRHFPPDPLAQNRSALACSPPPSLRAPHLPPLTMATQISKKKKFVSDGVFYAELNEMLTRELAEDGYSGVEVRVTPMRTEIIIRATRTQNVLGEKGRRIRELTSVVQKRFNFPENGVELYAEKVVNRGLCAIAQAESLRYKLLGGLAVRRACYGVLRFVMESGAEGCEVIVSGKLRAQRAKSMKFKDGYMISSGQPVNEYIDSAVRHVLLRQGVLGIKVKIMLDWDPKGKVGPITPLPDLVTIHTPKEEDELRPPVLAAEV

SEQ ID NO: 6494 - protein, 228 aa, Zea mays subsp. mays
  peptide (1)..(228): Ceres Seq. ID no. 12403458
  misc_feature (104)..(188): Pfam Name: Ribosomal protein S3, C-terminal domain Pfam Description: Ribosomal protein S3, C-terminal domain
  misc_feature (1)..(224): Homolog of NCBI NO: 22204124 NR Description: putative 40S ribosomal protein S3 [Triticum
  misc_feature (3)..(228): Homolog of NCBI NO: 14192875 NR Description: Putative 40S ribosomal protein; contains
  misc_feature (1)..(217): Homolog of NCBI NO: 15238533 NR Description: 40S ribosomal protein S3; protein id: supported by cDNA: 10394., supported by cDNA: gi_16604317, by cDNA: gi_20466074 [Arabidopsis thaliana]
  misc_feature (1)..(226): Homolog of NCBI NO: 15232352 NR Description: 40S ribosomal protein S3, putative; protein id: supported by cDNA: 9568., supported by cDNA: gi_14334697, by cDNA: gi_16226457, supported by cDNA: gi_16323403 [Arabidopsis
  misc_feature (1)..(226): Homolog of NCBI NO: 15225107 NR Description: 40S ribosomal protein S3, putative; protein id: supported by cDNA: gi_14190418, supported by cDNA: gi_15028252, by cDNA: gi_15450570, supported by cDNA: gi_15451083, protein
  misc_feature (1)..(223): Homolog of NCBI NO: 28374213 NR Description: similar to 40S ribosomal protein S3 [Danio rerio]
  misc_feature (1)..(216): Homolog of NCBI NO: 37595356 NR Description: ribosomal protein S3 [Danio rerio]
  misc_feature (1)..(216): Homolog of NCBI NO: 38512247 NR Description: Ribosomal protein S3 [Silurana tropicalis]
  misc_feature (1)..(227): Homolog of NCBI NO: 12847921 NR Description: unnamed protein product [Mus musculus]
  misc_feature (1)..(227): Homolog of NCBI NO: 6755372 NR Description: ribosomal protein S3 [Mus musculus] similar to ribosomal protein S3 [Mus musculus] [Rattus >gi|1173253|sp|P17073|RS3_MOUSE 40S ribosomal protein S3
MATQISKKKKFVSDGVFYAELNEMLTRELAEDGYSGVEVRVTPMRTEIIIRATRTQNVLGEKGRRIRELTSVVQKRFNFPENGVELYAEKVVNRGLCAIAQAESLRYKLLGGLAVRRACYGVLRFVMESGAEGCEVIVSGKLRAQRAKSMKFKDGYMISSGQPVNEYIDSAVRHVLLRQGVLGIKVKIMLDWDPKGKVGPITPLPDLVTIHTPKEEDELRPPVLAAEV

SEQ ID NO: 6495 - protein, 205 aa, Zea mays subsp. mays
  peptide (1)..(205): Ceres Seq. ID no. 12403459
  misc_feature (81)..(165): Pfam Name: Ribosomal protein S3, C-terminal domain Pfam Description: Ribosomal protein S3, C-terminal domain
  misc_feature (1)..(201): Homolog of NCBI NO: 22204124 NR Description: putative 40S ribosomal protein S3 [Triticum
  misc_feature (1)..(205): Homolog of NCBI NO: 14192875 NR Description: Putative 40S ribosomal protein; contains
  misc_feature (1)..(194): Homolog of NCBI NO: 15238533 NR Description: 40S ribosomal protein S3; protein id: supported by cDNA: 10394., supported by cDNA: gi_16604317, by cDNA: gi_20466074 [Arabidopsis thaliana]
  misc_feature (1)..(203): Homolog of NCBI NO: 15232352 NR Description: 40S ribosomal protein S3, putative; protein id: supported by cDNA: 9568., supported by cDNA: gi_14334697, by cDNA: gi_16226457, supported by cDNA: gi_16323403 [Arabidopsis
  misc_feature (1)..(203): Homolog of NCBI NO: 15225107 NR Description: 40S ribosomal protein S3, putative; protein id: supported by cDNA: gi_14190418, supported by cDNA: gi_15028252, by cDNA: gi_15450570, supported by cDNA: gi_15451083, protein
  misc_feature (1)..(200): Homolog of NCBI NO: 28374213 NR Description: similar to 40S ribosomal protein S3 [Danio rerio]
  misc_feature (1)..(193): Homolog of NCBI NO: 37595356 NR Description: ribosomal protein S3 [Danio rerio]
  misc_feature (1)..(193): Homolog of NCBI NO: 38512247 NR Description: Ribosomal protein S3 [Silurana tropicalis]
  misc_feature (1)..(204): Homolog of NCBI NO: 12847921 NR Description: unnamed protein product [Mus musculus]
  misc_feature (1)..(204): Homolog of NCBI NO: 6755372 NR Description: ribosomal protein S3 [Mus musculus] similar to ribosomal protein S3 [Mus musculus] [Rattus >gi|1173253|sp|P17073|RS3_MOUSE 40S ribosomal protein S3
MLTRELAEDGYSGVEVRVTPMRTEIIIRATRTQNVLGEKGRRIRELTSVVQKRFNFPENGVELYAEKVVNRGLCAIAQAESLRYKLLGGLAVRRACYGVLRFVMESGAEGCEVIVSGKLRAQRAKSMKFKDGYMISSGQPVNEYIDSAVRHVLLRQGVLGIKVKIMLDWDPKGKVGPITPLPDLVTIHTPKEEDELRPPVLAAEV

SEQ ID NO: 6496 - DNA, 1491 bp, Zea mays subsp. mays
  misc_feature (1)..(1491): Ceres Seq. ID no. 12408460
  misc_feature: MA Experiment ID: 108523 Result: Down-regulated in Transcription
  misc_feature: MA Experiment 108523 PARAMETER Experiment Name: Zm_42deg_Heat_P Parameter: Age (day) Value: 8
  misc_feature: MA Experiment 108523 PARAMETER Experiment Name: Zm_42deg_Heat_P Parameter: Organism Value: Zea mays
  misc_feature: MA Experiment 108523 PARAMETER Experiment Name: Zm_42deg_Heat_P Parameter: Plant Line Value: 35A19
  misc_feature: MA Experiment 108523 PARAMETER Experiment Name: Zm_42deg_Heat_P Parameter: Temperature (deg C) Value: 42 vs. 22
  misc_feature: MA Experiment 108523 PARAMETER Experiment Name: Zm_42deg_Heat_P Parameter: Timepoint (hr) Value: 6
  misc_feature: MA Experiment 108523 PARAMETER Experiment Name: Zm_42deg_Heat_P Parameter: Tissue Value: Aerial
  misc_feature: MA Experiment ID: 108527 Result: Down-regulated in Transcription
  misc_feature: MA Experiment 108527 PARAMETER Experiment Name: Zm_5mM_NO_P Parameter: Age (day) Value: 8
  misc_feature: MA Experiment 108527 PARAMETER Experiment Name: Zm_5mM_NO_P Parameter: Organism Value: Zea mays
  misc_feature: MA Experiment 108527 PARAMETER Experiment Name: Zm_5mM_NO_P Parameter: Plant Line Value: 35A19
  misc_feature: MA Experiment 108527 PARAMETER Experiment Name: Zm_5mM_NO_P Parameter: Timepoint (hr) Value: 6
  misc_feature: MA Experiment 108527 PARAMETER Experiment Name: Zm_5mM_NO_P Parameter: Tissue Value: Aerial
  misc_feature: MA Experiment 108527 PARAMETER Experiment Name: Zm_5mM_NO_P Parameter: Treatment Value: 5mM NO vs. No Treatment
  misc_feature: MA Experiment ID: 108529 Result: Up-regulated in Transcription
  misc_feature: MA Experiment 108529 PARAMETER Experiment Name: Zm_Imbibed_Seeds_P Parameter: Age (day) Value: 5 vs. 2
  misc_feature: MA Experiment 108529 PARAMETER Experiment Name: Zm_Imbibed_Seeds_P Parameter: Organism Value: Zea mays
  misc_feature: MA Experiment 108529 PARAMETER Experiment Name: Zm_Imbibed_Seeds_P Parameter: Plant Line Value: 35A19
  misc_feature: MA Experiment 108529 PARAMETER Experiment Name: Zm_Imbibed_Seeds_P Parameter: Tissue Value: Roots vs. Embryo
  misc_feature: MA Experiment ID: 108530 Result: Up-regulated in Transcription
  misc_feature: MA Experiment 108530 PARAMETER Experiment Name: Zm_Imbibed_Seeds_P Parameter: Age (day) Value: 6 vs. 2
  misc_feature: MA Experiment 108530 PARAMETER Experiment Name: Zm_Imbibed_Seeds_P Parameter: Organism Value: Zea mays
  misc_feature: MA Experiment 108530 PARAMETER Experiment Name: Zm_Imbibed_Seeds_P Parameter: Plant Line Value: 35A19
  misc_feature: MA Experiment 108530 PARAMETER Experiment Name: Zm_Imbibed_Seeds_P Parameter: Tissue Value: Aerial vs. Embryo
  misc_feature: MA Experiment ID: 108535 Result: Down-regulated in Transcription
  misc_feature: MA Experiment 108535 PARAMETER Experiment Name: Zm_Meristem_P Parameter: Age (day) Value: 8
  misc_feature: MA Experiment 108535 PARAMETER Experiment Name: Zm_Meristem_P Parameter: Organism Value: Zea mays
  misc_feature: MA Experiment 108535 PARAMETER Experiment Name: Zm_Meristem_P Parameter: Plant Line Value: 35A19
  misc_feature: MA Experiment 108535 PARAMETER Experiment Name: Zm_Meristem_P Parameter: Tissue Value: Root Meristem vs. Above Root Meristem
  misc_feature: MA Experiment ID: 108543 Result: Up-regulated in Transcription
  misc_feature: MA Experiment ID: 108544 Result: Up-regulated in Transcription
  misc_feature: MA Experiment ID: 108559 Result: Down-regulated in Transcription
  misc_feature: MA Experiment 108559 PARAMETER Experiment Name: Zm_5mM_NO_P Parameter: Age (day) Value: 8
  misc_feature: MA Experiment 108559 PARAMETER Experiment Name: Zm_5mM_NO_P Parameter: Organism Value: Zea mays
  misc_feature: MA Experiment 108559 PARAMETER Experiment Name: Zm_5mM_NO_P Parameter: Plant Line Value: 35A19
  misc_feature: MA Experiment 108559 PARAMETER Experiment Name: Zm_5mM_NO_P Parameter: Timepoint (hr) Value: 12
  misc_feature: MA Experiment 108559 PARAMETER Experiment Name: Zm_5mM_NO_P Parameter: Tissue Value: Aerial
  misc_feature: MA Experiment 108559 PARAMETER Experiment Name: Zm_5mM_NO_P Parameter: Treatment Value: 5mM NO vs. No Treatment
  misc_feature: MA Experiment ID: 108687 Result: Down-regulated in Transcription
  misc_feature: MA Experiment 108687 PARAMETER Experiment Name: Zm_Embryos-Flowers__P Parameter: Tissue Value: Embryo vs. Aerial+
  misc_feature: MA Experiment ID: 20000478 Result: Down-regulated in Transcription
  misc_feature: MA Experiment 20000478 PARAMETER Experiment Name: Zm_5mM_SA_P Parameter: Age (day) Value: 11
  misc_feature: MA Experiment 20000478 PARAMETER Experiment Name: Zm_5mM_SA_P Parameter: Organism Value: Zea mays
  misc_feature: MA Experiment 20000478 PARAMETER Experiment Name: Zm_5mM_SA_P Parameter: Plant Line Value: 35A19
  misc_feature: MA Experiment 20000478 PARAMETER Experiment Name: Zm_5mM_SA_P Parameter: Timepoint (hr) Value: 72
  misc_feature: MA Experiment 20000478 PARAMETER Experiment Name: Zm_5mM_SA_P Parameter: Tissue Value: Aerial
  misc_feature: MA Experiment 20000478 PARAMETER Experiment Name: Zm_5mM_SA_P Parameter: Treatment Value: 5mM SA vs. No Treatment
  misc_feature: MA Experiment ID: 20000480 Result: Down-regulated in Transcription
  misc_feature: MA Experiment 20000480 PARAMETER Experiment Name: Zm_Drought_P Parameter: Age (day) Value: 11
  misc_feature: MA Experiment 20000480 PARAMETER Experiment Name: Zm_Drought_P Parameter: Organism Value: Zea mays
  misc_feature: MA Experiment 20000480 PARAMETER Experiment Name: Zm_Drought_P Parameter: Plant Line Value: 35A19
  misc_feature: MA Experiment 20000480 PARAMETER Experiment Name: Zm_Drought_P Parameter: Timepoint (hr) Value: 72
  misc_feature: MA Experiment 20000480 PARAMETER Experiment Name: Zm_Drought_P Parameter: Tissue Value: Aerial
  misc_feature: MA Experiment 20000480 PARAMETER Experiment Name: Zm_Drought_P Parameter: Treatment Value: Drought vs. No Drought
  misc_feature: MA Experiment ID: 20000488 Result: Down-regulated in Transcription
  misc_feature: MA Experiment 20000488 PARAMETER Experiment Name: Zm_50mM_NH4NO3_L_to_H_P Parameter: Organism Value: Zea mays
  misc_feature: MA Experiment 20000488 PARAMETER Experiment Name: Zm_50mM_NH4NO3_L_to_H_P Parameter: Timepoint (hr) Value: 8
  misc_feature: MA Experiment 20000488 PARAMETER Experiment Name: Zm_50mM_NH4NO3_L_to_H_P Parameter: Tissue Value: Leaves
  misc_feature: MA Experiment 20000488 PARAMETER Experiment Name: Zm_50mM_NH4NO3_L_to_H_P Parameter: Treatment Value: 50mM NH4NO3 vs. 100mM Mannitol
  misc_feature: MA Experiment ID: 20000492 Result: Down-regulated in Transcription
  misc_feature: MA Experiment 20000492 PARAMETER Experiment Name: Zm_Hybrid_Seed_Dev_P Parameter: DAP Value: 12
  misc_feature: MA Experiment 20000492 PARAMETER Experiment Name: Zm_Hybrid_Seed_Dev_P Parameter: Organism Value: Zea mays
  misc_feature: MA Experiment 20000492 PARAMETER Experiment Name: Zm_Hybrid_Seed_Dev_P Parameter: Plant Line Value: 35A19
  misc_feature: MA Experiment 20000492 PARAMETER Experiment Name: Zm_Hybrid_Seed_Dev_P Parameter: Tissue Value: Fert Kernel vs. Unfert Floret
  misc_feature: MA Experiment ID: 20000535 Result: Down-regulated in Transcription
  misc_feature: MA Experiment 20000535 PARAMETER Experiment Name: Zm_Hybrid_Seed_Dev_P Parameter: DAP Value: 30 vs. 12
  misc_feature: MA Experiment 20000535 PARAMETER Experiment Name: Zm_Hybrid_Seed_Dev_P Parameter: Organism Value: Zea mays
  misc_feature: MA Experiment 20000535 PARAMETER Experiment Name: Zm_Hybrid_Seed_Dev_P Parameter: Plant Line Value: 35A19
  misc_feature: MA Experiment 20000535 PARAMETER Experiment Name: Zm_Hybrid_Seed_Dev_P Parameter: Tissue Value: Embryo vs. Unfert Floret
  misc_feature: MA Experiment ID: 20000626 Result: Up-regulated in Transcription
  misc_feature: MA Experiment 20000626 PARAMETER Experiment Name: Zm_Herbicide-Treatments_P Parameter: Timepoint (hr) Value: 12
  misc_feature: MA Experiment 20000626 PARAMETER Experiment Name: Zm_Herbicide-Treatments_P Parameter: Tissue Value: Aerial
  misc_feature: MA Experiment 20000626 PARAMETER Experiment Name: Zm_Herbicide-Treatments_P Parameter: Treatment Value: Roundup vs. No Treatment
  misc_feature: MA Experiment ID: 20000629 Result: Up-regulated in Transcription
  misc_feature: MA Experiment 20000629 PARAMETER Experiment Name: Zm_Herbicide-Treatments_P Parameter: Timepoint (hr) Value: 12
  misc_feature: MA Experiment 20000629 PARAMETER Experiment Name: Zm_Herbicide-Treatments_P Parameter: Tissue Value: Aerial
  misc_feature: MA Experiment 20000629 PARAMETER Experiment Name: Zm_Herbicide-Treatments_P Parameter: Treatment Value: Trimec vs. No Treatment
  misc_feature: MA Experiment ID: 20001606 Result: Down-regulated in Transcription
  misc_feature: MA Experiment 20001606 PARAMETER Experiment Name: Zm_50ppm_KNO3_L-to-H_P Parameter: Age (day) Value: 19
  misc_feature: MA Experiment 20001606 PARAMETER Experiment Name: Zm_50ppm_KNO3_L-to-H_P Parameter: Organism Value: Zea mays
  misc_feature: MA Experiment 20001606 PARAMETER Experiment Name: Zm_50ppm_KNO3_L-to-H_P Parameter: Plant Line Value: 35A19
  misc_feature: MA Experiment 20001606 PARAMETER Experiment Name: Zm_50ppm_KNO3_L-to-H_P Parameter: Timepoint (hr) Value: 8
  misc_feature: MA Experiment 20001606 PARAMETER Experiment Name: Zm_50ppm_KNO3_L-to-H_P Parameter: Tissue Value: Shoots
  misc_feature: MA Experiment 20001606 PARAMETER Experiment Name: Zm_50ppm_KNO3_L-to-H_P Parameter: Treatment Value: 50ppm KNO3 vs. 50ppm KCl
  misc_feature: MA Experiment ID: 20001608 Result: Down-regulated in Transcription
  misc_feature: MA Experiment 20001608 PARAMETER Experiment Name: Zm_50ppm_KNO3_L-to-H_P Parameter: Age (day) Value: 21
  misc_feature: MA Experiment 20001608 PARAMETER Experiment Name: Zm_50ppm_KNO3_L-to-H_P Parameter: Organism Value: Zea mays
  misc_feature: MA Experiment 20001608 PARAMETER Experiment Name: Zm_50ppm_KNO3_L-to-H_P Parameter: Plant Line Value: 35A19
  misc_feature: MA Experiment 20001608 PARAMETER Experiment Name: Zm_50ppm_KNO3_L-to-H_P Parameter: Timepoint (hr) Value: 48
  misc_feature: MA Experiment 20001608 PARAMETER Experiment Name: Zm_50ppm_KNO3_L-to-H_P Parameter: Tissue Value: Shoots
  misc_feature: MA Experiment 20001608 PARAMETER Experiment Name: Zm_50ppm_KNO3_L-to-H_P Parameter: Treatment Value: 50ppm KNO3 vs. 50ppm KCl
  misc_feature: MA Experiment ID: 20001612 Result: Down-regulated in Transcription
  misc_feature: MA Experiment 20001612 PARAMETER Experiment Name: Zm_50ppm_KNO3_L-to-H_P Parameter: Age (day) Value: 19
  misc_feature: MA Experiment 20001612 PARAMETER Experiment Name: Zm_50ppm_KNO3_L-to-H_P Parameter: Organism Value: Zea mays
  misc_feature: MA Experiment 20001612 PARAMETER Experiment Name: Zm_50ppm_KNO3_L-to-H_P Parameter: Plant Line Value: 35A19
  misc_feature: MA Experiment 20001612 PARAMETER Experiment Name: Zm_50ppm_KNO3_L-to-H_P Parameter: Timepoint (hr) Value: 8
  misc_feature: MA Experiment 20001612 PARAMETER Experiment Name: Zm_50ppm_KNO3_L-to-H_P Parameter: Tissue Value: Roots
  misc_feature: MA Experiment 20001612 PARAMETER Experiment Name: Zm_50ppm_KNO3_L-to-H_P Parameter: Treatment Value: 50ppm KNO3 vs. 50ppm KCl
  misc_feature: MA Experiment ID: 20001614 Result: Down-regulated in Transcription
  misc_feature: MA Experiment 20001614 PARAMETER Experiment Name: Zm_50ppm_KNO3_L-to-H_P Parameter: Age (day) Value: 21
  misc_feature: MA Experiment 20001614 PARAMETER Experiment Name: Zm_50ppm_KNO3_L-to-H_P Parameter: Organism Value: Zea mays
  misc_feature: MA Experiment 20001614 PARAMETER Experiment Name: Zm_50ppm_KNO3_L-to-H_P Parameter: Plant Line Value: 35A19
  misc_feature: MA Experiment 20001614 PARAMETER Experiment Name: Zm_50ppm_KNO3_L-to-H_P Parameter: Timepoint (hr) Value: 48
  misc_feature: MA Experiment 20001614 PARAMETER Experiment Name: Zm_50ppm_KNO3_L-to-H_P Parameter: Tissue Value: Roots
  misc_feature: MA Experiment 20001614 PARAMETER Experiment Name: Zm_50ppm_KNO3_L-to-H_P Parameter: Treatment Value: 50ppm KNO3 vs. 50ppm KCl
accaccagtagtcctactggtccttgacgtccgtggccactcaggttgtgttctcggagttctttcgccgggtggggaggcggagtgcgcggtcgaggaaggccttagcggtcgatcgatcggcgccgcgcttgactgcctgtacatgaggagcggctgcggcggcggcggagggagacaacctggggaaggaggcgggggaggcgctggggctgctgggctgcgtcaatgaggtggtggcggcggtggcggccacgtgggggcccatgaccgacggcgcgcgcgtcgagacggcgcccaggctcgcccaatggcgcgtcgacccgctcccctgctacacctaccgcaagtcactccccttcctcatcggcctctggaactggtgcatatctgtggagagaaataacaagcaaacctgtgttaagctctttgcagagaatacaagttctctcaagaacggttcctcagccccaatagcttcctttatcgccaaacttattgtatctcttccacctaatcagcagaccatagtccacccaggaatttttgacaaacagctgaaatacgacggttttgtgtggacaatcgatagcaccgtcactgggaggtttgtgattgagatagagtttcttgacctgaaggtcgctgatccgtctggcggcgagccggcctcgatttgggcctcccgccaggtcaagcagtgctcggatagcacggccctgtcgtccctggctcggatgctgcacgaggacgtcctcaccgacatcaccatcaacgcggcggacggcagcgtgggcgcgcaccgcgcggtcctggcgacgcggtcgccggtgttccggagcatgttctcgcacgacctgagggagaaggagctctccaccgtggacatcaccgacatgtccctggacgcgtgccgcgccttcctcagctacatctacggcgacgtgcgcggcggcgaggagttcctggcgaaccggctggcgctcctccgcgccgccgacaagtacgacatcggcgacctcagggaggcctgccacgagagcctgctggaagacatcgacgcgcgcaacgtgctggagcggctgcagacggcgcacctgtaccggctgccgaggctcaagggcggctgcctgaggttccttgtggacttcaggaaggtgtacgagatgcacgacgacgacctcaacgcgttcctgcagacggccgacagggaactcgtggccgaggtgttccatggcgttcttgccgcgtggagcgggcggtaagccgggcgcatgccatggcactgccgctctgctgcaggtgttgcacatctggttggttcagttcgtcacaactcagaagcgttgtttgcaactgcaggattcttgctgggaaagcgtgtaaatatttgcaactgtacatgcgtgccagtggttggtctaaaatttactgtgcatgccttgattggattttgttcctatgatgtggaaatcagctcatatgctgctc

SEQ ID NO: 6497 - protein, 332 aa, Zea mays subsp. mays
  peptide (1)..(332): Ceres Seq. ID no. 12408461
  misc_feature (155)..(264): Pfam Name: BTB/POZ domain Pfam Description: BTB/POZ domain
  misc_feature (1)..(331): Homolog of NCBI NO: 15222771 NR Description: hypothetical protein; protein id: At1g55760.1
  misc_feature (1)..(293): Homolog of NCBI NO: 8778495 NR Description: F20N2.15 [Arabidopsis thaliana]
  misc_feature (6)..(329): Homolog of NCBI NO: 15219092 NR Description: unknown protein; protein id: At1g21780.1, by cDNA: 36526. [Arabidopsis thaliana] >gi|25518571|pir||E86351
  misc_feature (41)..(329): Homolog of NCBI NO: 38637050 NR Description: POZ domain protein family-like [Oryza sativa
  misc_feature (124)..(293): Homolog of NCBI NO: 27661061 NR Description: similar to speckle-type POZ protein [Homo
  misc_feature (124)..(293): Homolog of NCBI NO: 34858214 NR Description: similar to speckle-type POZ protein-like 1; POZ
  misc_feature (148)..(326): Homolog of NCBI NO: 34900926 NR Description: Speckle-type POZ protein-like~contains ESTs
  misc_feature (124)..(293): Homolog of NCBI NO: 34858187 NR Description: similar to speckle-type POZ protein-like 1; POZ
  misc_feature (131)..(293): Homolog of NCBI NO: 34858205 NR Description: similar to speckle-type POZ protein-like 1; POZ
  misc_feature (124)..(293): Homolog of NCBI NO: 34858216 NR Description: similar to speckle-type POZ protein-like 1; POZ
MTDGARVETAPRLAQWRVDPLPCYTYRKSLPFLIGLWNWCISVERNNKQTCVKLFAENTSSLKNGSSAPIASFIAKLIVSLPPNQQTIVHPGIFDKQLKYDGFVWTIDSTVTGRFVIEIEFLDLKVADPSGGEPASIWASRQVKQCSDSTALSSLARMLHEDVLTDITINAADGSVGAHRAVLATRSPVFRSMFSHDLREKELSTVDITDMSLDACRAFLSYIYGDVRGGEEFLANRLALLRAADKYDIGDLREACHESLLEDIDARNVLERLQTAHLYRLPRLKGGCLRFLVDFRKVYEMHDDDLNAFLQTADRELVAEVFHGVLAAWSGR

SEQ ID NO: 6498 - protein, 175 aa, Zea mays subsp. mays
  peptide (1)..(175): Ceres Seq. ID no. 12408462
  misc_feature (1)..(107): Pfam Name: BTB/POZ domain Pfam Description: BTB/POZ domain
  misc_feature (1)..(174): Homolog of NCBI NO: 15222771 NR Description: hypothetical protein; protein id: At1g55760.1
  misc_feature (1)..(136): Homolog of NCBI NO: 8778495 NR Description: F20N2.15 [Arabidopsis thaliana]
  misc_feature (1)..(172): Homolog of NCBI NO: 15219092 NR Description: unknown protein; protein id: At1g21780.1, by cDNA: 36526. [Arabidopsis thaliana] >gi|25518571|pir||E86351
  misc_feature (1)..(172): Homolog of NCBI NO: 38637050 NR Description: POZ domain protein family-like [Oryza sativa
  misc_feature (1)..(136): Homolog of NCBI NO: 27661061 NR Description: similar to speckle-type POZ protein [Homo
  misc_feature (1)..(136): Homolog of NCBI NO: 34858214 NR Description: similar to speckle-type POZ protein-like 1; POZ
  misc_feature (1)..(169): Homolog of NCBI NO: 34900926 NR Description: Speckle-type POZ protein-like~contains ESTs
  misc_feature (1)..(136): Homolog of NCBI NO: 34858187 NR Description: similar to speckle-type POZ protein-like 1; POZ
  misc_feature (1)..(136): Homolog of NCBI NO: 34858205 NR Description: similar to speckle-type POZ protein-like 1; POZ
  misc_feature (1)..(136): Homolog of NCBI NO: 34858216 NR Description: similar to speckle-type POZ protein-like 1; POZ
MLHEDVLTDITINAADGSVGAHRAVLATRSPVFRSMFSHDLREKELSTVDITDMSLDACRAFLSYIYGDVRGGEEFLANRLALLRAADKYDIGDLREACHESLLEDIDARNVLERLQTAHLYRLPRLKGGCLRFLVDFRKVYEMHDDDLNAFLQTADRELVAEVFHGVLAAWSGR

SEQ ID NO: 6499 - DNA, 1765 bp, Zea mays subsp. mays; identical to SEQ ID NO: 6475
  misc_feature (1)..(1765): Ceres Seq. ID no. 13492636
  misc_feature: MA Experiment ID: 108556 Result: Down-regulated in Transcription
  misc_feature: MA Experiment 108556 PARAMETER Experiment Name: Zm_Drought_P Parameter: Age (day) Value: 9
  misc_feature: MA Experiment 108556 PARAMETER Experiment Name: Zm_Drought_P Parameter: Organism Value: Zea mays
  misc_feature: MA Experiment 108556 PARAMETER Experiment Name: Zm_Drought_P Parameter: Plant Line Value: 35A19
  misc_feature: MA Experiment 108556 PARAMETER Experiment Name: Zm_Drought_P Parameter: Timepoint (hr) Value: 24
  misc_feature: MA Experiment 108556 PARAMETER Experiment Name: Zm_Drought_P Parameter: Tissue Value: Aerial
  misc_feature: MA Experiment 108556 PARAMETER Experiment Name: Zm_Drought_P Parameter: Treatment Value: Drought vs. No Drought
  misc_feature: MA Experiment ID: 20000535 Result: Down-regulated in Transcription
  misc_feature: MA Experiment 20000535 PARAMETER Experiment Name: Zm_Hybrid_Seed_Dev_P Parameter: DAP Value: 30 vs. 12
  misc_feature: MA Experiment 20000535 PARAMETER Experiment Name: Zm_Hybrid_Seed_Dev_P Parameter: Organism Value: Zea mays
  misc_feature: MA Experiment 20000535 PARAMETER Experiment Name: Zm_Hybrid_Seed_Dev_P Parameter: Plant Line Value: 35A19
  misc_feature: MA Experiment 20000535 PARAMETER Experiment Name: Zm_Hybrid_Seed_Dev_P Parameter: Tissue Value: Embryo vs. Unfert Floret

SEQ ID NO: 6500 - protein, 527 aa, Zea mays subsp. mays; identical to SEQ ID NO: 6476
  peptide (1)..(527): Ceres Seq. ID no. 13492637
  misc_feature (80)..(527): Homolog of NCBI NO: 34895992 NR Description: putative carboxypeptidase D [Oryza sativa
  misc_feature (72)..(518): Homolog of NCBI NO: 34908012 NR Description: putative carboxypeptidase D [Oryza sativa
  misc_feature (68)..(518): Homolog of NCBI NO: 7428204 NR Description: carboxypeptidase D (EC 3.4.16.6) precursor -
  misc_feature (68)..(518): Homolog of NCBI NO: 20455471 NR Description: Serine carboxypeptidase II precursor
  misc_feature (84)..(518): Homolog of NCBI NO: 15227493 NR Description: serine carboxypeptidase -related [Arabidopsis
  misc_feature (71)..(518): Homolog of NCBI NO: 15231911 NR Description: serine carboxypeptidase -related [Arabidopsis >gi|6648211|gb|AAF21209.1|AC013483_33 putative serine
  misc_feature (205)..(527): Homolog of NCBI NO: 2493493 NR Description: Serine carboxypeptidase II-1 precursor (CP-MII.1)
  misc_feature (93)..(518): Homolog of NCBI NO: 7428205 NR Description: carboxypeptidase D (EC 3.4.16.6) - wheat
  misc_feature (73)..(524): Homolog of NCBI NO: 18417667 NR Description: serine carboxypeptidase -related [Arabidopsis >gi|15293049|gb|AAK93635.1| putative serine carboxypeptidase II thaliana] >gi|22136958|gb|AAM91708.1| putative serine
  misc_feature (75)..(519): Homolog of NCBI NO: 13877871 NR Description: putative serine carboxypeptidase II [Arabidopsis
  misc_feature (80)..(527): Homolog of NCBI NO: 34895992 NR Description: putative carboxypeptidase D [Oryza sativa
  misc_feature (72)..(518): Homolog of NCBI NO: 34908012 NR Description: putative carboxypeptidase D [Oryza sativa
  misc_feature (68)..(518): Homolog of NCBI NO: 7428204 NR Description: carboxypeptidase D (EC 3.4.16.6) precursor -
  misc_feature (68)..(518): Homolog of NCBI NO: 20455471 NR Description: Serine carboxypeptidase II precursor
  misc_feature (84)..(518): Homolog of NCBI NO: 15227493 NR Description: serine carboxypeptidase -related [Arabidopsis
  misc_feature (71)..(518): Homolog of NCBI NO: 15231911 NR Description: serine carboxypeptidase -related [Arabidopsis >gi|6648211|gb|AAF21209.1|AC013483_33 putative serine
  misc_feature (205)..(527): Homolog of NCBI NO: 2493493 NR Description: Serine carboxypeptidase II-1 precursor (CP-MII.1)
  misc_feature (93)..(518): Homolog of NCBI NO: 7428205 NR Description: carboxypeptidase D (EC 3.4.16.6) - wheat
  misc_feature (73)..(524): Homolog of NCBI NO: 18417667 NR Description: serine carboxypeptidase -related [Arabidopsis >gi|15293049|gb|AAK93635.1| putative serine carboxypeptidase II thaliana] >gi|22136958|gb|AAM91708.1| putative serine
  misc_feature (75)..(519): Homolog of NCBI NO: 13877871 NR Description: putative serine carboxypeptidase II [Arabidopsis

SEQ ID NO: 6501 - protein, 419 aa, Zea mays subsp. mays; identical to SEQ ID NO: 6477
  peptide (1)..(419): Ceres Seq. ID no. 13492638
  misc_feature (1)..(419): Homolog of NCBI NO: 34895992 NR Description: putative carboxypeptidase D [Oryza sativa
  misc_feature (1)..(410): Homolog of NCBI NO: 34908012 NR Description: putative carboxypeptidase D [Oryza sativa
  misc_feature (1)..(410): Homolog of NCBI NO: 7428204 NR Description: carboxypeptidase D (EC 3.4.16.6) precursor -
  misc_feature (1)..(410): Homolog of NCBI NO: 20455471 NR Description: Serine carboxypeptidase II precursor
  misc_feature (1)..(410): Homolog of NCBI NO: 15227493 NR Description: serine carboxypeptidase -related [Arabidopsis
  misc_feature (1)..(410): Homolog of NCBI NO: 15231911 NR Description: serine carboxypeptidase -related [Arabidopsis >gi|6648211|gb|AAF21209.1|AC013483_33 putative serine
  misc_feature (97)..(419): Homolog of NCBI NO: 2493493 NR Description: Serine carboxypeptidase II-1 precursor (CP-MII.1)
  misc_feature (1)..(410): Homolog of NCBI NO: 7428205 NR Description: carboxypeptidase D (EC 3.4.16.6) - wheat
  misc_feature (1)..(416): Homolog of NCBI NO: 18417667 NR Description: serine carboxypeptidase -related [Arabidopsis >gi|15293049|gb|AAK93635.1| putative serine carboxypeptidase II thaliana] >gi|22136958|gb|AAM91708.1| putative serine
  misc_feature (1)..(411): Homolog of NCBI NO: 13877871 NR Description: putative serine carboxypeptidase II [Arabidopsis
  misc_feature (97)..(419): Homolog of NCBI NO: 2493493 NR Description: Serine carboxypeptidase II-1 precursor (CP-MII.1)
  misc_feature (1)..(410): Homolog of NCBI NO: 7428205 NR Description: carboxypeptidase D (EC 3.4.16.6) - wheat
  misc_feature (1)..(416): Homolog of NCBI NO: 18417667 NR Description: serine carboxypeptidase -related [Arabidopsis >gi|15293049|gb|AAK93635.1| putative serine carboxypeptidase II thaliana] >gi|22136958|gb|AAM91708.1| putative serine
  misc_feature (1)..(411): Homolog of NCBI NO: 13877871 NR Description: putative serine carboxypeptidase II [Arabidopsis
  misc_feature (1)..(419): Homolog of NCBI NO: 34895992 NR Description: putative carboxypeptidase D [Oryza sativa
  misc_feature (1)..(410): Homolog of NCBI NO: 34908012 NR Description: putative carboxypeptidase D [Oryza sativa
  misc_feature (1)..(410): Homolog of NCBI NO: 7428204 NR Description: carboxypeptidase D (EC 3.4.16.6) precursor -
  misc_feature (1)..(410): Homolog of NCBI NO: 20455471 NR Description: Serine carboxypeptidase II precursor
  misc_feature (1)..(410): Homolog of NCBI NO: 15227493 NR Description: serine carboxypeptidase -related [Arabidopsis
  misc_feature (1)..(410): Homolog of NCBI NO: 15231911 NR Description: serine carboxypeptidase -related [Arabidopsis >gi|6648211|gb|AAF21209.1|AC013483_33 putative serine

SEQ ID NO: 6502 - protein, 341 aa, Zea mays subsp. mays; identical to SEQ ID NO: 6478
  peptide (1)..(341): Ceres Seq. ID no. 13492639
  misc_feature (1)..(341): Homolog of NCBI NO: 34895992 NR Description: putative carboxypeptidase D [Oryza sativa
  misc_feature (1)..(332): Homolog of NCBI NO: 34908012 NR Description: putative carboxypeptidase D [Oryza sativa
  misc_feature (1)..(332): Homolog of NCBI NO: 7428204 NR Description: carboxypeptidase D (EC 3.4.16.6) precursor -
  misc_feature (1)..(332): Homolog of NCBI NO: 20455471 NR Description: Serine carboxypeptidase II precursor
  misc_feature (1)..(332): Homolog of NCBI NO: 15227493 NR Description: serine carboxypeptidase -related [Arabidopsis
  misc_feature (1)..(332): Homolog of NCBI NO: 15231911 NR Description: serine carboxypeptidase -related [Arabidopsis >gi|6648211|gb|AAF21209.1|AC013483_33 putative serine
  misc_feature (19)..(341): Homolog of NCBI NO: 2493493 NR Description: Serine carboxypeptidase II-1 precursor (CP-MII.1)
  misc_feature (1)..(332): Homolog of NCBI NO: 7428205 NR Description: carboxypeptidase D (EC 3.4.16.6) - wheat
  misc_feature (1)..(338): Homolog of NCBI NO: 18417667 NR Description: serine carboxypeptidase -related [Arabidopsis >gi|15293049|gb|AAK93635.1| putative serine carboxypeptidase II thaliana] >gi|22136958|gb|AAM91708.1| putative serine
  misc_feature (1)..(333): Homolog of NCBI NO: 13877871 NR Description: putative serine carboxypeptidase II [Arabidopsis
  misc_feature (1)..(341): Homolog of NCBI NO: 34895992 NR Description: putative carboxypeptidase D [Oryza sativa
  misc_feature (1)..(332): Homolog of NCBI NO: 34908012 NR Description: putative carboxypeptidase D [Oryza sativa
  misc_feature (1)..(332): Homolog of NCBI NO: 7428204 NR Description: carboxypeptidase D (EC 3.4.16.6) precursor -
  misc_feature (1)..(332): Homolog of NCBI NO: 20455471 NR Description: Serine carboxypeptidase II precursor
  misc_feature (1)..(332): Homolog of NCBI NO: 15227493 NR Description: serine carboxypeptidase -related [Arabidopsis
  misc_feature (1)..(332): Homolog of NCBI NO: 15231911 NR Description: serine carboxypeptidase -related [Arabidopsis >gi|6648211|gb|AAF21209.1|AC013483_33 putative serine
  misc_feature (19)..(341): Homolog of NCBI NO: 2493493 NR Description: Serine carboxypeptidase II-1 precursor (CP-MII.1)
  misc_feature (1)..(332): Homolog of NCBI NO: 7428205 NR Description: carboxypeptidase D (EC 3.4.16.6) - wheat
  misc_feature (1)..(338): Homolog of NCBI NO: 18417667 NR Description: serine carboxypeptidase -related [Arabidopsis >gi|15293049|gb|AAK93635.1| putative serine carboxypeptidase II thaliana] >gi|22136958|gb|AAM91708.1| putative serine
  misc_feature (1)..(333): Homolog of NCBI NO: 13877871 NR Description: putative serine carboxypeptidase II [Arabidopsis

SEQ ID NO: 6503 - DNA, 1449 bp, Zea mays subsp. mays
  misc_feature (1)..(1449): Ceres Seq. ID no. 12353868
  misc_feature: MA Experiment ID: 108535 Result: Up-regulated in Transcription
  misc_feature: MA Experiment 108535 PARAMETER Experiment Name: Zm_Meristem_P Parameter: Age (day) Value: 8
  misc_feature: MA Experiment 108535 PARAMETER Experiment Name: Zm_Meristem_P Parameter: Organism Value: Zea mays
  misc_feature: MA Experiment 108535 PARAMETER Experiment Name: Zm_Meristem_P Parameter: Plant Line Value: 35A19
  misc_feature: MA Experiment 108535 PARAMETER Experiment Name: Zm_Meristem_P Parameter: Tissue Value: Root Meristem vs. Above Root Meristem
ttttttttctactcccgcgcccctccgcgagctccctacccctcgcgctcacgccggcgacaagtttccgccagagttaggtagatcaggtgctgcgccggcagccgtggaagggatggaggacctcgcgagttcgcgtggcggcgggggatgcggtggtcttgatgcgcagatcgaacagctcatggagtgccgcccgctcccagagacggaggttaaaacactgtgtgagaaggccaaggagatattaatggaggaaagcaatgttcagccagttaaaagccctgtgacgatttgtggtgatattcatggccaattccatgatcttttagaacttttccggattggtgggaagtgtccagatacaaattatttgtttatgggtgattatgtggatcgtggctattactctgttgagacagtaacgcttttagttgcacttaaggtgcggtacccgcaacgcattacaattcttcgtggaaaccatgaaagtaggcagatcacacaggtgtatggcttctatgatgaatgcctacgaaaatatggcagtgcaaatgtctggaagatcttcactgatctttttgattattttccgttgacagcattggtggaatcagaaattttctgcctccatggtggtttatctccatccattgagaatcttgataacgttcgcagtttagaccgtgtccaagaggtccctcatgagggacctatgtgcgaccttctgtggtctgatccagacgatagatgtggctggggcatatctccacgtggtgctggatacacttttggccaagacatatcggagcagtttaatcacaccaacaatcttaaactcgtagctcgggctcaccagttggttatggagggatacaactgggcacatgaacaaaaggtggtgaccatattcagcgcacctaactactgttaccggtgcggcaacatggcgtccatcctcgaggtcgatgactgcaggaatcacacatttattcagtttgagccagctcctaggagaggtgaaccagacgtgacgcggaggacacctgattatttcctttgagttatctgccagaccatttttggaatttgcccaatgttggaatagtgatgctagccagtaacaatttttgttggatctatatgataacttaaccgaccagcaacagtaagaaaatgtggaagctgcatctgtcattgcaagaggtgctcgctaacagtaacaggtcgacgacctatacaccccaagctgtcaaaagatccgcttgtctacccaacccaccaagtggtgcctcccttgggctttgggacgtcgagtttacgctttcagcgtagagttgcctcagttctgtcttgtgtgtcagctagttttgtgtttgtgtcttgtgtggttgctcgttgtagcttctgtgattaaatgacaacagacaagctggtctcgagtgttgc

SEQ ID NO: 6504 - protein, 353 aa, Zea mays subsp. mays
  peptide (1)..(353): Ceres Seq. ID no. 12353869
  misc_feature (94)..(289): Pfam Name: Calcineurin-like phosphoesterase Pfam Description: Calcineurin-like phosphoesterase
  misc_feature (39)..(353): Homolog of NCBI NO: 11134154 NR Description: Serine/threonine protein phosphatase PP2A-4 subunit >gi|5714762|gb|AAD48068.1|AF173881_1 serine/threonine
  misc_feature (91)..(353): Homolog of NCBI NO: 19071628 NR Description: serine/threonine protein phosphatase PP2A-4
  misc_feature (39)..(97): Homolog of NCBI NO: 19071628 NR Description: serine/threonine protein phosphatase PP2A-4
  misc_feature (52)..(353): Homolog of NCBI NO: 11134218 NR Description: Serine/threonine protein phosphatase PP2A-2
  misc_feature (54)..(353): Homolog of NCBI NO: 18410971 NR Description: protein phosphatase PP2A catalytic subunit; id: At3g58500.1, supported by cDNA: gi_15810366, supported by gi_16209681, supported by cDNA: gi_473258 [Arabidopsis thaliana]
  misc_feature (54)..(353): Homolog of NCBI NO: 418777 NR Description: phosphoprotein phosphatase (EC 3.1.3.16) 2A-alpha
  misc_feature (54)..(353): Homolog of NCBI NO: 18405985 NR Description: protein phosphatase 2A (PP2A); protein id:
  misc_feature (54)..(353): Homolog of NCBI NO: 548441 NR Description: SERINE/THREONINE PROTEIN PHOSPHATASE PP2A
  misc_feature (54)..(353): Homolog of NCBI NO: 7248363 NR Description: type 2A protein phosphatase-3 [Vicia faba]
  misc_feature (41)..(353): Homolog of NCBI NO: 7435135 NR Description: phosphoprotein phosphatase (EC 3.1.3.16) 2a1
FFSTPAPLRELPTPRAHAGDKFPPELGRSGAAPAAVEGMEDLASSRGGGGCGGLDAQIEQLMECRPLPETEVKTLCEKAKEILMEESNVQPVKSPVTICGDIHGQFHDLLELFRIGGKCPDTNYLFMGDYVDRGYYSVETVTLLVALKVRYPQRITILRGNHESRQITQVYGFYDECLRKYGSANVWKIFTDLFDYFPLTALVESEIFCLHGGLSPSIENLDNVRSLDRVQEVPHEGPMCDLLWSDPDDRCGWGISPRGAGYTFGQDISEQFNHTNNLKLVARAHQLVMEGYNWAHEQKVVTIFSAPNYCYRCGNMASILEVDDCRNHTFIQFEPAPRRGEPDVTRRTPDYFL

SEQ ID NO: 6505 - protein, 315 aa, Zea mays subsp. mays
  peptide (1)..(315): Ceres Seq. ID no. 12353870
  misc_feature (56)..(251): Pfam Name: Calcineurin-like phosphoesterase Pfam Description: Calcineurin-like phosphoesterase
  misc_feature (1)..(315): Homolog of NCBI NO: 11134154 NR Description: Serine/threonine protein phosphatase PP2A-4 subunit >gi|5714762|gb|AAD48068.1|AF173881_1 serine/threonine
  misc_feature (53)..(315): Homolog of NCBI NO: 19071628 NR Description: serine/threonine protein phosphatase PP2A-4
  misc_feature (1)..(59): Homolog of NCBI NO: 19071628 NR Description: serine/threonine protein phosphatase PP2A-4
  misc_feature (14)..(315): Homolog of NCBI NO: 11134218 NR Description: Serine/threonine protein phosphatase PP2A-2
  misc_feature (16)..(315): Homolog of NCBI NO: 18410971 NR Description: protein phosphatase PP2A catalytic subunit; id: At3g58500.1, supported by cDNA: gi_15810366, supported by gi_16209681, supported by cDNA: gi_473258 [Arabidopsis thaliana]
  misc_feature (16)..(315): Homolog of NCBI NO: 418777 NR Description: phosphoprotein phosphatase (EC 3.1.3.16) 2A-alpha
  misc_feature (16)..(315): Homolog of NCBI NO: 18405985 NR Description: protein phosphatase 2A (PP2A); protein id:
  misc_feature (16)..(315): Homolog of NCBI NO: 548441 NR Description: SERINE/THREONINE PROTEIN PHOSPHATASE PP2A
  misc_feature (16)..(315): Homolog of NCBI NO: 7248363 NR Description: type 2A protein phosphatase-3 [Vicia faba]
  misc_feature (3)..(315): Homolog of NCBI NO: 7435135 NR Description: phosphoprotein phosphatase (EC 3.1.3.16) 2a1
MEDLASSRGGGGCGGLDAQIEQLMECRPLPETEVKTLCEKAKEILMEESNVQPVKSPVTICGDIHGQFHDLLELFRIGGKCPDTNYLFMGDYVDRGYYSVETVTLLVALKVRYPQRITILRGNHESRQITQVYGFYDECLRKYGSANVWKIFTDLFDYFPLTALVESEIFCLHGGLSPSIENLDNVRSLDRVQEVPHEGPMCDLLWSDPDDRCGWGISPRGAGYTFGQDISEQFNHTNNLKLVARAHQLVMEGYNWAHEQKVVTIFSAPNYCYRCGNMASILEVDDCRNHTFIQFEPAPRRGEPDVTRRTPDYFL

SEQ ID NO: 6506 - protein, 292 aa, Zea mays subsp. mays
  peptide (1)..(292): Ceres Seq. ID no. 12353871
  misc_feature (33)..(228): Pfam Name: Calcineurin-like phosphoesterase Pfam Description: Calcineurin-like phosphoesterase
  misc_feature (1)..(292): Homolog of NCBI NO: 11134154 NR Description: Serine/threonine protein phosphatase PP2A-4 subunit >gi|5714762|gb|AAD48068.1|AF173881_1 serine/threonine
  misc_feature (30)..(292): Homolog of NCBI NO: 19071628 NR Description: serine/threonine protein phosphatase PP2A-4
  misc_feature (1)..(36): Homolog of NCBI NO: 19071628 NR Description: serine/threonine protein phosphatase PP2A-4
  misc_feature (1)..(292): Homolog of NCBI NO: 11134218 NR Description: Serine/threonine protein phosphatase PP2A-2
  misc_feature (1)..(292): Homolog of NCBI NO: 18410971 NR Description: protein phosphatase PP2A catalytic subunit; id: At3g58500.1, supported by cDNA: gi_15810366, supported by gi_16209681, supported by cDNA: gi_473258 [Arabidopsis thaliana]
  misc_feature (1)..(292): Homolog of NCBI NO: 418777 NR Description: phosphoprotein phosphatase (EC 3.1.3.16) 2A-alpha
  misc_feature (1)..(292): Homolog of NCBI NO: 18405985 NR Description: protein phosphatase 2A (PP2A); protein id:
  misc_feature (1)..(292): Homolog of NCBI NO: 548441 NR Description: SERINE/THREONINE PROTEIN PHOSPHATASE PP2A
  misc_feature (1)..(292): Homolog of NCBI NO: 7248363 NR Description: type 2A protein phosphatase-3 [Vicia faba]
  misc_feature (1)..(292): Homolog of NCBI NO: 7435135 NR Description: phosphoprotein phosphatase (EC 3.1.3.16) 2a1
MECRPLPETEVKTLCEKAKEILMEESNVQPVKSPVTICGDIHGQFHDLLELFRIGGKCPDTNYLFMGDYVDRGYYSVETVTLLVALKVRYPQRITILRGNHESRQITQVYGFYDECLRKYGSANVWKIFTDLFDYFPLTALVESEIFCLHGGLSPSIENLDNVRSLDRVQEVPHEGPMCDLLWSDPDDRCGWGISPRGAGYTFGQDISEQFNHTNNLKLVARAHQLVMEGYNWAHEQKVVTIFSAPNYCYRCGNMASILEVDDCRNHTFIQFEPAPRRGEPDVTRRTPDYFL

SEQ ID NO: 6507 - DNA, 749 bp, Zea mays subsp. mays
  misc_feature (1)..(749): Ceres Seq. ID no. 12344461
  misc_feature: MA Experiment ID: 20000535 Result: Down-regulated in Transcription
  misc_feature: MA Experiment 20000535 PARAMETER Experiment Name: Zm_Hybrid_Seed_Dev_P Parameter: DAP Value: 30 vs. 12
  misc_feature: MA Experiment 20000535 PARAMETER Experiment Name: Zm_Hybrid_Seed_Dev_P Parameter: Organism Value: Zea mays
  misc_feature: MA Experiment 20000535 PARAMETER Experiment Name: Zm_Hybrid_Seed_Dev_P Parameter: Plant Line Value: 35A19
  misc_feature: MA Experiment 20000535 PARAMETER Experiment Name: Zm_Hybrid_Seed_Dev_P Parameter: Tissue Value: Embryo vs. Unfert Floret
atctcttctttcccctctccctcccctcgccgtcgctgtcgtcgccgtccgtgctagccatggatctaggcgctcccgctcgacggcgcttaccgatccgcctcttgctggtgtcgctcgccgtcctcatggtcctcaccgcgcgttccagtgccgaagtcatcaccctcaccgaagagaccttctccgacaagataaaggagaaggacacggtgtggtttgtgcagttctgcgtcccctggtgtaaacactgcaagaaccttggaacactatgggaggacctgggaaaggttatggaaggtgcggatgaaattgagattgggcaagttgactgtggtgtcagcaaaccagtatgctcaaaggtcgatatacactcctacccaacattcaaggtgttttatgaaggcgaagaagtagtaaaatataaaggacctaggaatgtggaatcgctgaagaacttcgtgttgaatgaagctgagaaagcaggtgaggcaaagcttcaagctgattgaggcaggggagtttcagcaagcatgtggcgtagacaaggaacaatgctgtgcaacattgtcttctatcctgtcatttacaaagccaatttacaggaaagaaatgatcttatgaccccgtatcagagtattcctcttcgaaagtaactccgaatcagttcatagaagctgtactccattccatagtttttatcacattgacaaactccgaatcagttaatagaagctgtactccattcg

SEQ ID NO: 6508 - protein, 169 aa, Zea mays subsp. mays
  peptide (1)..(169): Ceres Seq. ID no. 12344462
  misc_feature (52)..(159): Pfam Name: Thioredoxin Pfam Description: Thioredoxin
  misc_feature (20)..(167): Homolog of NCBI NO: 15223058 NR Description: unknown protein; protein id: At1g07960.1 thaliana] >gi|26450503|dbj|BAC42365.1| unknown protein thaliana] >gi|28827366|gb|AAO50527.1| unknown protein
  misc_feature (20)..(155): Homolog of NCBI NO: 1532175 NR Description: similar to protein disulfide isomerase
  misc_feature (64)..(167): Homolog of NCBI NO: 8778824 NR Description: T6D22.5 [Arabidopsis thaliana]
  misc_feature (53)..(159): Homolog of NCBI NO: 19353593 NR Description: Unknown (protein for MGC:37456) [Mus musculus]
  misc_feature (53)..(159): Homolog of NCBI NO: 21703732 NR Description: similar to thioredoxin related protein [Mus >gi|16740761|gb|AAH16252.1| Similar to hypothetical protein
  misc_feature (53)..(159): Homolog of NCBI NO: 37574006 NR Description: Txndc5 protein [Mus musculus]
  misc_feature (53)..(159): Homolog of NCBI NO: 29839593 NR Description: Thioredoxin domain containing protein 5 precursor
  misc_feature (53)..(159): Homolog of NCBI NO: 34875200 NR Description: similar to expressed sequence AL022641 [Rattus
  misc_feature (44)..(159): Homolog of NCBI NO: 13540604 NR Description: thioredoxin related protein [Homo sapiens]
  misc_feature (44)..(159): Homolog of NCBI NO: 21740140 NR Description: hypothetical protein [Homo sapiens]
LFFPLSLPSPSLSSPSVLAMDLGAPARRRLPIRLLLVSLAVLMVLTARSSAEVITLTEETFSDKIKEKDTVWFVQFCVPWCKHCKNLGTLWEDLGKVMEGADEIEIGQVDCGVSKPVCSKVDIHSYPTFKVFYEGEEVVKYKGPRNVESLKNFVLNEAEKAGEAKLQAD

SEQ ID NO: 6509 - protein, 150 aa, Zea mays subsp. mays
  peptide (1)..(150): Ceres Seq. ID no. 12344463
  misc_feature (33)..(140): Pfam Name: Thioredoxin Pfam Description: Thioredoxin
  misc_feature (1)..(148): Homolog of NCBI NO: 15223058 NR Description: unknown protein; protein id: At1g07960.1 thaliana] >gi|26450503|dbj|BAC42365.1| unknown protein thaliana] >gi|28827366|gb|AAO50527.1| unknown protein
  misc_feature (1)..(136): Homolog of NCBI NO: 1532175 NR Description: similar to protein disulfide isomerase
  misc_feature (45)..(148): Homolog of NCBI NO: 8778824 NR Description: T6D22.5 [Arabidopsis thaliana]
  misc_feature (34)..(140): Homolog of NCBI NO: 19353593 NR Description: Unknown (protein for MGC:37456) [Mus musculus]
  misc_feature (34)..(140): Homolog of NCBI NO: 21703732 NR Description: similar to thioredoxin related protein [Mus >gi|16740761|gb|AAH16252.1| Similar to hypothetical protein
  misc_feature (34)..(140): Homolog of NCBI NO: 37574006 NR Description: Txndc5 protein [Mus musculus]
  misc_feature (34)..(140): Homolog of NCBI NO: 29839593 NR Description: Thioredoxin domain containing protein 5 precursor
  misc_feature (34)..(140): Homolog of NCBI NO: 34875200 NR Description: similar to expressed sequence AL022641 [Rattus
  misc_feature (25)..(140): Homolog of NCBI NO: 13540604 NR Description: thioredoxin related protein [Homo sapiens]
  misc_feature (25)..(140): Homolog of NCBI NO: 21740140 NR Description: hypothetical protein [Homo sapiens]
MDLGAPARRRLPIRLLLVSLAVLMVLTARSSAEVITLTEETFSDKIKEKDTVWFVQFCVPWCKHCKNLGTLWEDLGKVMEGADEIEIGQVDCGVSKPVCSKVDIHSYPTFKVFYEGEEVVKYKGPRNVESLKNFVLNEAEKAGEAKLQAD

SEQ ID NO: 6510 - protein, 127 aa, Zea mays subsp. mays
  peptide (1)..(127): Ceres Seq. ID no. 12344464
  misc_feature (10)..(117): Pfam Name: Thioredoxin Pfam Description: Thioredoxin
  misc_feature (1)..(125): Homolog of NCBI NO: 15223058 NR Description: unknown protein; protein id: At1g07960.1 thaliana] >gi|26450503|dbj|BAC42365.1| unknown protein thaliana] >gi|28827366|gb|AAO50527.1| unknown protein
  misc_feature (1)..(113): Homolog of NCBI NO: 1532175 NR Description: similar to protein disulfide isomerase
  misc_feature (22)..(125): Homolog of NCBI NO: 8778824 NR Description: T6D22.5 [Arabidopsis thaliana]
  misc_feature (11)..(117): Homolog of NCBI NO: 19353593 NR Description: Unknown (protein for MGC:37456) [Mus musculus]
  misc_feature (11)..(117): Homolog of NCBI NO: 21703732 NR Description: similar to thioredoxin related protein [Mus >gi|16740761|gb|AAH16252.1| Similar to hypothetical protein
  misc_feature (11)..(117): Homolog of NCBI NO: 37574006 NR Description: Txndc5 protein [Mus musculus]
  misc_feature (11)..(117): Homolog of NCBI NO: 29839593 NR Description: Thioredoxin domain containing protein 5 precursor
  misc_feature (11)..(117): Homolog of NCBI NO: 34875200 NR Description: similar to expressed sequence AL022641 [Rattus
  misc_feature (2)..(117): Homolog of NCBI NO: 13540604 NR Description: thioredoxin related protein [Homo sapiens]
  misc_feature (2)..(117): Homolog of NCBI NO: 21740140 NR Description: hypothetical protein [Homo sapiens]
MVLTARSSAEVITLTEETFSDKIKEKDTVWFVQFCVPWCKHCKNLGTLWEDLGKVMEGADEIEIGQVDCGVSKPVCSKVDIHSYPTFKVFYEGEEVVKYKGPRNVESLKNFVLNEAEKAGEAKLQAD

SEQ ID NO: 6511 - DNA, 1319 bp, Zea mays subsp. mays
  misc_feature (1)..(1319): Ceres Seq. ID no. 12594090
  misc_feature: MA Experiment ID: 108530 Result: Down-regulated in Transcription
  misc_feature: MA Experiment 108530 PARAMETER Experiment Name: Zm_Imbibed_Seeds_P Parameter: Age (day) Value: 6 vs. 2
  misc_feature: MA Experiment 108530 PARAMETER Experiment Name: Zm_Imbibed_Seeds_P Parameter: Organism Value: Zea mays
  misc_feature: MA Experiment 108530 PARAMETER Experiment Name: Zm_Imbibed_Seeds_P Parameter: Plant Line Value: 35A19
  misc_feature: MA Experiment 108530 PARAMETER Experiment Name: Zm_Imbibed_Seeds_P Parameter: Tissue Value: Aerial vs. Embryo
  misc_feature: MA Experiment ID: 108559 Result: Up-regulated in Transcription
  misc_feature: MA Experiment 108559 PARAMETER Experiment Name: Zm_5mM_NO_P Parameter: Age (day) Value: 8
  misc_feature: MA Experiment 108559 PARAMETER Experiment Name: Zm_5mM_NO_P Parameter: Organism Value: Zea mays
  misc_feature: MA Experiment 108559 PARAMETER Experiment Name: Zm_5mM_NO_P Parameter: Plant Line Value: 35A19
  misc_feature: MA Experiment 108559 PARAMETER Experiment Name: Zm_5mM_NO_P Parameter: Timepoint (hr) Value: 12
  misc_feature: MA Experiment 108559 PARAMETER Experiment Name: Zm_5mM_NO_P Parameter: Tissue Value: Aerial
  misc_feature: MA Experiment 108559 PARAMETER Experiment Name: Zm_5mM_NO_P Parameter: Treatment Value: 5mM NO vs. No Treatment
atcaatcctccggacctccgtcctttataaaccgccggggagcgtggcggccattcgacgcaggcaccccagcagctcttgcggtcgtccctcagccgcgtcgcaccgcatcgcattctacgattcgaagctctctgctcgcaggggaccatggcgaagaactacccaaccgtgagcgccgagtacagcgaggccgtcgagaaggccaggcgcaagctccgcgccctcatcgccgagaagagctgcgcacccctcatgctccgcctcgcgtggcactccgcggggacgttcgacgtgtcgtcgaggaccggcggtcccttcggtactatgaagtgcccggcggaactggctcacggcgccaacgcggggctggacatcgcggtgcggctgctcgagcccatcaaggaggagttccccaccctctcctatgccgacttctaccagcttgccggagttgtggccgtcgaggtcaccggtgggcctgagatccccttccacccaggcagggaggacaagcctcagccgccacctgagggccgtcttcctgatgccaccaagggttctgaccacctgaggcaagtctttggcaagcagatgggtttgagtgatcaggacatcgttgccctctctggtggccacaccttgggaaggtgccacaaagagcggtctggttttgagggtgcctggactacgaaccctttggtctttgacaactcttacttcaaggaacttctgagtggtgacaaggagggccttcttcagctcccaagtgacaaagccctgctgagcgaccctgtcttccgccctcttgtggagaaatatgctgcagatgagaaggcattctttgatgactacaaagaggcccacctcaagctctccgaactggggtatgctgatgcttaaatggtccatatcctggagcgggacacaaactgctgcctgtatggactcgtgcgattcagggtgaaccatcagattgtctagtgtcttctctgtaataaatttatctgttcttggtactttgtctatggttgaatcggaacccattttccgtttgcctagattcttaatttctggtgctgtatccagctgaaactagtagatctatgatcttgtggctgcagcatgttcttgtcacttaccttttatctggtctccgttggttcggttcacaggttgtgtgctttaaaaggctgtgcttaagtcctgcaattcgagtccaccaaactgtagggtgcaagtcgagattttattagtgatgcaagttgctggtattggtgcattatcgggctaatacgcttgcgttgccttcggatttt

SEQ ID NO: 6512 - protein, 250 aa, Zea mays subsp. mays
  peptide (1)..(250): Ceres Seq. ID no. 12594091
  misc_feature (19)..(227): Pfam Name: Peroxidase Pfam Description: Peroxidase
  misc_feature (1)..(250): Homolog of NCBI NO: 7489542 NR Description: L-ascorbate peroxidase (EC 1.11.1.11) [validated] rice >gi|1321661|dbj|BAA08264.1| ascorbate peroxidase [Oryza >gi|27476069|gb|AAO17000.1| Putative ascorbate peroxidase [Oryza
  misc_feature (1)..(250): Homolog of NCBI NO: 3688398 NR Description: ascorbate peroxidase [Hordeum vulgare subsp.
  misc_feature (2)..(250): Homolog of NCBI NO: 15808779 NR Description: ascorbate peroxidase [Hordeum vulgare]
  misc_feature (1)..(250): Homolog of NCBI NO: 1420938 NR Description: ascorbate peroxidase [Vigna unguiculata]
  misc_feature (1)..(249): Homolog of NCBI NO: 2997688 NR Description: ascorbate peroxidase [Zantedeschia aethiopica]
MAKNYPTVSAEYSEAVEKARRKLRALIAEKSCAPLMLRLAWHSAGTFDVSSRTGGPFGTMKCPAELAHGANAGLDIAVRLLEPIKEEFPTLSYADFYQLAGVVAVEVTGGPEIPFHPGREDKPQPPPEGRLPDATKGSDHLRQVFGKQMGLSDQDIVALSGGHTLGRCHKERSGFEGAWTTNPLVFDNSYFKELLSGDKEGLLQLPSDKALLSDPVFRPLVEKYAADEKAFFDDYKEAHLKLSELGYADA

SEQ ID NO: 6513 - protein, 215 aa, Zea mays subsp. mays
  peptide (1)..(215): Ceres Seq. ID no. 12594092
  misc_feature (1)..(192): Pfam Name: Peroxidase Pfam Description: Peroxidase
  misc_feature (1)..(215): Homolog of NCBI NO: 7489542 NR Description: L-ascorbate peroxidase (EC 1.11.1.11) [validated] rice >gi|1321661|dbj|BAA08264.1| ascorbate peroxidase [Oryza >gi|27476069|gb|AAO17000.1| Putative ascorbate peroxidase [Oryza
  misc_feature (1)..(215): Homolog of NCBI NO: 3688398 NR Description: ascorbate peroxidase [Hordeum vulgare subsp.
  misc_feature (1)..(215): Homolog of NCBI NO: 15808779 NR Description: ascorbate peroxidase [Hordeum vulgare]
  misc_feature (1)..(215): Homolog of NCBI NO: 1420938 NR Description: ascorbate peroxidase [Vigna unguiculata]
  misc_feature (1)..(214): Homolog of NCBI NO: 2997688 NR Description: ascorbate peroxidase [Zantedeschia aethiopica]
MLRLAWHSAGTFDVSSRTGGPFGTMKCPAELAHGANAGLDIAVRLLEPIKEEFPTLSYADFYQLAGVVAVEVTGGPEIPFHPGREDKPQPPPEGRLPDATKGSDHLRQVFGKQMGLSDQDIVALSGGHTLGRCHKERSGFEGAWTTNPLVFDNSYFKELLSGDKEGLLQLPSDKALLSDPVFRPLVEKYAADEKAFFDDYKEAHLKLSELGYADA

SEQ ID NO: 6514 - protein, 191 aa, Zea mays subsp. mays
  peptide (1)..(191): Ceres Seq. ID no. 12594093
  misc_feature (1)..(168): Pfam Name: Peroxidase Pfam Description: Peroxidase
  misc_feature (1)..(191): Homolog of NCBI NO: 7489542 NR Description: L-ascorbate peroxidase (EC 1.11.1.11) [validated] rice >gi|1321661|dbj|BAA08264.1| ascorbate peroxidase [Oryza >gi|27476069|gb|AAO17000.1| Putative ascorbate peroxidase [Oryza
  misc_feature (1)..(191): Homolog of NCBI NO: 3688398 NR Description: ascorbate peroxidase [Hordeum vulgare subsp.
  misc_feature (1)..(191): Homolog of NCBI NO: 15808779 NR Description: ascorbate peroxidase [Hordeum vulgare]
  misc_feature (1)..(191): Homolog of NCBI NO: 1420938 NR Description: ascorbate peroxidase [Vigna unguiculata]
  misc_feature (1)..(190): Homolog of NCBI NO: 2997688 NR Description: ascorbate peroxidase [Zantedeschia aethiopica]
MKCPAELAHGANAGLDIAVRLLEPIKEEFPTLSYADFYQLAGVVAVEVTGGPEIPFHPGREDKPQPPPEGRLPDATKGSDHLRQVFGKQMGLSDQDIVALSGGHTLGRCHKERSGFEGAWTTNPLVFDNSYFKELLSGDKEGLLQLPSDKALLSDPVFRPLVEKYAADEKAFFDDYKEAHLKLSELGYADA

SEQ ID NO: 6515 - DNA, 1825 bp, Zea mays subsp. mays
  misc_feature (1)..(1825): Ceres Seq. ID no. 12367918
  misc_feature: MA Experiment ID: 108528 Result: Down-regulated in Transcription
  misc_feature: MA Experiment 108528 PARAMETER Experiment Name: Zm_Imbibed_Seeds_P Parameter: Age (day) Value: 5 vs. 2
  misc_feature: MA Experiment 108528 PARAMETER Experiment Name: Zm_Imbibed_Seeds_P Parameter: Organism Value: Zea mays
  misc_feature: MA Experiment 108528 PARAMETER Experiment Name: Zm_Imbibed_Seeds_P Parameter: Plant Line Value: 35A19
  misc_feature: MA Experiment 108528 PARAMETER Experiment Name: Zm_Imbibed_Seeds_P Parameter: Tissue Value: Aerial vs. Embryo
  misc_feature: MA Experiment ID: 108530 Result: Down-regulated in Transcription
  misc_feature: MA Experiment 108530 PARAMETER Experiment Name: Zm_Imbibed_Seeds_P Parameter: Age (day) Value: 6 vs. 2
  misc_feature: MA Experiment 108530 PARAMETER Experiment Name: Zm_Imbibed_Seeds_P Parameter: Organism Value: Zea mays
  misc_feature: MA Experiment 108530 PARAMETER Experiment Name: Zm_Imbibed_Seeds_P Parameter: Plant Line Value: 35A19
  misc_feature: MA Experiment 108530 PARAMETER Experiment Name: Zm_Imbibed_Seeds_P Parameter: Tissue Value: Aerial vs. Embryo
  misc_feature: MA Experiment ID: 108535 Result: Down-regulated in Transcription
  misc_feature: MA Experiment 108535 PARAMETER Experiment Name: Zm_Meristem_P Parameter: Age (day) Value: 8
  misc_feature: MA Experiment 108535 PARAMETER Experiment Name: Zm_Meristem_P Parameter: Organism Value: Zea mays
  misc_feature: MA Experiment 108535 PARAMETER Experiment Name: Zm_Meristem_P Parameter: Plant Line Value: 35A19
  misc_feature: MA Experiment 108535 PARAMETER Experiment Name: Zm_Meristem_P Parameter: Tissue Value: Root Meristem vs. Above Root Meristem
  misc_feature: MA Experiment ID: 108543 Result: Down-regulated in Transcription
  misc_feature: MA Experiment ID: 108545 Result: Down-regulated in Transcription
  misc_feature: MA Experiment 108545 PARAMETER Experiment Name: Zm_Imbibed_Seeds_P Parameter: Age (day) Value: 3 vs. 2
  misc_feature: MA Experiment 108545 PARAMETER Experiment Name: Zm_Imbibed_Seeds_P Parameter: Organism Value: Zea mays
  misc_feature: MA Experiment 108545 PARAMETER Experiment Name: Zm_Imbibed_Seeds_P Parameter: Plant Line Value: 35A19
  misc_feature: MA Experiment 108545 PARAMETER Experiment Name: Zm_Imbibed_Seeds_P Parameter: Tissue Value: Aerial vs. Embryo
  misc_feature: MA Experiment ID: 108547 Result: Down-regulated in Transcription
  misc_feature: MA Experiment 108547 PARAMETER Experiment Name: Zm_Imbibed_Seeds_P Parameter: Age (day) Value: 4 vs. 2
  misc_feature: MA Experiment 108547 PARAMETER Experiment Name: Zm_Imbibed_Seeds_P Parameter: Organism Value: Zea mays
  misc_feature: MA Experiment 108547 PARAMETER Experiment Name: Zm_Imbibed_Seeds_P Parameter: Plant Line Value: 35A19
  misc_feature: MA Experiment 108547 PARAMETER Experiment Name: Zm_Imbibed_Seeds_P Parameter: Tissue Value: Aerial vs. Embryo
  misc_feature: MA Experiment ID: 20000478 Result: Up-regulated in Transcription
  misc_feature: MA Experiment 20000478 PARAMETER Experiment Name: Zm_5mM_SA_P Parameter: Age (day) Value: 11
  misc_feature: MA Experiment 20000478 PARAMETER Experiment Name: Zm_5mM_SA_P Parameter: Organism Value: Zea mays
  misc_feature: MA Experiment 20000478 PARAMETER Experiment Name: Zm_5mM_SA_P Parameter: Plant Line Value: 35A19
  misc_feature: MA Experiment 20000478 PARAMETER Experiment Name: Zm_5mM_SA_P Parameter: Timepoint (hr) Value: 72
  misc_feature: MA Experiment 20000478 PARAMETER Experiment Name: Zm_5mM_SA_P Parameter: Tissue Value: Aerial
  misc_feature: MA Experiment 20000478 PARAMETER Experiment Name: Zm_5mM_SA_P Parameter: Treatment Value: 5mM SA vs. No Treatment
  misc_feature: MA Experiment ID: 20000535 Result: Up-regulated in Transcription
  misc_feature: MA Experiment 20000535 PARAMETER Experiment Name: Zm_Hybrid_Seed_Dev_P Parameter: DAP Value: 30 vs. 12
  misc_feature: MA Experiment 20000535 PARAMETER Experiment Name: Zm_Hybrid_Seed_Dev_P Parameter: Organism Value: Zea mays
  misc_feature: MA Experiment 20000535 PARAMETER Experiment Name: Zm_Hybrid_Seed_Dev_P Parameter: Plant Line Value: 35A19
  misc_feature: MA Experiment 20000535 PARAMETER Experiment Name: Zm_Hybrid_Seed_Dev_P Parameter: Tissue Value: Embryo vs. Unfert Floret
accacacacgcgcgcagctgtggcgcagggggggcgcggcaatggacgccaacactctcctcctgccctgctccgacggcgccgtcgccggcgcggtggacttccgcgggcgccccgcgtcccggtccggcaccggccgatggtccgccgcgatgttcgtcctcggggtggagatagcggagaggttcgcgtaccacggggtgtcggcgaacctgatcagctacctgacggggccgctcggggaatccaccgcgggcgcggcggctgcgatcaacgcgtggagcggggtgtcgaccatgctgccgctgctgatggcgtgtgtggccgacgcctggctcgggcggtaccgcaccatcgtcctcgcctccctcctcttcgtcgtgagcatgggcatgctgaccgtctccgcgctcccggcgttccaccacgacggctgcagcagctacgcctccgcctccagaccgctggcctgctccccgccccccgtgcaagtgggcgtcttctacgtctccctgtacctggtggcgctcgcggaggccgggcacaagccctgcgcgcaggcgttcggcgcggaccagttcgaccagaacgaccccaaggagtccgcgtccaggagctccttcttcaactggtggtacttcggcatgtgctccggcaccgccgtcaccaccctggtgtccagctacatccaggacaacgtcggctggggcctcggcttcggcgtcccctgcctcgtcatgctcttcgcgctcctcatgttcttgctcggtaccaggaattaccgctactacacgtctactgaatcgagcccatttgctcgcctcgccacagctttcgttgcgctcatcaaaggctccaaatcgagacaacatgacggcactcttgcgagcgacgacgccgggcaccgtgaagaagtgaaaggcgtgctgcgcctgttccccatctgggcgacgtgcatcatctacgccgtcatcttctcgcagtcgtccacgttcttcacgaagcaggccgcgacgctggaccggcgggtcggctcgactctgcgcgtgccgccggcggcgctgcagacgttcatcagtgtgaccatcatggccttcatcccggtctacgaccgcgcgttcgtgccccttgcgcggcggcttacgcgcctctcgtccggtatcaccatgctgcagcggatcggcacggggctcgtcctggccctggttgccatggtcgtggcggcgctggtggagatgcggcggctcgccgtggcgagggacgccggtctcgtggaccagcccaaggcggcgctgccgatgagcctgtggtggatggtcccgcagtacgtgctgttcgggctctccgacgtgttcgccatgatcggcctgcaggagttcttctacgaccaggtccccgacgcgctgcgcagcctcgggctggccttctttctcagcatctttcggcgtaggacacttgttcagcagcttcatcatctccgccatcgacggtgccaccaagaagagcggagcgagctggttctccaacaacctcaatcgcgcgcacctcgactacttctactggctgctcgccgggctctgcgccgtggagttggctgctttcatcatcgtctcgcgcgtttacgtgtacaagaagaggatgtctcacgacaataatgctgctgccatgtagatcagtagacgtgacttttaccgtgctgtgaatggcgatacaatatgattgaggtgtagagaaagagaacgaaaaaaccttttgtacgctaaacctggacactaaactgacttttacggacggtcggcaatcggcataatagtgccggtttgtt

SEQ ID NO: 6516 - protein, 550 aa, Zea mays subsp. mays
  peptide (1)..(550): Ceres Seq. ID no. 12367919
  misc_feature (128)..(480): Pfam Name: POT family Pfam Description: POT family
  misc_feature (128)..(480): Homolog of NCBI NO: 34908688 NR Description: P0039A07.25 [Oryza sativa (japonica
  misc_feature (12)..(127): Homolog of NCBI NO: 34908688 NR Description: P0039A07.25 [Oryza sativa (japonica
  misc_feature (28)..(291): Homolog of NCBI NO: 18086410 NR Description: At1g72120/F28P5_2 [Arabidopsis thaliana]
  misc_feature (280)..(489): Homolog of NCBI NO: 18086410 NR Description: At1g72120/F28P5_2 [Arabidopsis thaliana]
  misc_feature (25)..(309): Homolog of NCBI NO: 15219905 NR Description: peptide transporter, putative; protein id: [Arabidopsis thaliana] >gi|25402971|pir||G86358 protein Similar
  misc_feature (25)..(309): Homolog of NCBI NO: 28416707 NR Description: At1g22550 [Arabidopsis thaliana]
  misc_feature (303)..(478): Homolog of NCBI NO: 15219905 NR Description: peptide transporter, putative; protein id: [Arabidopsis thaliana] >gi|25402971|pir||G86358 protein Similar
  misc_feature (303)..(478): Homolog of NCBI NO: 28416707 NR Description: At1g22550 [Arabidopsis thaliana]
  misc_feature (28)..(291): Homolog of NCBI NO: 15218352 NR Description: oligopeptide transporter, putative; protein id: [Arabidopsis thaliana] >gi|25406146|pir||E96744 probable
  misc_feature (280)..(489): Homolog of NCBI NO: 15218352 NR Description: oligopeptide transporter, putative; protein id: [Arabidopsis thaliana] >gi|25406146|pir||E96744 probable
HTRAQLWRRGGAAMDANTLLLPCSDGAVAGAVDFRGRPASRSGTGRWSAAMFVLGVEIAERFAYHGVSANLISYLTGPLGESTAGAAAAINAWSGVSTMLPLLMACVADAWLGRYRTIVLASLLFVVSMGMLTVSALPAFHHDGCSSYASASRPLACSPPPVQVGVFYVSLYLVALAEAGHKPCAQAFGADQFDQNDPKESASRSSFFNWWYFGMCSGTAVTTLVSSYIQDNVGWGLGFGVPCLVMLFALLMFLLGTRNYRYYTSTESSPFARLATAFVALIKGSKSRQHDGTLASDDAGHREEVKGVLRLFPIWATCIIYAVIFSQSSTFFTKQAATLDRRVGSTLRVPPAALQTFISVTIMAFIPVYDRAFVPLARRLTRLSSGITMLQRIGTGLVLALVAMVVAALVEMRRLAVARDAGLVDQPKAALPMSLWWMVPQYVLFGLSDVFAMIGLQEFFYDQVPDALRSLGLAFFLSIFRRRTLVQQLHHLRHRRCHQEERSELVLQQPQSRAPRLLLLAARRALRRGVGCFHHRLARLRVQEEDVSRQ

SEQ ID NO: 6517 - protein, 537 aa, Zea mays subsp. mays
  peptide (1)..(537): Ceres Seq. ID no. 12367920
  misc_feature (115)..(467): Pfam Name: POT family Pfam Description: POT family
  misc_feature (115)..(467): Homolog of NCBI NO: 34908688 NR Description: P0039A07.25 [Oryza sativa (japonica
  misc_feature (1)..(114): Homolog of NCBI NO: 34908688 NR Description: P0039A07.25 [Oryza sativa (japonica
  misc_feature (15)..(278): Homolog of NCBI NO: 18086410 NR Description: At1g72120/F28P5_2 [Arabidopsis thaliana]
  misc_feature (267)..(476): Homolog of NCBI NO: 18086410 NR Description: At1g72120/F28P5_2 [Arabidopsis thaliana]
  misc_feature (12)..(296): Homolog of NCBI NO: 15219905 NR Description: peptide transporter, putative; protein id: [Arabidopsis thaliana] >gi|25402971|pir||G86358 protein Similar
  misc_feature (12)..(296): Homolog of NCBI NO: 28416707 NR Description: At1g22550 [Arabidopsis thaliana]
  misc_feature (290)..(465): Homolog of NCBI NO: 15219905 NR Description: peptide transporter, putative; protein id: [Arabidopsis thaliana] >gi|25402971|pir||G86358 protein Similar
  misc_feature (290)..(465): Homolog of NCBI NO: 28416707 NR Description: At1g22550 [Arabidopsis thaliana]
  misc_feature (15)..(278): Homolog of NCBI NO: 15218352 NR Description: oligopeptide transporter, putative; protein id: [Arabidopsis thaliana] >gi|25406146|pir||E96744 probable
  misc_feature (267)..(476): Homolog of NCBI NO: 15218352 NR Description: oligopeptide transporter, putative; protein id: [Arabidopsis thaliana] >gi|25406146|pir||E96744 probable
MDANTLLLPCSDGAVAGAVDFRGRPASRSGTGRWSAAMFVLGVEIAERFAYHGVSANLISYLTGPLGESTAGAAAAINAWSGVSTMLPLLMACVADAWLGRYRTIVLASLLFVVSMGMLTVSALPAFHHDGCSSYASASRPLACSPPPVQVGVFYVSLYLVALAEAGHKPCAQAFGADQFDQNDPKESASRSSFFNWWYFGMCSGTAVTTLVSSYIQDNVGWGLGFGVPCLVMLFALLMFLLGTRNYRYYTSTESSPFARLATAFVALIKGSKSRQHDGTLASDDAGHREEVKGVLRLFPIWATCIIYAVIFSQSSTFFTKQAATLDRRVGSTLRVPPAALQTFISVTIMAFIPVYDRAFVPLARRLTRLSSGITMLQRIGTGLVLALVAMVVAALVEMRRLAVARDAGLVDQPKAALPMSLWWMVPQYVLFGLSDVFAMIGLQEFFYDQVPDALRSLGLAFFLSIFRRRTLVQQLHHLRHRRCHQEERSELVLQQPQSRAPRLLLLAARRALRRGVGCFHHRLARLRVQEEDVSRQ

SEQ ID NO: 6518 - protein, 500 aa, Zea mays subsp. mays
  peptide (1)..(500): Ceres Seq. ID no. 12367921
  misc_feature (78)..(430): Pfam Name: POT family Pfam Description: POT family
  misc_feature (78)..(430): Homolog of NCBI NO: 34908688 NR Description: P0039A07.25 [Oryza sativa (japonica
  misc_feature (1)..(77): Homolog of NCBI NO: 34908688 NR Description: P0039A07.25 [Oryza sativa (japonica
  misc_feature (1)..(241): Homolog of NCBI NO: 18086410 NR Description: At1g72120/F28P5_2 [Arabidopsis thaliana]
  misc_feature (230)..(439): Homolog of NCBI NO: 18086410 NR Description: At1g72120/F28P5_2 [Arabidopsis thaliana]
  misc_feature (1)..(259): Homolog of NCBI NO: 15219905 NR Description: peptide transporter, putative; protein id: [Arabidopsis thaliana] >gi|25402971|pir||G86358 protein Similar
  misc_feature (1)..(259): Homolog of NCBI NO: 28416707 NR Description: At1g22550 [Arabidopsis thaliana]
  misc_feature (253)..(428): Homolog of NCBI NO: 15219905 NR Description: peptide transporter, putative; protein id: [Arabidopsis thaliana] >gi|25402971|pir||G86358 protein Similar
  misc_feature (253)..(428): Homolog of NCBI NO: 28416707 NR Description: At1g22550 [Arabidopsis thaliana]
  misc_feature (1)..(241): Homolog of NCBI NO: 15218352 NR Description: oligopeptide transporter, putative; protein id: [Arabidopsis thaliana] >gi|25406146|pir||E96744 probable
  misc_feature (230)..(439): Homolog of NCBI NO: 15218352 NR Description: oligopeptide transporter, putative; protein id: [Arabidopsis thaliana] >gi|25406146|pir||E96744 probable
MFVLGVEIAERFAYHGVSANLISYLTGPLGESTAGAAAAINAWSGVSTMLPLLMACVADAWLGRYRTIVLASLLFVVSMGMLTVSALPAFHHDGCSSYASASRPLACSPPPVQVGVFYVSLYLVALAEAGHKPCAQAFGADQFDQNDPKESASRSSFFNWWYFGMCSGTAVTTLVSSYIQDNVGWGLGFGVPCLVMLFALLMFLLGTRNYRYYTSTESSPFARLATAFVALIKGSKSRQHDGTLASDDAGHREEVKGVLRLFPIWATCIIYAVIFSQSSTFFTKQAATLDRRVGSTLRVPPAALQTFISVTIMAFIPVYDRAFVPLARRLTRLSSGITMLQRIGTGLVLALVAMVVAALVEMRRLAVARDAGLVDQPKAALPMSLWWMVPQYVLFGLSDVFAMIGLQEFFYDQVPDALRSLGLAFFLSIFRRRTLVQQLHHLRHRRCHQEERSELVLQQPQSRAPRLLLLAARRALRRGVGCFHHRLARLRVQEEDVSRQ

SEQ ID NO: 6519 - DNA, 1338 bp, Zea mays subsp. mays
  misc_feature (1)..(1338): Ceres Seq. ID no. 12349185
  misc_feature: MA Experiment ID: 108556 Result: Down-regulated in Transcription
  misc_feature: MA Experiment 108556 PARAMETER Experiment Name: Zm_Drought_P Parameter: Age (day) Value: 9
  misc_feature: MA Experiment 108556 PARAMETER Experiment Name: Zm_Drought_P Parameter: Organism Value: Zea mays
  misc_feature: MA Experiment 108556 PARAMETER Experiment Name: Zm_Drought_P Parameter: Plant Line Value: 35A19
  misc_feature: MA Experiment 108556 PARAMETER Experiment Name: Zm_Drought_P Parameter: Timepoint (hr) Value: 24
  misc_feature: MA Experiment 108556 PARAMETER Experiment Name: Zm_Drought_P Parameter: Tissue Value: Aerial
  misc_feature: MA Experiment 108556 PARAMETER Experiment Name: Zm_Drought_P Parameter: Treatment Value: Drought vs. No Drought
  misc_feature: MA Experiment ID: 20000480 Result: Down-regulated in Transcription
  misc_feature: MA Experiment 20000480 PARAMETER Experiment Name: Zm_Drought_P Parameter: Age (day) Value: 11
  misc_feature: MA Experiment 20000480 PARAMETER Experiment Name: Zm_Drought_P Parameter: Organism Value: Zea mays
  misc_feature: MA Experiment 20000480 PARAMETER Experiment Name: Zm_Drought_P Parameter: Plant Line Value: 35A19
  misc_feature: MA Experiment 20000480 PARAMETER Experiment Name: Zm_Drought_P Parameter: Timepoint (hr) Value: 72
  misc_feature: MA Experiment 20000480 PARAMETER Experiment Name: Zm_Drought_P Parameter: Tissue Value: Aerial
  misc_feature: MA Experiment 20000480 PARAMETER Experiment Name: Zm_Drought_P Parameter: Treatment Value: Drought vs. No Drought
gacagggtgactccgtgaccgtgagtgcctacccgccgaccgcacgaaccccactcggtcggtcactcccagtctccatctcccactacggcactaccccatccccggtgcggcgccaccttcccggcttccccttccggccttccccctctcgtcacttatggtgcccagccgctcgctgcgcaactactagcgcaccgtcccctcctcagccatggccgcggcgtcgttcgcccgcgccttatgtctccacatgctcctcctcttcctcgtggttggctcggcgcgctgcaagacggtgaagagagacgtgaaagcattgaatgagatcaaatcttcactaggctggagagttgtatactcatgggtcggtgatgatccttgtgggcatggtgatctacccccctggtctggtgtgacatgttctcagcaaggggattacagagttgtgacggaactggaagtctatgctgtatcaatagttggccctttcccaacagcagtaactaacctgttggatctaagaagattggatctccacaataacaagttgacaggaccaattcccccacagattggacggttgaaacatctcaggatattgaacctgaggtggaataagcttcaagatgtgcttccacctgaaattggtgaactgaagaaactgacacacttgtatttgagcttcaacaacttcaaaggcgagattccagtggagcttgcaaacctgccagaactccgttacctttatcttcacgagaaccgcttcaccgggcgaatcccccctgaacttggaacgctaaagaacctacgtcacctcgacgtgggcaacaaccacctgacaggcactctcagggattttatcggcaacgggaacggcttcccgtccctgagaaatctataccttaacaacaatgagctgactggtgtgctgccagaccagattgcaaacctgacaaaccttgagattctgcacttgtccaataacaagatgatcgggtcgatatcgcctaagctagttcacattccaaggctgatctacttgtacttggacaataacaacttcattgggaggataccggaagggttgtacaggcatccatttctgaaggagctgtacatcgaaggaaaccacttcagaccaggaaccagatcgaagggaacgcacaaggtgctggaactgcctgacgccgacattctagtctagcaagctcgtttaggggacctgaggtcttggcgtcctgcagtagtagactgctgccggtaccaggatcacttctgtctgtcgctgtactattccgtggcaaaactacagttgagaaaaaaaaattctctttg

SEQ ID NO: 6520 - protein, 330 aa, Zea mays subsp. mays
  peptide (1)..(330): Ceres Seq. ID no. 12349186
  misc_feature (102)..(125): Pfam Name: Leucine Rich Repeat Pfam Description: Leucine Rich Repeat
  misc_feature (4)..(330): Homolog of NCBI NO: 14626935 NR Description: leucine-rich repeat resistance protein-like
  misc_feature (12)..(330): Homolog of NCBI NO: 9757845 NR Description: leucine-rich repeat disease resistance
  misc_feature (1)..(330): Homolog of NCBI NO: 15222979 NR Description: disease resistance protein, putative; protein id: [Arabidopsis thaliana] >gi|26450219|dbj|BAC42228.1| putative
  misc_feature (5)..(330): Homolog of NCBI NO: 25402771 NR Description: protein F16A14.12 [imported] - Arabidopsis >gi|8778389|gb|AAF79397.1|AC068197_7 F16A14.12 [Arabidopsis
  misc_feature (131)..(330): Homolog of NCBI NO: 15240186 NR Description: Cf-5 disease resistance protein - like; protein
  misc_feature (12)..(308): Homolog of NCBI NO: 15240186 NR Description: Cf-5 disease resistance protein - like; protein
  misc_feature (32)..(325): Homolog of NCBI NO: 7489446 NR Description: protein kinase Xa21 (EC 2.7.1.-) D, receptor type
  misc_feature (10)..(308): Homolog of NCBI NO: 34895840 NR Description: putative protein kinase Xa21 [Oryza sativa
  misc_feature (13)..(308): Homolog of NCBI NO: 34895902 NR Description: putative protein kinase Xa21 [Oryza sativa
  misc_feature (66)..(322): Homolog of NCBI NO: 3894383 NR Description: disease resistance protein [Lycopersicon
MAAASFARALCLHMLLLFLVVGSARCKTVKRDVKALNEIKSSLGWRVVYSWVGDDPCGHGDLPPWSGVTCSQQGDYRVVTELEVYAVSIVGPFPTAVTNLLDLRRLDLHNNKLTGPIPPQIGRLKHLRILNLRWNKLQDVLPPEIGELKKLTHLYLSFNNFKGEIPVELANLPELRYLYLHENRFTGRIPPELGTLKNLRHLDVGNNHLTGTLRDFIGNGNGFPSLRNLYLNNNELTGVLPDQIANLTNLEILHLSNNKMIGSISPKLVHIPRLIYLYLDNNNFIGRIPEGLYRHPFLKELYIEGNHFRPGTRSKGTHKVLELPDADILV

SEQ ID NO: 6521 - protein, 317 aa, Zea mays subsp. mays
  peptide (1)..(317): Ceres Seq. ID no. 12349187
  misc_feature (89)..(112): Pfam Name: Leucine Rich Repeat Pfam Description: Leucine Rich Repeat
  misc_feature (1)..(317): Homolog of NCBI NO: 14626935 NR Description: leucine-rich repeat resistance protein-like
  misc_feature (1)..(317): Homolog of NCBI NO: 9757845 NR Description: leucine-rich repeat disease resistance
  misc_feature (1)..(317): Homolog of NCBI NO: 15222979 NR Description: disease resistance protein, putative; protein id: [Arabidopsis thaliana] >gi|26450219|dbj|BAC42228.1| putative
  misc_feature (1)..(317): Homolog of NCBI NO: 25402771 NR Description: protein F16A14.12 [imported] - Arabidopsis >gi|8778389|gb|AAF79397.1|AC068197_7 F16A14.12 [Arabidopsis
  misc_feature (118)..(317): Homolog of NCBI NO: 15240186 NR Description: Cf-5 disease resistance protein - like; protein
  misc_feature (1)..(295): Homolog of NCBI NO: 15240186 NR Description: Cf-5 disease resistance protein - like; protein
  misc_feature (19)..(312): Homolog of NCBI NO: 7489446 NR Description: protein kinase Xa21 (EC 2.7.1.-) D, receptor type
  misc_feature (1)..(295): Homolog of NCBI NO: 34895840 NR Description: putative protein kinase Xa21 [Oryza sativa
  misc_feature (1)..(295): Homolog of NCBI NO: 34895902 NR Description: putative protein kinase Xa21 [Oryza sativa
  misc_feature (53)..(309): Homolog of NCBI NO: 3894383 NR Description: disease resistance protein [Lycopersicon
MLLLFLVVGSARCKTVKRDVKALNEIKSSLGWRVVYSWVGDDPCGHGDLPPWSGVTCSQQGDYRVVTELEVYAVSIVGPFPTAVTNLLDLRRLDLHNNKLTGPIPPQIGRLKHLRILNLRWNKLQDVLPPEIGELKKLTHLYLSFNNFKGEIPVELANLPELRYLYLHENRFTGRIPPELGTLKNLRHLDVGNNHLTGTLRDFIGNGNGFPSLRNLYLNNNELTGVLPDQIANLTNLEILHLSNNKMIGSISPKLVHIPRLIYLYLDNNNFIGRIPEGLYRHPFLKELYIEGNHFRPGTRSKGTHKVLELPDADILV

SEQ ID NO: 6522 - DNA, 2059 bp, Zea mays subsp. mays
  misc_feature (1)..(2059): Ceres Seq. ID no. 12365570
  misc_feature: MA Experiment ID: 108529 Result: Up-regulated in Transcription
  misc_feature: MA Experiment 108529 PARAMETER Experiment Name: Zm_Imbibed_Seeds_P Parameter: Age (day) Value: 5 vs. 2
  misc_feature: MA Experiment 108529 PARAMETER Experiment Name: Zm_Imbibed_Seeds_P Parameter: Organism Value: Zea mays
  misc_feature: MA Experiment 108529 PARAMETER Experiment Name: Zm_Imbibed_Seeds_P Parameter: Plant Line Value: 35A19
  misc_feature: MA Experiment 108529 PARAMETER Experiment Name: Zm_Imbibed_Seeds_P Parameter: Tissue Value: Roots vs. Embryo
  misc_feature: MA Experiment ID: 20000108 Result: Down-regulated in Transcription
  misc_feature: MA Experiment 20000108 PARAMETER Experiment Name: Zm_Root-Tips_P Parameter: Age (day) Value: 12
  misc_feature: MA Experiment 20000108 PARAMETER Experiment Name: Zm_Root-Tips_P Parameter: Organism Value: Zea mays
  misc_feature: MA Experiment 20000108 PARAMETER Experiment Name: Zm_Root-Tips_P Parameter: Tissue Value: Root tips vs. Root mid region    35
  misc_feature: MA Experiment 20000108 PARAMETER Experiment Name: Zm_Root-Tips_P Parameter: Tissue Value: Root tips vs. Root mid region   Sequence Listing-Misc Features (4)
  misc_feature: MA Experiment ID: 20000488 Result: Down-regulated in Transcription
  misc_feature: MA Experiment 20000488 PARAMETER Experiment Name: Zm_50mM_NH4NO3_L_to_H_P Parameter: Organism Value: Zea mays
  misc_feature: MA Experiment 20000488 PARAMETER Experiment Name: Zm_50mM_NH4NO3_L_to_H_P Parameter: Timepoint (hr) Value: 8
  misc_feature: MA Experiment 20000488 PARAMETER Experiment Name: Zm_50mM_NH4NO3_L_to_H_P Parameter: Tissue Value: Leaves
  misc_feature: MA Experiment 20000488 PARAMETER Experiment Name: Zm_50mM_NH4NO3_L_to_H_P Parameter: Treatment Value: 50mM NH4NO3 vs. 100mM Mannitol
  misc_feature: MA Experiment ID: 20000535 Result: Down-regulated in Transcription
  misc_feature: MA Experiment 20000535 PARAMETER Experiment Name: Zm_Hybrid_Seed_Dev_P Parameter: DAP Value: 30 vs. 12
  misc_feature: MA Experiment 20000535 PARAMETER Experiment Name: Zm_Hybrid_Seed_Dev_P Parameter: Organism Value: Zea mays
  misc_feature: MA Experiment 20000535 PARAMETER Experiment Name: Zm_Hybrid_Seed_Dev_P Parameter: Plant Line Value: 35A19
  misc_feature: MA Experiment 20000535 PARAMETER Experiment Name: Zm_Hybrid_Seed_Dev_P Parameter: Tissue Value: Embryo vs. Unfert Floret
  misc_feature: MA Experiment ID: 20001608 Result: Down-regulated in Transcription
  misc_feature: MA Experiment 20001608 PARAMETER Experiment Name: Zm_50ppm_KNO3_L-to-H_P Parameter: Age (day) Value: 21
  misc_feature: MA Experiment 20001608 PARAMETER Experiment Name: Zm_50ppm_KNO3_L-to-H_P Parameter: Organism Value: Zea mays
  misc_feature: MA Experiment 20001608 PARAMETER Experiment Name: Zm_50ppm_KNO3_L-to-H_P Parameter: Plant Line Value: 35A19
  misc_feature: MA Experiment 20001608 PARAMETER Experiment Name: Zm_50ppm_KNO3_L-to-H_P Parameter: Timepoint (hr) Value: 48
  misc_feature: MA Experiment 20001608 PARAMETER Experiment Name: Zm_50ppm_KNO3_L-to-H_P Parameter: Tissue Value: Shoots
  misc_feature: MA Experiment 20001608 PARAMETER Experiment Name: Zm_50ppm_KNO3_L-to-H_P Parameter: Treatment Value: 50ppm KNO3 vs. 50ppm KCl
cgtgttcttaggcttcgctgcccctaccgcgtcttcgccgggatcggtccatggccggcgccgagcgcgcggaggcggtcgcgctggaacaagggctcctcgatccggaggaatccaaccaagtagtatacactggagatggatcagtcgacttttctggaaatcctgttgtcaaggaaagaacgggtagatggaaggcatgtccattcatattaggtaatgaatgctgtgaacgactggcctactatggcatctccacaaaccttgttacttacttgacaaaaaaactgcatgctggcaatgcctctgctgctagcagtgtgactacatggtcgggaacttgctacctaactccacttattggagcaatcctggctgatgcatactgggggaggtactggacaatcgcaacattttccacagtatacttcatcgggatgacactgctgactctttcagcatcagttcctatgctcatgcctccatcttgtgaaggatccttttgcccagcagcaagcccttttcagtatactgtcttttttcttggtctttatctgattgccctgggtactggtggaattaagccgtgtgtctcatcctttggagcggatcaatttgatgatacagatccagctgagcgaatccagaagggctctttcttcaattggttttatttttcaataaacattggtgctctcatatcaagcagctttctggtttgggtgcaagacaatgtaggatggggactggggtttggcattccgactgtattcatggggctggcaatcataagcttcttctctggtacatcactttataggttccaaaaaccaggaggtagtccaattacacgagtatgtcaggtgattgttgcctctttgcgcaagtggaatgtgcctgtcccagaggatagctctctcttgtatgagctacctaatggggtatcaacaattgaggggagtcggcaaatagagcacacagatgaactcagatgtttagataaggctgctacagttaccgaagttgatgtgaaaacggctgacttcaacaacccatggcggatatgcactgtcacccaggtggaagaactgaagatactagtaaggatgttccctgtctgggcaacaacaatagtgttttctgctgtatatgctcagatgtcaacaatgtttgtggaaacaagggatggtgcttgacccatccttgggctctttcaagatccctccagcttcactatctactttcgacaccctaagtgtcatcatatgtgtcccgatgtatgattacatcgtggttccgatagccaggagattcactggcaacgagaggggctttacagagttgcagaggatgggtattggcctggtaatttccatcatggctatgtcagtcgccgcagtcctcgaaatcaagcggctagcagttgccagggaagcacacctggtggatcagaatgtcccggtcccactgagcatattctggcaaatccctcagtatttcctgattggtctagcggagattttcacattcattggggcgctcgagttcttctatgaccagtcaccagacgccatgaggagcctctgcagcgcgcttaatcttctcactactgcgtttgggaactatctcagcacgttcattttgacaatggttgcgtactttactacgaggggaggtaaccctgggtggattcctgacaacttgaacgaaggccatcttgattacttcttcttgctcatcgctggcatcagttttctgaacctgattgtttatgtcctctgtgctggcaaatacaagagcaagaaggcagcttgagttgtgaaggccaggggctggatggcgtgctgcgcgccatgttatggtggacacttcagttcaaaatctgtatatatgtttcccgcattaaccaccctagctgaagcaaccatctgcaattgttgcaaagtttatattcttcattgtgctggactaagttgattatacattcgtgcttctactttgtgtatgtatatatctgacctaaagttgctgaacatagacaatttcacttgcctctggc

SEQ ID NO: 6523 - protein, 381 aa, Zea mays subsp. mays
  peptide (1)..(381): Ceres Seq. ID no. 12365571
  misc_feature (116)..(381): Pfam Name: POT family Pfam Description: POT family
  misc_feature (4)..(376): Homolog of NCBI NO: 15076661 NR Description: peptide transporter [Oryza sativa (japonica >gi|15076663|dbj|BAB62327.1| peptide transporter [Oryza sativa
  misc_feature (15)..(381): Homolog of NCBI NO: 4102839 NR Description: LeOPT1 [Lycopersicon esculentum]
  misc_feature (3)..(381): Homolog of NCBI NO: 31088360 NR Description: peptide transporter 1 [Vicia faba]
  misc_feature (1)..(381): Homolog of NCBI NO: 15226861 NR Description: histidine transport protein (PTR2-B); protein id: supported by cDNA: gi_13937184, supported by cDNA: gi_633939
  misc_feature (3)..(381): Homolog of NCBI NO: 6635838 NR Description: amino acid/peptide transporter [Prunus dulcis]
  misc_feature (1)..(381): Homolog of NCBI NO: 1076331 NR Description: histidine transport protein - Arabidopsis thaliana
  misc_feature (12)..(381): Homolog of NCBI NO: 30696666 NR Description: oligopeptide transporter -related [Arabidopsis >gi|16604436|gb|AAL24224.1| At1g62200/F19K23_13 [Arabidopsis
  misc_feature (28)..(381): Homolog of NCBI NO: 25404366 NR Description: hypothetical protein F19K23.13 [imported] - thaliana >gi|2160144|gb|AAB60766.1| Strong similarity to
  misc_feature (26)..(375): Homolog of NCBI NO: 15232435 NR Description: peptide transport - like protein; protein id: supported by cDNA: 117581., supported by cDNA: gi_13430485,
  misc_feature (21)..(375): Homolog of NCBI NO: 15240905 NR Description: oligopeptide transporter - like protein; protein At5g01180.1 [Arabidopsis thaliana] >gi|11358593|pir||T45958
MAGAERAEAVALEQGLLDPEESNQVVYTGDGSVDFSGNPVVKERTGRWKACPFILGNECCERLAYYGISTNLVTYLTKKLHAGNASAASSVTTWSGTCYLTPLIGAILADAYWGRYWTIATFSTVYFIGMTLLTLSASVPMLMPPSCEGSFCPAASPFQYTVFFLGLYLIALGTGGIKPCVSSFGADQFDDTDPAERIQKGSFFNWFYFSINIGALISSSFLVWVQDNVGWGLGFGIPTVFMGLAIISFFSGTSLYRFQKPGGSPITRVCQVIVASLRKWNVPVPEDSSLLYELPNGVSTIEGSRQIEHTDELRCLDKAATVTEVDVKTADFNNPWRICTVTQVEELKILVRMFPVWATTIVFSAVYAQMSTMFVETRDGA

SEQ ID NO: 6524 - protein, 252 aa, Zea mays subsp. mays
  peptide (1)..(252): Ceres Seq. ID no. 12365572
  misc_feature (1)..(252): Pfam Name: POT family Pfam Description: POT family
  misc_feature (1)..(247): Homolog of NCBI NO: 15076661 NR Description: peptide transporter [Oryza sativa (japonica >gi|15076663|dbj|BAB62327.1| peptide transporter [Oryza sativa
  misc_feature (1)..(252): Homolog of NCBI NO: 4102839 NR Description: LeOPT1 [Lycopersicon esculentum]
  misc_feature (1)..(252): Homolog of NCBI NO: 31088360 NR Description: peptide transporter 1 [Vicia faba]
  misc_feature (1)..(252): Homolog of NCBI NO: 15226861 NR Description: histidine transport protein (PTR2-B); protein id: supported by cDNA: gi_13937184, supported by cDNA: gi_633939
  misc_feature (1)..(252): Homolog of NCBI NO: 6635838 NR Description: amino acid/peptide transporter [Prunus dulcis]
  misc_feature (1)..(252): Homolog of NCBI NO: 1076331 NR Description: histidine transport protein - Arabidopsis thaliana
  misc_feature (1)..(252): Homolog of NCBI NO: 30696666 NR Description: oligopeptide transporter -related [Arabidopsis >gi|16604436|gb|AAL24224.1| At1g62200/F19K23_13 [Arabidopsis
  misc_feature (1)..(252): Homolog of NCBI NO: 25404366 NR Description: hypothetical protein F19K23.13 [imported] - thaliana >gi|2160144|gb|AAB60766.1| Strong similarity to
  misc_feature (1)..(246): Homolog of NCBI NO: 15232435 NR Description: peptide transport - like protein; protein id: supported by cDNA: 117581., supported by cDNA: gi_13430485,
  misc_feature (1)..(246): Homolog of NCBI NO: 15240905 NR Description: oligopeptide transporter - like protein; protein At5g01180.1 [Arabidopsis thaliana] >gi|11358593|pir||T45958
MTLLTLSASVPMLMPPSCEGSFCPAASPFQYTVFFLGLYLIALGTGGIKPCVSSFGADQFDDTDPAERIQKGSFFNWFYFSINIGALISSSFLVWVQDNVGWGLGFGIPTVFMGLAIISFFSGTSLYRFQKPGGSPITRVCQVIVASLRKWNVPVPEDSSLLYELPNGVSTIEGSRQIEHTDELRCLDKAATVTEVDVKTADFNNPWRICTVTQVEELKILVRMFPVWATTIVFSAVYAQMSTMFVETRDGA

SEQ ID NO: 6525 - protein, 241 aa, Zea mays subsp. mays
  peptide (1)..(241): Ceres Seq. ID no. 12365573
  misc_feature (1)..(241): Pfam Name: POT family Pfam Description: POT family
  misc_feature (1)..(241): Homolog of NCBI NO: 30696666 NR Description: oligopeptide transporter -related [Arabidopsis >gi|16604436|gb|AAL24224.1| At1g62200/F19K23_13 [Arabidopsis
  misc_feature (1)..(241): Homolog of NCBI NO: 25404366 NR Description: hypothetical protein F19K23.13 [imported] - thaliana >gi|2160144|gb|AAB60766.1| Strong similarity to
  misc_feature (1)..(236): Homolog of NCBI NO: 15076661 NR Description: peptide transporter [Oryza sativa (japonica >gi|15076663|dbj|BAB62327.1| peptide transporter [Oryza sativa
  misc_feature (1)..(241): Homolog of NCBI NO: 31088360 NR Description: peptide transporter 1 [Vicia faba]
  misc_feature (1)..(241): Homolog of NCBI NO: 6635838 NR Description: amino acid/peptide transporter [Prunus dulcis]
  misc_feature (1)..(241): Homolog of NCBI NO: 1076331 NR Description: histidine transport protein - Arabidopsis thaliana
  misc_feature (1)..(241): Homolog of NCBI NO: 15226861 NR Description: histidine transport protein (PTR2-B); protein id: supported by cDNA: gi_13937184, supported by cDNA: gi_633939
  misc_feature (1)..(241): Homolog of NCBI NO: 4102839 NR Description: LeOPT1 [Lycopersicon esculentum]
  misc_feature (1)..(235): Homolog of NCBI NO: 15232435 NR Description: peptide transport - like protein; protein id: supported by cDNA: 117581., supported by cDNA: gi_13430485,
  misc_feature (1)..(235): Homolog of NCBI NO: 15240905 NR Description: oligopeptide transporter - like protein; protein At5g01180.1 [Arabidopsis thaliana] >gi|11358593|pir||T45958
MLMPPSCEGSFCPAASPFQYTVFFLGLYLIALGTGGIKPCVSSFGADQFDDTDPAERIQKGSFFNWFYFSINIGALISSSFLVWVQDNVGWGLGFGIPTVFMGLAIISFFSGTSLYRFQKPGGSPITRVCQVIVASLRKWNVPVPEDSSLLYELPNGVSTIEGSRQIEHTDELRCLDKAATVTEVDVKTADFNNPWRICTVTQVEELKILVRMFPVWATTIVFSAVYAQMSTMFVETRDGA

SEQ ID NO: 6526 - DNA, 1711 bp, Zea mays subsp. mays
  misc_feature (1)..(1711): Ceres Seq. ID no. 12566006
  misc_feature: MA Experiment ID: 108527 Result: Down-regulated in Transcription
  misc_feature: MA Experiment 108527 PARAMETER Experiment Name: Zm_5mM_NO_P Parameter: Age (day) Value: 8
  misc_feature: MA Experiment 108527 PARAMETER Experiment Name: Zm_5mM_NO_P Parameter: Organism Value: Zea mays
  misc_feature: MA Experiment 108527 PARAMETER Experiment Name: Zm_5mM_NO_P Parameter: Plant Line Value: 35A19
  misc_feature: MA Experiment 108527 PARAMETER Experiment Name: Zm_5mM_NO_P Parameter: Timepoint (hr) Value: 6
  misc_feature: MA Experiment 108527 PARAMETER Experiment Name: Zm_5mM_NO_P Parameter: Tissue Value: Aerial
  misc_feature: MA Experiment 108527 PARAMETER Experiment Name: Zm_5mM_NO_P Parameter: Treatment Value: 5mM NO vs. No Treatment
  misc_feature: MA Experiment ID: 108529 Result: Down-regulated in Transcription
  misc_feature: MA Experiment 108529 PARAMETER Experiment Name: Zm_Imbibed_Seeds_P Parameter: Age (day) Value: 5 vs. 2
  misc_feature: MA Experiment 108529 PARAMETER Experiment Name: Zm_Imbibed_Seeds_P Parameter: Organism Value: Zea mays
  misc_feature: MA Experiment 108529 PARAMETER Experiment Name: Zm_Imbibed_Seeds_P Parameter: Plant Line Value: 35A19
  misc_feature: MA Experiment 108529 PARAMETER Experiment Name: Zm_Imbibed_Seeds_P Parameter: Tissue Value: Roots vs. Embryo
  misc_feature: MA Experiment ID: 108536 Result: Down-regulated in Transcription
  misc_feature: MA Experiment 108536 PARAMETER Experiment Name: Zm_Meristem_P Parameter: Age (day) Value: 8
  misc_feature: MA Experiment 108536 PARAMETER Experiment Name: Zm_Meristem_P Parameter: Organism Value: Zea mays
  misc_feature: MA Experiment 108536 PARAMETER Experiment Name: Zm_Meristem_P Parameter: Plant Line Value: 35A19
  misc_feature: MA Experiment 108536 PARAMETER Experiment Name: Zm_Meristem_P Parameter: Tissue Value: Shoot Meristem vs. Above Shoot Meristem
  misc_feature: MA Experiment ID: 108546 Result: Down-regulated in Transcription
  misc_feature: MA Experiment 108546 PARAMETER Experiment Name: Zm_Imbibed_Seeds_P Parameter: Age (day) Value: 3 vs. 2
  misc_feature: MA Experiment 108546 PARAMETER Experiment Name: Zm_Imbibed_Seeds_P Parameter: Organism Value: Zea mays
  misc_feature: MA Experiment 108546 PARAMETER Experiment Name: Zm_Imbibed_Seeds_P Parameter: Plant Line Value: 35A19
  misc_feature: MA Experiment 108546 PARAMETER Experiment Name: Zm_Imbibed_Seeds_P Parameter: Tissue Value: Roots vs. Embryo
  misc_feature: MA Experiment ID: 108556 Result: Down-regulated in Transcription
  misc_feature: MA Experiment 108556 PARAMETER Experiment Name: Zm_Drought_P Parameter: Age (day) Value: 9
  misc_feature: MA Experiment 108556 PARAMETER Experiment Name: Zm_Drought_P Parameter: Organism Value: Zea mays
  misc_feature: MA Experiment 108556 PARAMETER Experiment Name: Zm_Drought_P Parameter: Plant Line Value: 35A19
  misc_feature: MA Experiment 108556 PARAMETER Experiment Name: Zm_Drought_P Parameter: Timepoint (hr) Value: 24
  misc_feature: MA Experiment 108556 PARAMETER Experiment Name: Zm_Drought_P Parameter: Tissue Value: Aerial
  misc_feature: MA Experiment 108556 PARAMETER Experiment Name: Zm_Drought_P Parameter: Treatment Value: Drought vs. No Drought
  misc_feature: MA Experiment ID: 108597 Result: Down-regulated in Transcription
  misc_feature: MA Experiment 108597 PARAMETER Experiment Name: Zm_100uM_ABA_P Parameter: Age (day) Value: 9
  misc_feature: MA Experiment 108597 PARAMETER Experiment Name: Zm_100uM_ABA_P Parameter: Organism Value: Zea mays
  misc_feature: MA Experiment 108597 PARAMETER Experiment Name: Zm_100uM_ABA_P Parameter: Plant Line Value: 35A19
  misc_feature: MA Experiment 108597 PARAMETER Experiment Name: Zm_100uM_ABA_P Parameter: Timepoint (hr) Value: 24
  misc_feature: MA Experiment 108597 PARAMETER Experiment Name: Zm_100uM_ABA_P Parameter: Tissue Value: Aerial
  misc_feature: MA Experiment 108597 PARAMETER Experiment Name: Zm_100uM_ABA_P Parameter: Treatment Value: 100uM ABA vs. No Treatment
  misc_feature: MA Experiment ID: 20000478 Result: Down-regulated in Transcription
  misc_feature: MA Experiment 20000478 PARAMETER Experiment Name: Zm_5mM_SA_P Parameter: Age (day) Value: 11
  misc_feature: MA Experiment 20000478 PARAMETER Experiment Name: Zm_5mM_SA_P Parameter: Organism Value: Zea mays
  misc_feature: MA Experiment 20000478 PARAMETER Experiment Name: Zm_5mM_SA_P Parameter: Plant Line Value: 35A19
  misc_feature: MA Experiment 20000478 PARAMETER Experiment Name: Zm_5mM_SA_P Parameter: Timepoint (hr) Value: 72
  misc_feature: MA Experiment 20000478 PARAMETER Experiment Name: Zm_5mM_SA_P Parameter: Tissue Value: Aerial
  misc_feature: MA Experiment 20000478 PARAMETER Experiment Name: Zm_5mM_SA_P Parameter: Treatment Value: 5mM SA vs. No Treatment
  misc_feature: MA Experiment ID: 20000480 Result: Down-regulated in Transcription
  misc_feature: MA Experiment 20000480 PARAMETER Experiment Name: Zm_Drought_P Parameter: Age (day) Value: 11
  misc_feature: MA Experiment 20000480 PARAMETER Experiment Name: Zm_Drought_P Parameter: Organism Value: Zea mays
  misc_feature: MA Experiment 20000480 PARAMETER Experiment Name: Zm_Drought_P Parameter: Plant Line Value: 35A19
  misc_feature: MA Experiment 20000480 PARAMETER Experiment Name: Zm_Drought_P Parameter: Timepoint (hr) Value: 72
  misc_feature: MA Experiment 20000480 PARAMETER Experiment Name: Zm_Drought_P Parameter: Tissue Value: Aerial
  misc_feature: MA Experiment 20000480 PARAMETER Experiment Name: Zm_Drought_P Parameter: Treatment Value: Drought vs. No Drought
  misc_feature: MA Experiment ID: 20000488 Result: Down-regulated in Transcription
  misc_feature: MA Experiment 20000488 PARAMETER Experiment Name: Zm_50mM_NH4NO3_L_to_H_P Parameter: Organism Value: Zea mays
  misc_feature: MA Experiment 20000488 PARAMETER Experiment Name: Zm_50mM_NH4NO3_L_to_H_P Parameter: Timepoint (hr) Value: 8
  misc_feature: MA Experiment 20000488 PARAMETER Experiment Name: Zm_50mM_NH4NO3_L_to_H_P Parameter: Tissue Value: Leaves
  misc_feature: MA Experiment 20000488 PARAMETER Experiment Name: Zm_50mM_NH4NO3_L_to_H_P Parameter: Treatment Value: 50mM NH4NO3 vs. 100mM Mannitol
aagcaagctgcaaagagaacgcttgttggtagaacaaagtatatgcccccatgacaccgagtccaagcagcaggctcgagcatagctggagaagcccccacatccgcatgggctggatgcccatttcatgaggaggcttgtgagccggagctgggaggaatccaggctgctatggcgccttgccttcccggcgctcctgacggaggtgtttcagttctccatcggtttcgtcaccaccgccttcgttgggcacctcggagaggtggagctcgcggctgtcagcgtcgtggagaacatcttggattcctctgcctatggggtcctgtttggcatgggcagcgcgctggacacgctgagcgggcaggccgtcggcgccgggcagctggacaggctgggcacctacacgcagcagtcgtggatcatctgcggcgccaccgcgctggcgctggcgccggcgtacgccttcgccccgcggctcctgcactcgttcctccaccagcccgaccacgtgtcgcgcgccgccgggccgtacgcccgctgggcgatcccgaggctgttcgcgcacgccgtgaacataccgctcctcatgttcttccaggcccagagcaggatctgggccgtggcggccatctccggcgcggtcctcggcgtgcacgccgcgctcacctacgtcgccgtcacgaggctcgggtacggcctgcccggggccgccgtcgccggggacatctcccactggctcgtcgtcgccgctcagttcgcctacatgaccggcggccgcttccccgacgcgtggaagggcttcaccgtgcgtgcgttcgacaacctcggcgccttcgtcaagctgtcgctcgggtccgccgtcatgatctgcttggagttttggtactacaccacgcttctcgtcctcgtgggtctcctcaaacatggcaaactccaaatcgacatcatgtcagtctgcctcaacttcgagttcttgactgtaatggttgcgctgggcttcagcacagcaatcgggattagagtgtccaacgagctgggtgcaaacaggccgaaggaggcaaagtttgcagtgcttgtggcagtatcaacatccatgttcatgggagcagtctttatgtgcgtcgtcctcatctggaggacgagcctgccaaagctcttcagcgacagcgaagaggtgaaacgtggagcttccaagctggggcatctcctcgctctcaccgtatgcgtcagcagcatctggcctgtgctatcaggcgtggccgtaggagctgggtggcaagtgcgtgtggcgatcataaacgtcggttgctactacctagtgggcattccgatgggtatcctgcttgttcaagctaaaacacggcacaatgggcatatggatgggcatgttgtcaggcacgtttctccaaatgtcaatacttctcgccactatcttcacaacaaagtgggataaacaggccgcgctggcagaagtgagaatggcggagtggggaggaaagaacgagaacctaacactgacggaaacaacacatacagatgatctgatggctcctgtgcaagagaaaatgttggcgaatgatagccagaagaatgtagaattagtgcgcatagattgatcatagagtatattcatttcagctcgagacattatttcattgtttactaggatgatagtatgaatctatttttttataaataatctctccgttcc

SEQ ID NO: 6527 - protein, 441 aa, Zea mays subsp. mays
  peptide (1)..(441): Ceres Seq. ID no. 12566007
  misc_feature (243)..(405): Pfam Name: MatE Pfam Description: MatE
  misc_feature (243)..(405): Pfam Name: MatE Pfam Description: MatE
  misc_feature (4)..(405): Homolog of NCBI NO: 37532026 NR Description: putative membrane protein [Oryza sativa (japonica group)] >gi|22748423|gb|AAN05388.1| putative membrane protein
  misc_feature (1)..(405): Homolog of NCBI NO: 16924114 NR Description: putative multidrug efflux protein [Oryza sativa]
  misc_feature (10)..(406): Homolog of NCBI NO: 15220246 NR Description: unknown protein; protein id: At1g47530.1, by cDNA: gi_16604504 [Arabidopsis thaliana]
  misc_feature (10)..(406): Homolog of NCBI NO: 16604505 NR Description: At1g47530/F16N3_20 [Arabidopsis thaliana]
  misc_feature (1)..(406): Homolog of NCBI NO: 15220701 NR Description: conserved hypothetical protein; protein id:
  misc_feature (1)..(405): Homolog of NCBI NO: 16924114 NR Description: putative multidrug efflux protein [Oryza sativa]
  misc_feature (10)..(406): Homolog of NCBI NO: 16604505 NR Description: At1g47530/F16N3_20 [Arabidopsis thaliana]
  misc_feature (11)..(406): Homolog of NCBI NO: 30686958 NR Description: MATE efflux protein family [Arabidopsis thaliana]
  misc_feature (7)..(337): Homolog of NCBI NO: 34909838 NR Description: P0403C05.27 [Oryza sativa (japonica
  misc_feature (11)..(406): Homolog of NCBI NO: 15240824 NR Description: putative transmembrane protein; protein id: supported by cDNA: gi_13937233 [Arabidopsis thaliana] emb|CAA66809.1~gene_id:F16F17.3~strong similarity to unknown
  misc_feature (11)..(406): Homolog of NCBI NO: 15231577 NR Description: integral membrane protein, putative; protein id: supported by cDNA: gi_16323120 [Arabidopsis thaliana] unknown [Arabidopsis thaliana] >gi|9293938|dbj|BAB01841.1|
  misc_feature (11)..(406): Homolog of NCBI NO: 15222119 NR Description: unknown protein; protein id: At1g12950.1
  misc_feature (1)..(406): Homolog of NCBI NO: 15220701 NR Description: conserved hypothetical protein; protein id:
  misc_feature (10)..(406): Homolog of NCBI NO: 15220246 NR Description: unknown protein; protein id: At1g47530.1, by cDNA: gi_16604504 [Arabidopsis thaliana]
  misc_feature (4)..(405): Homolog of NCBI NO: 37532026 NR Description: putative membrane protein [Oryza sativa (japonica group)] >gi|22748423|gb|AAN05388.1| putative membrane protein
  misc_feature (11)..(406): Homolog of NCBI NO: 15222119 NR Description: unknown protein; protein id: At1g12950.1
  misc_feature (11)..(406): Homolog of NCBI NO: 15231577 NR Description: integral membrane protein, putative; protein id: supported by cDNA: gi_16323120 [Arabidopsis thaliana] unknown [Arabidopsis thaliana] >gi|9293938|dbj|BAB01841.1|
  misc_feature (11)..(406): Homolog of NCBI NO: 15240824 NR Description: putative transmembrane protein; protein id: supported by cDNA: gi_13937233 [Arabidopsis thaliana] emb|CAA66809.1~gene_id:F16F17.3~strong similarity to unknown
  misc_feature (7)..(337): Homolog of NCBI NO: 34909838 NR Description: P0403C05.27 [Oryza sativa (japonica
  misc_feature (11)..(406): Homolog of NCBI NO: 30686958 NR Description: MATE efflux protein family [Arabidopsis thaliana]
MRRLVSRSWEESRLLWRLAFPALLTEVFQFSIGFVTTAFVGHLGEVELAAVSVVENILDSSAYGVLFGMGSALDTLSGQAVGAGQLDRLGTYTQQSWIICGATALALAPAYAFAPRLLHSFLHQPDHVSRAAGPYARWAIPRLFAHAVNIPLLMFFQAQSRIWAVAAISGAVLGVHAALTYVAVTRLGYGLPGAAVAGDISHWLVVAAQFAYMTGGRFPDAWKGFTVRAFDNLGAFVKLSLGSAVMICLEFWYYTTLLVLVGLLKHGKLQIDIMSVCLNFEFLTVMVALGFSTAIGIRVSNELGANRPKEAKFAVLVAVSTSMFMGAVFMCVVLIWRTSLPKLFSDSEEVKRGASKLGHLLALTVCVSSIWPVLSGVAVGAGWQVRVAIINVGCYYLVGIPMGILLVQAKTRHNGHMDGHVVRHVSPNVNTSRHYLHNKVG

SEQ ID NO: 6528 - protein, 373 aa, Zea mays subsp. mays
  peptide (1)..(373): Ceres Seq. ID no. 12566008
  misc_feature (175)..(337): Pfam Name: MatE Pfam Description: MatE
  misc_feature (175)..(337): Pfam Name: MatE Pfam Description: MatE
  misc_feature (1)..(337): Homolog of NCBI NO: 37532026 NR Description: putative membrane protein [Oryza sativa (japonica group)] >gi|22748423|gb|AAN05388.1| putative membrane protein
  misc_feature (1)..(337): Homolog of NCBI NO: 16924114 NR Description: putative multidrug efflux protein [Oryza sativa]
  misc_feature (1)..(338): Homolog of NCBI NO: 15220246 NR Description: unknown protein; protein id: At1g47530.1, by cDNA: gi_16604504 [Arabidopsis thaliana]
  misc_feature (1)..(338): Homolog of NCBI NO: 16604505 NR Description: At1g47530/F16N3_20 [Arabidopsis thaliana]
  misc_feature (1)..(338): Homolog of NCBI NO: 15220701 NR Description: conserved hypothetical protein; protein id:
  misc_feature (1)..(337): Homolog of NCBI NO: 16924114 NR Description: putative multidrug efflux protein [Oryza sativa]
  misc_feature (1)..(338): Homolog of NCBI NO: 16604505 NR Description: At1g47530/F16N3_20 [Arabidopsis thaliana]
  misc_feature (1)..(338): Homolog of NCBI NO: 30686958 NR Description: MATE efflux protein family [Arabidopsis thaliana]
  misc_feature (1)..(269): Homolog of NCBI NO: 34909838 NR Description: P0403C05.27 [Oryza sativa (japonica
  misc_feature (1)..(338): Homolog of NCBI NO: 15240824 NR Description: putative transmembrane protein; protein id: supported by cDNA: gi_13937233 [Arabidopsis thaliana] emb|CAA66809.1~gene_id:F16F17.3~strong similarity to unknown
  misc_feature (1)..(338): Homolog of NCBI NO: 15231577 NR Description: integral membrane protein, putative; protein id: supported by cDNA: gi_16323120 [Arabidopsis thaliana] unknown [Arabidopsis thaliana] >gi|9293938|dbj|BAB01841.1|
  misc_feature (1)..(338): Homolog of NCBI NO: 15222119 NR Description: unknown protein; protein id: At1g12950.1
  misc_feature (1)..(338): Homolog of NCBI NO: 15220701 NR Description: conserved hypothetical protein; protein id:
  misc_feature (1)..(338): Homolog of NCBI NO: 15220246 NR Description: unknown protein; protein id: At1g47530.1, by cDNA: gi_16604504 [Arabidopsis thaliana]
  misc_feature (1)..(337): Homolog of NCBI NO: 37532026 NR Description: putative membrane protein [Oryza sativa (japonica group)] >gi|22748423|gb|AAN05388.1| putative membrane protein
  misc_feature (1)..(338): Homolog of NCBI NO: 15222119 NR Description: unknown protein; protein id: At1g12950.1
  misc_feature (1)..(338): Homolog of NCBI NO: 15231577 NR Description: integral membrane protein, putative; protein id: supported by cDNA: gi_16323120 [Arabidopsis thaliana] unknown [Arabidopsis thaliana] >gi|9293938|dbj|BAB01841.1|
  misc_feature (1)..(338): Homolog of NCBI NO: 15240824 NR Description: putative transmembrane protein; protein id: supported by cDNA: gi_13937233 [Arabidopsis thaliana] emb|CAA66809.1~gene_id:F16F17.3~strong similarity to unknown
  misc_feature (1)..(269): Homolog of NCBI NO: 34909838 NR Description: P0403C05.27 [Oryza sativa (japonica
  misc_feature (1)..(338): Homolog of NCBI NO: 30686958 NR Description: MATE efflux protein family [Arabidopsis thaliana]
MGSALDTLSGQAVGAGQLDRLGTYTQQSWIICGATALALAPAYAFAPRLLHSFLHQPDHVSRAAGPYARWAIPRLFAHAVNIPLLMFFQAQSRIWAVAAISGAVLGVHAALTYVAVTRLGYGLPGAAVAGDISHWLVVAAQFAYMTGGRFPDAWKGFTVRAFDNLGAFVKLSLGSAVMICLEFWYYTTLLVLVGLLKHGKLQIDIMSVCLNFEFLTVMVALGFSTAIGIRVSNELGANRPKEAKFAVLVAVSTSMFMGAVFMCVVLIWRTSLPKLFSDSEEVKRGASKLGHLLALTVCVSSIWPVLSGVAVGAGWQVRVAIINVGCYYLVGIPMGILLVQAKTRHNGHMDGHVVRHVSPNVNTSRHYLHNKVG

SEQ ID NO: 6529 - protein, 288 aa, Zea mays subsp. mays
  peptide (1)..(288): Ceres Seq. ID no. 12566009
  misc_feature (90)..(252): Pfam Name: MatE Pfam Description: MatE
  misc_feature (90)..(252): Pfam Name: MatE Pfam Description: MatE
  misc_feature (1)..(252): Homolog of NCBI NO: 37532026 NR Description: putative membrane protein [Oryza sativa (japonica group)] >gi|22748423|gb|AAN05388.1| putative membrane protein
  misc_feature (1)..(252): Homolog of NCBI NO: 16924114 NR Description: putative multidrug efflux protein [Oryza sativa]
  misc_feature (1)..(253): Homolog of NCBI NO: 15220246 NR Description: unknown protein; protein id: At1g47530.1, by cDNA: gi_16604504 [Arabidopsis thaliana]
  misc_feature (1)..(253): Homolog of NCBI NO: 16604505 NR Description: At1g47530/F16N3_20 [Arabidopsis thaliana]
  misc_feature (1)..(253): Homolog of NCBI NO: 15220701 NR Description: conserved hypothetical protein; protein id:
  misc_feature (1)..(252): Homolog of NCBI NO: 16924114 NR Description: putative multidrug efflux protein [Oryza sativa]
  misc_feature (1)..(253): Homolog of NCBI NO: 16604505 NR Description: At1g47530/F16N3_20 [Arabidopsis thaliana]
  misc_feature (1)..(253): Homolog of NCBI NO: 30686958 NR Description: MATE efflux protein family [Arabidopsis thaliana]
  misc_feature (1)..(184): Homolog of NCBI NO: 34909838 NR Description: P0403C05.27 [Oryza sativa (japonica
  misc_feature (1)..(253): Homolog of NCBI NO: 15240824 NR Description: putative transmembrane protein; protein id: supported by cDNA: gi_13937233 [Arabidopsis thaliana] emb|CAA66809.1~gene_id:F16F17.3~strong similarity to unknown
  misc_feature (1)..(253): Homolog of NCBI NO: 15231577 NR Description: integral membrane protein, putative; protein id: supported by cDNA: gi_16323120 [Arabidopsis thaliana] unknown [Arabidopsis thaliana] >gi|9293938|dbj|BAB01841.1|
  misc_feature (1)..(253): Homolog of NCBI NO: 15222119 NR Description: unknown protein; protein id: At1g12950.1
  misc_feature (1)..(253): Homolog of NCBI NO: 15220701 NR Description: conserved hypothetical protein; protein id:
  misc_feature (1)..(253): Homolog of NCBI NO: 15220246 NR Description: unknown protein; protein id: At1g47530.1, by cDNA: gi_16604504 [Arabidopsis thaliana]
  misc_feature (1)..(252): Homolog of NCBI NO: 37532026 NR Description: putative membrane protein [Oryza sativa (japonica group)] >gi|22748423|gb|AAN05388.1| putative membrane protein
  misc_feature (1)..(253): Homolog of NCBI NO: 15222119 NR Description: unknown protein; protein id: At1g12950.1
  misc_feature (1)..(253): Homolog of NCBI NO: 15231577 NR Description: integral membrane protein, putative; protein id: supported by cDNA: gi_16323120 [Arabidopsis thaliana] unknown [Arabidopsis thaliana] >gi|9293938|dbj|BAB01841.1|
  misc_feature (1)..(253): Homolog of NCBI NO: 15240824 NR Description: putative transmembrane protein; protein id: supported by cDNA: gi_13937233 [Arabidopsis thaliana] emb|CAA66809.1~gene_id:F16F17.3~strong similarity to unknown
  misc_feature (1)..(184): Homolog of NCBI NO: 34909838 NR Description: P0403C05.27 [Oryza sativa (japonica
  misc_feature (1)..(253): Homolog of NCBI NO: 30686958 NR Description: MATE efflux protein family [Arabidopsis thaliana]
MFFQAQSRIWAVAAISGAVLGVHAALTYVAVTRLGYGLPGAAVAGDISHWLVVAAQFAYMTGGRFPDAWKGFTVRAFDNLGAFVKLSLGSAVMICLEFWYYTTLLVLVGLLKHGKLQIDIMSVCLNFEFLTVMVALGFSTAIGIRVSNELGANRPKEAKFAVLVAVSTSMFMGAVFMCVVLIWRTSLPKLFSDSEEVKRGASKLGHLLALTVCVSSIWPVLSGVAVGAGWQVRVAIINVGCYYLVGIPMGILLVQAKTRHNGHMDGHVVRHVSPNVNTSRHYLHNKVG

SEQ ID NO: 6530 - DNA, 1655 bp, Zea mays subsp. mays
  misc_feature (1)..(1655): Ceres Seq. ID no. 12352419
  misc_feature: MA Experiment ID: 108527 Result: Down-regulated in Transcription
  misc_feature: MA Experiment 108527 PARAMETER Experiment Name: Zm_5mM_NO_P Parameter: Age (day) Value: 8
  misc_feature: MA Experiment 108527 PARAMETER Experiment Name: Zm_5mM_NO_P Parameter: Organism Value: Zea mays
  misc_feature: MA Experiment 108527 PARAMETER Experiment Name: Zm_5mM_NO_P Parameter: Plant Line Value: 35A19
  misc_feature: MA Experiment 108527 PARAMETER Experiment Name: Zm_5mM_NO_P Parameter: Timepoint (hr) Value: 6
  misc_feature: MA Experiment 108527 PARAMETER Experiment Name: Zm_5mM_NO_P Parameter: Tissue Value: Aerial
  misc_feature: MA Experiment 108527 PARAMETER Experiment Name: Zm_5mM_NO_P Parameter: Treatment Value: 5mM NO vs. No Treatment
gcgtcgtcgtcgtccgattctgtctccctcaggtcgagattcgagagttcccgtgttcgtccatccgcgctgtgaggttctccgatggccgagaagtcacccagctccgcgccgcagggtggttctggtgggaatgaatcattcgataatcttgtaattcaagctccacagcttatgagggaggattacatacagaatgctgtgaagtttctttcacatccgaaagtgaagggttctccagtatttcacaggcgttccttcctggaaaagaaaggccttacaagtgaagaaattgatgaggccttttgtagagttcctgaccctaagccaaatggaacagatgctgtagctgctggtaggcaacaagcaaacaatcccagtcaatctgttgtgctgcaaccttatacagaagttcaaccacaagcagctactgcctctgccactgctggaccaattgttccacatacaaaggcacagttgagctgggtaaacacactccttggtgcaggtctttttcttggtttaggggctagtgctgccataaccctaaagaaattggtcatccctagtctgaaatcttggactcgtagagtcgttgctgaaggagatgaaaatgcaaagagtgaacatacttccaaactttgtgaagaaattagggaagccataaaagtttctgcatcagccttttctgatattgctaaaataaaccaagaagtgcttgcttcaaaagatgaagataggaaggtactcatgaagttaacagaagcattcgagtcacaagaaaatgtgtttaaatcattgagtgagaccttaaatcgtatcagggagaatcagctttcacaacacagcctattggaagagcatgttcagccttcatcatggaacgggccaattgactatcaagggagagcttttcagcaaactaatatgtatgcaacaccaccaaacaacagttttgacacagggaggaactcattcatgccattagctgctgaatcttcttatggaccatttccaggatcctactctgagcgggtgcagaggcctggtggatacggattccagcaacagacaagcagcgaccgattgaatgttgttggcccacggagcagctaccaagggggttcttctaatcaccatgctggtagtaatgccatggatgacccggcagcggttgcagcagaattgcagcgccgctgggttcccccacagccaccaggcgtcatcatgccagaggctgcggccgccatccgacaggccaggtcggttccgaggcagctgccaagcggcgatgggcgcctgggcgctgatgtcccgagacagcctgagcctgccattgccatggcgacaacagagcacgtgaacgttgcccctgaagcacctggcggggagttgccaagcgatggtggtggtgccatgactgctgatgccagcaacggtggtgggagtggagagcagcaggagcaggaagcctcttgagtgaagctttttggacgccctttgatttggttctttgagaggatctagcttgcacctgtacctgtgtgtgtagcatatgcatatgcatctgcataggtttgtgacataatgtgcctcgtgttcgaaactgcagctgtattgtagatatataaactgatcaactttacacgtgtgtt

SEQ ID NO: 6531 - protein, 464 aa, Zea mays subsp. mays
  peptide (1)..(464): Ceres Seq. ID no. 12352420
  misc_feature (31)..(161): Pfam Name: Peroxisomal membrane anchor protein (Pex14p) Pfam Description: Peroxisomal membrane anchor protein (Pex14p)
  misc_feature (24)..(456): Homolog of NCBI NO: 11094252 NR Description: PEX14 [Arabidopsis thaliana]
  misc_feature (24)..(456): Homolog of NCBI NO: 30697742 NR Description: (PEX14) protein [Arabidopsis thaliana] gene_id:MQB2.13~unknown protein [Arabidopsis thaliana]
  misc_feature (24)..(456): Homolog of NCBI NO: 11121113 NR Description: peroxin Pex14 [Arabidopsis thaliana]
  misc_feature (31)..(78): Homolog of NCBI NO: 9945056 NR Description: rice EST D22333 corresponds to a region of the
  misc_feature (110)..(456): Homolog of NCBI NO: 20466350 NR Description: putative protein [Arabidopsis thaliana]
MAEKSPSSAPQGGSGGNESFDNLVIQAPQLMREDYIQNAVKFLSHPKVKGSPVFHRRSFLEKKGLTSEEIDEAFCRVPDPKPNGTDAVAAGRQQANNPSQSVVLQPYTEVQPQAATASATAGPIVPHTKAQLSWVNTLLGAGLFLGLGASAAITLKKLVIPSLKSWTRRVVAEGDENAKSEHTSKLCEEIREAIKVSASAFSDIAKINQEVLASKDEDRKVLMKLTEAFESQENVFKSLSETLNRIRENQLSQHSLLEEHVQPSSWNGPIDYQGRAFQQTNMYATPPNNSFDTGRNSFMPLAAESSYGPFPGSYSERVQRPGGYGFQQQTSSDRLNVVGPRSSYQGGSSNHHAGSNAMDDPAAVAAELQRRWVPPQPPGVIMPEAAAAIRQARSVPRQLPSGDGRLGADVPRQPEPAIAMATTEHVNVAPEAPGGELPSDGGGAMTADASNGGGSGEQQEQEAS

SEQ ID NO: 6532 - protein, 434 aa, Zea mays subsp. mays
  peptide (1)..(434): Ceres Seq. ID no. 12352421
  misc_feature (1)..(131): Pfam Name: Peroxisomal membrane anchor protein (Pex14p) Pfam Description: Peroxisomal membrane anchor protein (Pex14p)
  misc_feature (1)..(426): Homolog of NCBI NO: 11094252 NR Description: PEX14 [Arabidopsis thaliana]
  misc_feature (1)..(426): Homolog of NCBI NO: 30697742 NR Description: (PEX14) protein [Arabidopsis thaliana] gene_id:MQB2.13~unknown protein [Arabidopsis thaliana]
  misc_feature (1)..(426): Homolog of NCBI NO: 11121113 NR Description: peroxin Pex14 [Arabidopsis thaliana]
  misc_feature (1)..(48): Homolog of NCBI NO: 9945056 NR Description: rice EST D22333 corresponds to a region of the
  misc_feature (80)..(426): Homolog of NCBI NO: 20466350 NR Description: putative protein [Arabidopsis thaliana]
MREDYIQNAVKFLSHPKVKGSPVFHRRSFLEKKGLTSEEIDEAFCRVPDPKPNGTDAVAAGRQQANNPSQSVVLQPYTEVQPQAATASATAGPIVPHTKAQLSWVNTLLGAGLFLGLGASAAITLKKLVIPSLKSWTRRVVAEGDENAKSEHTSKLCEEIREAIKVSASAFSDIAKINQEVLASKDEDRKVLMKLTEAFESQENVFKSLSETLNRIRENQLSQHSLLEEHVQPSSWNGPIDYQGRAFQQTNMYATPPNNSFDTGRNSFMPLAAESSYGPFPGSYSERVQRPGGYGFQQQTSSDRLNVVGPRSSYQGGSSNHHAGSNAMDDPAAVAAELQRRWVPPQPPGVIMPEAAAAIRQARSVPRQLPSGDGRLGADVPRQPEPAIAMATTEHVNVAPEAPGGELPSDGGGAMTADASNGGGSGEQQEQEAS

SEQ ID NO: 6533 - protein, 242 aa, Zea mays subsp. mays
  peptide (1)..(242): Ceres Seq. ID no. 12352422
  misc_feature (1)..(234): Homolog of NCBI NO: 11094252 NR Description: PEX14 [Arabidopsis thaliana]
  misc_feature (1)..(234): Homolog of NCBI NO: 30697742 NR Description: (PEX14) protein [Arabidopsis thaliana] gene_id:MQB2.13~unknown protein [Arabidopsis thaliana]
  misc_feature (1)..(234): Homolog of NCBI NO: 11121113 NR Description: peroxin Pex14 [Arabidopsis thaliana]
  misc_feature (1)..(234): Homolog of NCBI NO: 20466350 NR Description: putative protein [Arabidopsis thaliana]
MKLTEAFESQENVFKSLSETLNRIRENQLSQHSLLEEHVQPSSWNGPIDYQGRAFQQTNMYATPPNNSFDTGRNSFMPLAAESSYGPFPGSYSERVQRPGGYGFQQQTSSDRLNVVGPRSSYQGGSSNHHAGSNAMDDPAAVAAELQRRWVPPQPPGVIMPEAAAAIRQARSVPRQLPSGDGRLGADVPRQPEPAIAMATTEHVNVAPEAPGGELPSDGGGAMTADASNGGGSGEQQEQEAS

SEQ ID NO: 6534 - DNA, 1248 bp, Zea mays subsp. mays
  misc_feature (1)..(1248): Ceres Seq. ID no. 12402523
  misc_feature: MA Experiment ID: 108504 Result: Up-regulated in Transcription
  misc_feature: MA Experiment 108504 PARAMETER Experiment Name: Zm_Drought_P Parameter: Age (day) Value: 8
  misc_feature: MA Experiment 108504 PARAMETER Experiment Name: Zm_Drought_P Parameter: Organism Value: Zea mays
  misc_feature: MA Experiment 108504 PARAMETER Experiment Name: Zm_Drought_P Parameter: Plant Line Value: 35A19
  misc_feature: MA Experiment 108504 PARAMETER Experiment Name: Zm_Drought_P Parameter: Timepoint (hr) Value: 12
  misc_feature: MA Experiment 108504 PARAMETER Experiment Name: Zm_Drought_P Parameter: Tissue Value: Aerial
  misc_feature: MA Experiment 108504 PARAMETER Experiment Name: Zm_Drought_P Parameter: Treatment Value: Drought vs. No Drought
  misc_feature: MA Experiment ID: 108529 Result: Up-regulated in Transcription
  misc_feature: MA Experiment 108529 PARAMETER Experiment Name: Zm_Imbibed_Seeds_P Parameter: Age (day) Value: 5 vs. 2
  misc_feature: MA Experiment 108529 PARAMETER Experiment Name: Zm_Imbibed_Seeds_P Parameter: Organism Value: Zea mays
  misc_feature: MA Experiment 108529 PARAMETER Experiment Name: Zm_Imbibed_Seeds_P Parameter: Plant Line Value: 35A19
  misc_feature: MA Experiment 108529 PARAMETER Experiment Name: Zm_Imbibed_Seeds_P Parameter: Tissue Value: Roots vs. Embryo
  misc_feature: MA Experiment ID: 108534 Result: Up-regulated in Transcription
  misc_feature: MA Experiment 108534 PARAMETER Experiment Name: Zm_4deg_Cold_P Parameter: Age (hr) Value: 8
  misc_feature: MA Experiment 108534 PARAMETER Experiment Name: Zm_4deg_Cold_P Parameter: Organism Value: Zea mays
  misc_feature: MA Experiment 108534 PARAMETER Experiment Name: Zm_4deg_Cold_P Parameter: Plant Line Value: 35A19
  misc_feature: MA Experiment 108534 PARAMETER Experiment Name: Zm_4deg_Cold_P Parameter: Temperature (deg C) Value: 4 vs. 22
  misc_feature: MA Experiment 108534 PARAMETER Experiment Name: Zm_4deg_Cold_P Parameter: Timepoint (hr) Value: 6
  misc_feature: MA Experiment 108534 PARAMETER Experiment Name: Zm_4deg_Cold_P Parameter: Tissue Value: Aerial
  misc_feature: MA Experiment ID: 108535 Result: Down-regulated in Transcription
  misc_feature: MA Experiment 108535 PARAMETER Experiment Name: Zm_Meristem_P Parameter: Age (day) Value: 8
  misc_feature: MA Experiment 108535 PARAMETER Experiment Name: Zm_Meristem_P Parameter: Organism Value: Zea mays
  misc_feature: MA Experiment 108535 PARAMETER Experiment Name: Zm_Meristem_P Parameter: Plant Line Value: 35A19
  misc_feature: MA Experiment 108535 PARAMETER Experiment Name: Zm_Meristem_P Parameter: Tissue Value: Root Meristem vs. Above Root Meristem
  misc_feature: MA Experiment ID: 108543 Result: Up-regulated in Transcription
  misc_feature: MA Experiment ID: 108545 Result: Down-regulated in Transcription
  misc_feature: MA Experiment 108545 PARAMETER Experiment Name: Zm_Imbibed_Seeds_P Parameter: Age (day) Value: 3 vs. 2
  misc_feature: MA Experiment 108545 PARAMETER Experiment Name: Zm_Imbibed_Seeds_P Parameter: Organism Value: Zea mays
  misc_feature: MA Experiment 108545 PARAMETER Experiment Name: Zm_Imbibed_Seeds_P Parameter: Plant Line Value: 35A19
  misc_feature: MA Experiment 108545 PARAMETER Experiment Name: Zm_Imbibed_Seeds_P Parameter: Tissue Value: Aerial vs. Embryo
  misc_feature: MA Experiment ID: 108546 Result: Up-regulated in Transcription
  misc_feature: MA Experiment 108546 PARAMETER Experiment Name: Zm_Imbibed_Seeds_P Parameter: Age (day) Value: 3 vs. 2
  misc_feature: MA Experiment 108546 PARAMETER Experiment Name: Zm_Imbibed_Seeds_P Parameter: Organism Value: Zea mays
  misc_feature: MA Experiment 108546 PARAMETER Experiment Name: Zm_Imbibed_Seeds_P Parameter: Plant Line Value: 35A19
  misc_feature: MA Experiment 108546 PARAMETER Experiment Name: Zm_Imbibed_Seeds_P Parameter: Tissue Value: Roots vs. Embryo
  misc_feature: MA Experiment ID: 108689 Result: Up-regulated in Transcription
  misc_feature: MA Experiment 108689 PARAMETER Experiment Name: Zm_Drought_Roots_P Parameter: Age (day) Value: 9
  misc_feature: MA Experiment 108689 PARAMETER Experiment Name: Zm_Drought_Roots_P Parameter: Organism Value: Zea mays
  misc_feature: MA Experiment 108689 PARAMETER Experiment Name: Zm_Drought_Roots_P Parameter: Plant Line Value: 35A19
  misc_feature: MA Experiment 108689 PARAMETER Experiment Name: Zm_Drought_Roots_P Parameter: Timepoint (hr) Value: 24
  misc_feature: MA Experiment 108689 PARAMETER Experiment Name: Zm_Drought_Roots_P Parameter: Tissue Value: Roots
  misc_feature: MA Experiment 108689 PARAMETER Experiment Name: Zm_Drought_Roots_P Parameter: Treatment Value: Drought vs. No Drought
  misc_feature: MA Experiment ID: 20000534 Result: Down-regulated in Transcription
  misc_feature: MA Experiment 20000534 PARAMETER Experiment Name: Zm_Hybrid_Pollen_P Parameter: Age (day) Value: 8
  misc_feature: MA Experiment 20000534 PARAMETER Experiment Name: Zm_Hybrid_Pollen_P Parameter: Organism Value: Zea mays
  misc_feature: MA Experiment 20000534 PARAMETER Experiment Name: Zm_Hybrid_Pollen_P Parameter: Plant Line Value: 35A19
  misc_feature: MA Experiment 20000534 PARAMETER Experiment Name: Zm_Hybrid_Pollen_P Parameter: Tissue Value: Pollen vs. Aerial
aagcataccagagcacacacagaacganncctcgatcgctcatagtctcctctgctccggtttcgttggagatccaggcaatggccgacgaatgcagcaactcaccagggccttctcaggccttggcgggctcggcgtggacgagccggcgatggtgtcggcgctggcacggtggcgcgggcagcccgagaagcggtccgcgttccgcaggggattcccgggcttcttcagcagccacggcggcgacatggaccggcgcgaggaggagtacatgctgcacctggccgccgagttcgcgcggttcagggacctggtggtgctgtgggcgacgcacccgtgggancgcgacgccggnctggcgcaccacgtcctgcaccaccaccaccaccacccgcccgccgtcgtcgtggaggtcgcctgcgcgcggtccgccgacgagctgctgggcgcgcgccgggcgtaccaggcgctcttccaccgctccctcgaggaggacgtcgcgcaccgcgcccgggacaagccctactgcagcctgctggtcgggctggtgagcgcgtacaggtacgagggcccgcgggtggacaaggaggtggcgaaggcggaggccgaggcgctgggtgccgccgtgaagcgcgccgggaacgggaagctggtggagaacgacgaggtgctccgcatcctgaccaccaggagcaagccccacctcgtgcagacgttcatgtactacaaggagatgcacngcaggcacntcgaggaggacctgggccaacgcggggaggagaccctgctgggaaaccgtgctctgcctcgtcgcgccgggnccagtacttcagccaggtgattgagggcgcgctgagggacggcgccgaccaccacgggaaggaggccctgacgagggtggcggtgacgcggtcggaccacgacatggacgacatcagagccgcctaccaccagcagttcggggccaagctggaggacgtcatcgcggccaaggcgcacggacactacagggnacgcgctgctctccttggtgggcgccggcaattcatcagtgtgaagcgctgcttcctgctcaggagtcgtcaggcccaataagatgtgcaagagtttctttattacgcactttcgcgaggaaaaaaagtcgcattttccactcgatgaggaaaggttgttgcttgttcttttgcttctcctatgcgtttcgtctatcattgactacaggattcccaataaacatttttaatttct

SEQ ID NO: 6535 - protein, 279 aa, Zea mays subsp. mays
  peptide (1)..(279): Ceres Seq. ID no. 12402524
  misc_feature (198)..(262): Pfam Name: Annexin Pfam Description: Annexin
  misc_feature (31)..(268): Homolog of NCBI NO: 15224946 NR Description: putative annexin; protein id: At2g38750.1, by cDNA: 32721., supported by cDNA: gi_14596094, supported by gi_20148308, supported by cDNA: gi_6503083 [Arabidopsis thaliana]
  misc_feature (50)..(270): Homolog of NCBI NO: 7441506 NR Description: annexin P33 - maize
  misc_feature (33)..(254): Homolog of NCBI NO: 7441511 NR Description: annexin 2 - upland cotton (fragment)
  misc_feature (43)..(258): Homolog of NCBI NO: 21264397 NR Description: Annexin-like protein RJ4
  misc_feature (87)..(258): Homolog of NCBI NO: 1362037 NR Description: annexin homolog RJ4 (clone RJ4) - garden
  misc_feature (32)..(243): Homolog of NCBI NO: 15238105 NR Description: annexin -like protein; protein id: At5g10230.1,
  misc_feature (32)..(263): Homolog of NCBI NO: 4580920 NR Description: vacuole-associated annexin VCaB42 [Nicotiana
  misc_feature (89)..(254): Homolog of NCBI NO: 22326753 NR Description: annexin-like protein; protein id: At5g12380.1
  misc_feature (105)..(254): Homolog of NCBI NO: 14586368 NR Description: annexin-like protein [Arabidopsis thaliana]
  misc_feature (32)..(254): Homolog of NCBI NO: 7441508 NR Description: annexin, isoform P35 - tomato
  misc_feature (9)..(9): Xaa is any aa, unknown or other
  misc_feature (10)..(10): Xaa is any aa, unknown or other
  misc_feature (114)..(114): Xaa is any aa, unknown or other
  misc_feature (118)..(118): Xaa is any aa, unknown or other
  misc_feature (247)..(247): Xaa is any aa, unknown or other
  misc_feature (250)..(250): Xaa is any aa, unknown or other
  misc_feature (274)..(274): Xaa is any aa, unknown or other
SIPEHTQNXXSIAHSLLCSGFVGDPGNGRRMQQLTRAFSGLGGLGVDEPAMVSALARWRGQPEKRSAFRRGFPGFFSSHGGDMDRREEEYMLHLAAEFARFRDLVVLWATHPWXRDAXLAHHVLHHHHHHPPAVVVEVACARSADELLGARRAYQALFHRSLEEDVAHRARDKPYCSLLVGLVSAYRYEGPRVDKEVAKAEAEALGAAVKRAGNGKLVENDEVLRILTTRSKPHLVQTFMYYKEMHXRHXEEDLGQRGEETLLGNRALPRRAGXSTSAR

SEQ ID NO: 6536 - protein, 249 aa, Zea mays subsp. mays
  peptide (1)..(249): Ceres Seq. ID no. 12402525
  misc_feature (168)..(232): Pfam Name: Annexin Pfam Description: Annexin
  misc_feature (1)..(238): Homolog of NCBI NO: 15224946 NR Description: putative annexin; protein id: At2g38750.1, by cDNA: 32721., supported by cDNA: gi_14596094, supported by gi_20148308, supported by cDNA: gi_6503083 [Arabidopsis thaliana]
  misc_feature (20)..(240): Homolog of NCBI NO: 7441506 NR Description: annexin P33 - maize
  misc_feature (3)..(224): Homolog of NCBI NO: 7441511 NR Description: annexin 2 - upland cotton (fragment)
  misc_feature (13)..(228): Homolog of NCBI NO: 21264397 NR Description: Annexin-like protein RJ4
  misc_feature (57)..(228): Homolog of NCBI NO: 1362037 NR Description: annexin homolog RJ4 (clone RJ4) - garden
  misc_feature (2)..(213): Homolog of NCBI NO: 15238105 NR Description: annexin -like protein; protein id: At5g10230.1,
  misc_feature (2)..(233): Homolog of NCBI NO: 4580920 NR Description: vacuole-associated annexin VCaB42 [Nicotiana
  misc_feature (59)..(224): Homolog of NCBI NO: 22326753 NR Description: annexin-like protein; protein id: At5g12380.1
  misc_feature (75)..(224): Homolog of NCBI NO: 14586368 NR Description: annexin-like protein [Arabidopsis thaliana]
  misc_feature (2)..(224): Homolog of NCBI NO: 7441508 NR Description: annexin, isoform P35 - tomato
  misc_feature (84)..(84): Xaa is any aa, unknown or other
  misc_feature (88)..(88): Xaa is any aa, unknown or other
  misc_feature (217)..(217): Xaa is any aa, unknown or other
  misc_feature (220)..(220): Xaa is any aa, unknown or other
  misc_feature (244)..(244): Xaa is any aa, unknown or other
MQQLTRAFSGLGGLGVDEPAMVSALARWRGQPEKRSAFRRGFPGFFSSHGGDMDRREEEYMLHLAAEFARFRDLVVLWATHPWXRDAXLAHHVLHHHHHHPPAVVVEVACARSADELLGARRAYQALFHRSLEEDVAHRARDKPYCSLLVGLVSAYRYEGPRVDKEVAKAEAEALGAAVKRAGNGKLVENDEVLRILTTRSKPHLVQTFMYYKEMHXRHXEEDLGQRGEETLLGNRALPRRAGXSTSAR

SEQ ID NO: 6537 - protein, 229 aa, Zea mays subsp. mays
  peptide (1)..(229): Ceres Seq. ID no. 12402526
  misc_feature (148)..(212): Pfam Name: Annexin Pfam Description: Annexin
  misc_feature (1)..(218): Homolog of NCBI NO: 15224946 NR Description: putative annexin; protein id: At2g38750.1, by cDNA: 32721., supported by cDNA: gi_14596094, supported by gi_20148308, supported by cDNA: gi_6503083 [Arabidopsis thaliana]
  misc_feature (1)..(220): Homolog of NCBI NO: 7441506 NR Description: annexin P33 - maize
  misc_feature (1)..(204): Homolog of NCBI NO: 7441511 NR Description: annexin 2 - upland cotton (fragment)
  misc_feature (1)..(208): Homolog of NCBI NO: 21264397 NR Description: Annexin-like protein RJ4
  misc_feature (37)..(208): Homolog of NCBI NO: 1362037 NR Description: annexin homolog RJ4 (clone RJ4) - garden
  misc_feature (1)..(193): Homolog of NCBI NO: 15238105 NR Description: annexin -like protein; protein id: At5g10230.1,
  misc_feature (1)..(213): Homolog of NCBI NO: 4580920 NR Description: vacuole-associated annexin VCaB42 [Nicotiana
  misc_feature (39)..(204): Homolog of NCBI NO: 22326753 NR Description: annexin-like protein; protein id: At5g12380.1
  misc_feature (55)..(204): Homolog of NCBI NO: 14586368 NR Description: annexin-like protein [Arabidopsis thaliana]
  misc_feature (1)..(204): Homolog of NCBI NO: 7441508 NR Description: annexin, isoform P35 - tomato
  misc_feature (64)..(64): Xaa is any aa, unknown or other
  misc_feature (68)..(68): Xaa is any aa, unknown or other
  misc_feature (197)..(197): Xaa is any aa, unknown or other
  misc_feature (200)..(200): Xaa is any aa, unknown or other
  misc_feature (224)..(224): Xaa is any aa, unknown or other
MVSALARWRGQPEKRSAFRRGFPGFFSSHGGDMDRREEEYMLHLAAEFARFRDLVVLWATHPWXRDAXLAHHVLHHHHHHPPAVVVEVACARSADELLGARRAYQALFHRSLEEDVAHRARDKPYCSLLVGLVSAYRYEGPRVDKEVAKAEAEALGAAVKRAGNGKLVENDEVLRILTTRSKPHLVQTFMYYKEMHXRHXEEDLGQRGEETLLGNRALPRRAGXSTSAR

SEQ ID NO: 6538 - DNA, 1023 bp, Zea mays subsp. mays
  misc_feature (1)..(1023): Ceres Seq. ID no. 12365599
  misc_feature: MA Experiment ID: 108527 Result: Down-regulated in Transcription
  misc_feature: MA Experiment 108527 PARAMETER Experiment Name: Zm_5mM_NO_P Parameter: Age (day) Value: 8
  misc_feature: MA Experiment 108527 PARAMETER Experiment Name: Zm_5mM_NO_P Parameter: Organism Value: Zea mays
  misc_feature: MA Experiment 108527 PARAMETER Experiment Name: Zm_5mM_NO_P Parameter: Plant Line Value: 35A19
  misc_feature: MA Experiment 108527 PARAMETER Experiment Name: Zm_5mM_NO_P Parameter: Timepoint (hr) Value: 6
  misc_feature: MA Experiment 108527 PARAMETER Experiment Name: Zm_5mM_NO_P Parameter: Tissue Value: Aerial
  misc_feature: MA Experiment 108527 PARAMETER Experiment Name: Zm_5mM_NO_P Parameter: Treatment Value: 5mM NO vs. No Treatment
  misc_feature: MA Experiment ID: 108529 Result: Down-regulated in Transcription
  misc_feature: MA Experiment 108529 PARAMETER Experiment Name: Zm_Imbibed_Seeds_P Parameter: Age (day) Value: 5 vs. 2
  misc_feature: MA Experiment 108529 PARAMETER Experiment Name: Zm_Imbibed_Seeds_P Parameter: Organism Value: Zea mays
  misc_feature: MA Experiment 108529 PARAMETER Experiment Name: Zm_Imbibed_Seeds_P Parameter: Plant Line Value: 35A19
  misc_feature: MA Experiment 108529 PARAMETER Experiment Name: Zm_Imbibed_Seeds_P Parameter: Tissue Value: Roots vs. Embryo
  misc_feature: MA Experiment ID: 108545 Result: Up-regulated in Transcription
  misc_feature: MA Experiment 108545 PARAMETER Experiment Name: Zm_Imbibed_Seeds_P Parameter: Age (day) Value: 3 vs. 2
  misc_feature: MA Experiment 108545 PARAMETER Experiment Name: Zm_Imbibed_Seeds_P Parameter: Organism Value: Zea mays
  misc_feature: MA Experiment 108545 PARAMETER Experiment Name: Zm_Imbibed_Seeds_P Parameter: Plant Line Value: 35A19
  misc_feature: MA Experiment 108545 PARAMETER Experiment Name: Zm_Imbibed_Seeds_P Parameter: Tissue Value: Aerial vs. Embryo
  misc_feature: MA Experiment ID: 108546 Result: Down-regulated in Transcription
  misc_feature: MA Experiment 108546 PARAMETER Experiment Name: Zm_Imbibed_Seeds_P Parameter: Age (day) Value: 3 vs. 2
  misc_feature: MA Experiment 108546 PARAMETER Experiment Name: Zm_Imbibed_Seeds_P Parameter: Organism Value: Zea mays
  misc_feature: MA Experiment 108546 PARAMETER Experiment Name: Zm_Imbibed_Seeds_P Parameter: Plant Line Value: 35A19
  misc_feature: MA Experiment 108546 PARAMETER Experiment Name: Zm_Imbibed_Seeds_P Parameter: Tissue Value: Roots vs. Embryo
  misc_feature: MA Experiment ID: 108556 Result: Down-regulated in Transcription
  misc_feature: MA Experiment 108556 PARAMETER Experiment Name: Zm_Drought_P Parameter: Age (day) Value: 9
  misc_feature: MA Experiment 108556 PARAMETER Experiment Name: Zm_Drought_P Parameter: Organism Value: Zea mays
  misc_feature: MA Experiment 108556 PARAMETER Experiment Name: Zm_Drought_P Parameter: Plant Line Value: 35A19
  misc_feature: MA Experiment 108556 PARAMETER Experiment Name: Zm_Drought_P Parameter: Timepoint (hr) Value: 24
  misc_feature: MA Experiment 108556 PARAMETER Experiment Name: Zm_Drought_P Parameter: Tissue Value: Aerial
  misc_feature: MA Experiment 108556 PARAMETER Experiment Name: Zm_Drought_P Parameter: Treatment Value: Drought vs. No Drought
  misc_feature: MA Experiment ID: 108597 Result: Down-regulated in Transcription
  misc_feature: MA Experiment 108597 PARAMETER Experiment Name: Zm_100uM_ABA_P Parameter: Age (day) Value: 9
  misc_feature: MA Experiment 108597 PARAMETER Experiment Name: Zm_100uM_ABA_P Parameter: Organism Value: Zea mays
  misc_feature: MA Experiment 108597 PARAMETER Experiment Name: Zm_100uM_ABA_P Parameter: Plant Line Value: 35A19
  misc_feature: MA Experiment 108597 PARAMETER Experiment Name: Zm_100uM_ABA_P Parameter: Timepoint (hr) Value: 24
  misc_feature: MA Experiment 108597 PARAMETER Experiment Name: Zm_100uM_ABA_P Parameter: Tissue Value: Aerial
  misc_feature: MA Experiment 108597 PARAMETER Experiment Name: Zm_100uM_ABA_P Parameter: Treatment Value: 100uM ABA vs. No Treatment
  misc_feature: MA Experiment ID: 108689 Result: Down-regulated in Transcription
  misc_feature: MA Experiment 108689 PARAMETER Experiment Name: Zm_Drought_Roots_P Parameter: Age (day) Value: 9
  misc_feature: MA Experiment 108689 PARAMETER Experiment Name: Zm_Drought_Roots_P Parameter: Organism Value: Zea mays
  misc_feature: MA Experiment 108689 PARAMETER Experiment Name: Zm_Drought_Roots_P Parameter: Plant Line Value: 35A19
  misc_feature: MA Experiment 108689 PARAMETER Experiment Name: Zm_Drought_Roots_P Parameter: Timepoint (hr) Value: 24
  misc_feature: MA Experiment 108689 PARAMETER Experiment Name: Zm_Drought_Roots_P Parameter: Tissue Value: Roots
  misc_feature: MA Experiment 108689 PARAMETER Experiment Name: Zm_Drought_Roots_P Parameter: Treatment Value: Drought vs. No Drought
  misc_feature: MA Experiment ID: 20000477 Result: Down-regulated in Transcription
  misc_feature: MA Experiment 20000477 PARAMETER Experiment Name: Zm_5mM_SA_P Parameter: Age (day) Value: 10
  misc_feature: MA Experiment 20000477 PARAMETER Experiment Name: Zm_5mM_SA_P Parameter: Organism Value: Zea mays
  misc_feature: MA Experiment 20000477 PARAMETER Experiment Name: Zm_5mM_SA_P Parameter: Plant Line Value: 35A19
  misc_feature: MA Experiment 20000477 PARAMETER Experiment Name: Zm_5mM_SA_P Parameter: Timepoint (hr) Value: 48
  misc_feature: MA Experiment 20000477 PARAMETER Experiment Name: Zm_5mM_SA_P Parameter: Tissue Value: Aerial
  misc_feature: MA Experiment 20000477 PARAMETER Experiment Name: Zm_5mM_SA_P Parameter: Treatment Value: 5mM SA vs. No Treatment
  misc_feature: MA Experiment ID: 20000478 Result: Down-regulated in Transcription
  misc_feature: MA Experiment 20000478 PARAMETER Experiment Name: Zm_5mM_SA_P Parameter: Age (day) Value: 11
  misc_feature: MA Experiment 20000478 PARAMETER Experiment Name: Zm_5mM_SA_P Parameter: Organism Value: Zea mays
  misc_feature: MA Experiment 20000478 PARAMETER Experiment Name: Zm_5mM_SA_P Parameter: Plant Line Value: 35A19
  misc_feature: MA Experiment 20000478 PARAMETER Experiment Name: Zm_5mM_SA_P Parameter: Timepoint (hr) Value: 72
  misc_feature: MA Experiment 20000478 PARAMETER Experiment Name: Zm_5mM_SA_P Parameter: Tissue Value: Aerial
  misc_feature: MA Experiment 20000478 PARAMETER Experiment Name: Zm_5mM_SA_P Parameter: Treatment Value: 5mM SA vs. No Treatment
  misc_feature: MA Experiment ID: 20000480 Result: Down-regulated in Transcription
  misc_feature: MA Experiment 20000480 PARAMETER Experiment Name: Zm_Drought_P Parameter: Age (day) Value: 11
  misc_feature: MA Experiment 20000480 PARAMETER Experiment Name: Zm_Drought_P Parameter: Organism Value: Zea mays
  misc_feature: MA Experiment 20000480 PARAMETER Experiment Name: Zm_Drought_P Parameter: Plant Line Value: 35A19
  misc_feature: MA Experiment 20000480 PARAMETER Experiment Name: Zm_Drought_P Parameter: Timepoint (hr) Value: 72
  misc_feature: MA Experiment 20000480 PARAMETER Experiment Name: Zm_Drought_P Parameter: Tissue Value: Aerial
  misc_feature: MA Experiment 20000480 PARAMETER Experiment Name: Zm_Drought_P Parameter: Treatment Value: Drought vs. No Drought
  misc_feature: MA Experiment ID: 20000492 Result: Down-regulated in Transcription
  misc_feature: MA Experiment 20000492 PARAMETER Experiment Name: Zm_Hybrid_Seed_Dev_P Parameter: DAP Value: 12
  misc_feature: MA Experiment 20000492 PARAMETER Experiment Name: Zm_Hybrid_Seed_Dev_P Parameter: Organism Value: Zea mays
  misc_feature: MA Experiment 20000492 PARAMETER Experiment Name: Zm_Hybrid_Seed_Dev_P Parameter: Plant Line Value: 35A19
  misc_feature: MA Experiment 20000492 PARAMETER Experiment Name: Zm_Hybrid_Seed_Dev_P Parameter: Tissue Value: Fert Kernel vs. Unfert Floret
  misc_feature: MA Experiment ID: 20000532 Result: Down-regulated in Transcription
  misc_feature: MA Experiment 20000532 PARAMETER Experiment Name: Zm_0.001percent_MeJA_P Parameter: Age (day) Value: 10
  misc_feature: MA Experiment 20000532 PARAMETER Experiment Name: Zm_0.001percent_MeJA_P Parameter: Organism Value: Zea mays
  misc_feature: MA Experiment 20000532 PARAMETER Experiment Name: Zm_0.001percent_MeJA_P Parameter: Plant Line Value: 35A19
  misc_feature: MA Experiment 20000532 PARAMETER Experiment Name: Zm_0.001percent_MeJA_P Parameter: Timepoint (hr) Value: 48
  misc_feature: MA Experiment 20000532 PARAMETER Experiment Name: Zm_0.001percent_MeJA_P Parameter: Tissue Value: Aerial
  misc_feature: MA Experiment 20000532 PARAMETER Experiment Name: Zm_0.001percent_MeJA_P Parameter: Treatment Value: 0.001percent MeJA vs. No Treatment
  misc_feature: MA Experiment ID: 20000535 Result: Down-regulated in Transcription
  misc_feature: MA Experiment 20000535 PARAMETER Experiment Name: Zm_Hybrid_Seed_Dev_P Parameter: DAP Value: 30 vs. 12
  misc_feature: MA Experiment 20000535 PARAMETER Experiment Name: Zm_Hybrid_Seed_Dev_P Parameter: Organism Value: Zea mays
  misc_feature: MA Experiment 20000535 PARAMETER Experiment Name: Zm_Hybrid_Seed_Dev_P Parameter: Plant Line Value: 35A19
  misc_feature: MA Experiment 20000535 PARAMETER Experiment Name: Zm_Hybrid_Seed_Dev_P Parameter: Tissue Value: Embryo vs. Unfert Floret
  misc_feature: MA Experiment ID: 20000626 Result: Down-regulated in Transcription
  misc_feature: MA Experiment 20000626 PARAMETER Experiment Name: Zm_Herbicide-Treatments_P Parameter: Timepoint (hr) Value: 12
  misc_feature: MA Experiment 20000626 PARAMETER Experiment Name: Zm_Herbicide-Treatments_P Parameter: Tissue Value: Aerial
  misc_feature: MA Experiment 20000626 PARAMETER Experiment Name: Zm_Herbicide-Treatments_P Parameter: Treatment Value: Roundup vs. No Treatment
agattacaaaagccattccttcaatcactcaaatccactgtgactccgtgagctccctgcctgctgccctgcactgctgcacactccccgcccagccgcaccagctcagctcagctcagctcagcagtcatggctcgcccctgccgcagcagcagcgccgctgcccgcctcctgctgctgctcgccgccgtcgcagcggcgctccaggccgcggccgccgcgccgccggtggccagcggcttcatccgcaaatcctgccgcgcgacgcagtacccgtcggtgtgcgagcagagcctcgcggcgtacggaggctccccgccgccgcggagcccgcgtgagctggcgcgcgccgcgctggcggtgagcgcggaccgcgctcgggcagcgtccgcgtacgtgggccgcctgtgcggctcccggtccggatccggcgacggcagcccccgccgcggcgccggcgcgatgaaggggtcggcggccgcggggtcccgtgcgcgactgtctggagaatctagcggacagcgtgggccacctccgcgacgcggcgcaggagataggcggcgccgggatggcccgcgccgggacgcgcgcgttcaggtggcacctcagcaacgtgcagacctggtgcagcgccgcgctcacggacgagaacacctgcctggacgggctctcgtcccgcgccgtggacgccgccacgcgcgccgccgtccgcggcagggtcgtcgaggtcgcgcaggtcaccagcaacgcgctcgcactcgtcaacaaggtcgggcctgggtactagtagcccagggcggcctgggtgctactactactgcctcctccacgacgttggttgtttctgcctcggcggttaactagttctgttattatcaatgtgtgtgtgtttctttgcatataagtatatgctttgtatctgttgtgtgaggtaatttatatatagttaaggccttaagggcaattagcttgtatattgtattatgggtggcgagaagtacacgaagacggataatccttctt

SEQ ID NO: 6539 - protein, 244 aa, Zea mays subsp. mays
  peptide (1)..(244): Ceres Seq. ID no. 12365600
  misc_feature (10)..(93): Homolog of NCBI NO: 7406663 NR Description: putative ripening-related protein [Vitis vinifera]
  misc_feature (15)..(93): Homolog of NCBI NO: 18407657 NR Description: expressed protein; protein id: At1g62770.1, by cDNA: 93927. [Arabidopsis thaliana]
  misc_feature (15)..(93): Homolog of NCBI NO: 21618013 NR Description: putative ripening-related protein [Arabidopsis
  misc_feature (16)..(93): Homolog of NCBI NO: 112717 NR Description: 21 KD PROTEIN PRECURSOR (1.2 PROTEIN)
  misc_feature (15)..(93): Homolog of NCBI NO: 15241799 NR Description: ripening-related protein - like; protein id: supported by cDNA: 9669., supported by cDNA: gi_14423453,
  misc_feature (15)..(93): Homolog of NCBI NO: 21618088 NR Description: ripening-related protein-like [Arabidopsis
  misc_feature (15)..(93): Homolog of NCBI NO: 18394174 NR Description: expressed protein; protein id: At1g14890.1, by cDNA: 33355., supported by cDNA: gi_17529115 [Arabidopsis
  misc_feature (17)..(93): Homolog of NCBI NO: 15232790 NR Description: putative protein; protein id: At3g47380.1
  misc_feature (38)..(103): Homolog of NCBI NO: 15226321 NR Description: unknown protein; protein id: At2g01610.1
  misc_feature (14)..(105): Homolog of NCBI NO: 37535926 NR Description: putative stress-responsive protein [Oryza sativa
MARPCRSSSAAARLLLLLAAVAAALQAAAAAPPVASGFIRKSCRATQYPSVCEQSLAAYGGSPPPRSPRELARAALAVSADRARAASAYVGRLCGSRSGSGDGSPRRGAGAMKGSAAAGSRARLSGESSGQRGPPPRRGAGDRRRRDGPRRDARVQVAPQQRADLVQRRAHGREHLPGRALVPRRGRRHARRRPRQGRRGRAGHQQRARTRQQGRAWVLVAQGGLGATTTASSTTLVVSASAVN

SEQ ID NO: 6540 - protein, 133 aa, Zea mays subsp. mays
  peptide (1)..(133): Ceres Seq. ID no. 12365601
MKGSAAAGSRARLSGESSGQRGPPPRRGAGDRRRRDGPRRDARVQVAPQQRADLVQRRAHGREHLPGRALVPRRGRRHARRRPRQGRRGRAGHQQRARTRQQGRAWVLVAQGGLGATTTASSTTLVVSASAVN

SEQ ID NO: 6541 - DNA, 1685 bp, Zea mays subsp. mays
  misc_feature (1)..(1685): Ceres Seq. ID no. 12356347
  misc_feature: MA Experiment ID: 108527 Result: Up-regulated in Transcription
  misc_feature: MA Experiment 108527 PARAMETER Experiment Name: Zm_5mM_NO_P Parameter: Age (day) Value: 8
  misc_feature: MA Experiment 108527 PARAMETER Experiment Name: Zm_5mM_NO_P Parameter: Organism Value: Zea mays
  misc_feature: MA Experiment 108527 PARAMETER Experiment Name: Zm_5mM_NO_P Parameter: Plant Line Value: 35A19
  misc_feature: MA Experiment 108527 PARAMETER Experiment Name: Zm_5mM_NO_P Parameter: Timepoint (hr) Value: 6
  misc_feature: MA Experiment 108527 PARAMETER Experiment Name: Zm_5mM_NO_P Parameter: Tissue Value: Aerial
  misc_feature: MA Experiment 108527 PARAMETER Experiment Name: Zm_5mM_NO_P Parameter: Treatment Value: 5mM NO vs. No Treatment
  misc_feature: MA Experiment ID: 108528 Result: Down-regulated in Transcription
  misc_feature: MA Experiment 108528 PARAMETER Experiment Name: Zm_Imbibed_Seeds_P Parameter: Age (day) Value: 5 vs. 2
  misc_feature: MA Experiment 108528 PARAMETER Experiment Name: Zm_Imbibed_Seeds_P Parameter: Organism Value: Zea mays
  misc_feature: MA Experiment 108528 PARAMETER Experiment Name: Zm_Imbibed_Seeds_P Parameter: Plant Line Value: 35A19
  misc_feature: MA Experiment 108528 PARAMETER Experiment Name: Zm_Imbibed_Seeds_P Parameter: Tissue Value: Aerial vs. Embryo
  misc_feature: MA Experiment ID: 108530 Result: Down-regulated in Transcription
  misc_feature: MA Experiment 108530 PARAMETER Experiment Name: Zm_Imbibed_Seeds_P Parameter: Age (day) Value: 6 vs. 2
  misc_feature: MA Experiment 108530 PARAMETER Experiment Name: Zm_Imbibed_Seeds_P Parameter: Organism Value: Zea mays
  misc_feature: MA Experiment 108530 PARAMETER Experiment Name: Zm_Imbibed_Seeds_P Parameter: Plant Line Value: 35A19
  misc_feature: MA Experiment 108530 PARAMETER Experiment Name: Zm_Imbibed_Seeds_P Parameter: Tissue Value: Aerial vs. Embryo
  misc_feature: MA Experiment ID: 108543 Result: Down-regulated in Transcription
  misc_feature: MA Experiment ID: 108544 Result: Down-regulated in Transcription
  misc_feature: MA Experiment ID: 108547 Result: Down-regulated in Transcription
  misc_feature: MA Experiment 108547 PARAMETER Experiment Name: Zm_Imbibed_Seeds_P Parameter: Age (day) Value: 4 vs. 2
  misc_feature: MA Experiment 108547 PARAMETER Experiment Name: Zm_Imbibed_Seeds_P Parameter: Organism Value: Zea mays
  misc_feature: MA Experiment 108547 PARAMETER Experiment Name: Zm_Imbibed_Seeds_P Parameter: Plant Line Value: 35A19
  misc_feature: MA Experiment 108547 PARAMETER Experiment Name: Zm_Imbibed_Seeds_P Parameter: Tissue Value: Aerial vs. Embryo
  misc_feature: MA Experiment ID: 108559 Result: Up-regulated in Transcription
  misc_feature: MA Experiment 108559 PARAMETER Experiment Name: Zm_5mM_NO_P Parameter: Age (day) Value: 8
  misc_feature: MA Experiment 108559 PARAMETER Experiment Name: Zm_5mM_NO_P Parameter: Organism Value: Zea mays
  misc_feature: MA Experiment 108559 PARAMETER Experiment Name: Zm_5mM_NO_P Parameter: Plant Line Value: 35A19
  misc_feature: MA Experiment 108559 PARAMETER Experiment Name: Zm_5mM_NO_P Parameter: Timepoint (hr) Value: 12
  misc_feature: MA Experiment 108559 PARAMETER Experiment Name: Zm_5mM_NO_P Parameter: Tissue Value: Aerial
  misc_feature: MA Experiment 108559 PARAMETER Experiment Name: Zm_5mM_NO_P Parameter: Treatment Value: 5mM NO vs. No Treatment
  misc_feature: MA Experiment ID: 20000480 Result: Down-regulated in Transcription
  misc_feature: MA Experiment 20000480 PARAMETER Experiment Name: Zm_Drought_P Parameter: Age (day) Value: 11
  misc_feature: MA Experiment 20000480 PARAMETER Experiment Name: Zm_Drought_P Parameter: Organism Value: Zea mays
  misc_feature: MA Experiment 20000480 PARAMETER Experiment Name: Zm_Drought_P Parameter: Plant Line Value: 35A19
  misc_feature: MA Experiment 20000480 PARAMETER Experiment Name: Zm_Drought_P Parameter: Timepoint (hr) Value: 72
  misc_feature: MA Experiment 20000480 PARAMETER Experiment Name: Zm_Drought_P Parameter: Tissue Value: Aerial
  misc_feature: MA Experiment 20000480 PARAMETER Experiment Name: Zm_Drought_P Parameter: Treatment Value: Drought vs. No Drought
  misc_feature: MA Experiment ID: 20000487 Result: Down-regulated in Transcription
  misc_feature: MA Experiment 20000487 PARAMETER Experiment Name: Zm_50mM_NH4NO3_L_to_H_P Parameter: Organism Value: Zea mays
  misc_feature: MA Experiment 20000487 PARAMETER Experiment Name: Zm_50mM_NH4NO3_L_to_H_P Parameter: Timepoint (hr) Value: 4
  misc_feature: MA Experiment 20000487 PARAMETER Experiment Name: Zm_50mM_NH4NO3_L_to_H_P Parameter: Tissue Value: Leaves
  misc_feature: MA Experiment 20000487 PARAMETER Experiment Name: Zm_50mM_NH4NO3_L_to_H_P Parameter: Treatment Value: 50mM NH4NO3 vs. 100mM Mannitol
  misc_feature: MA Experiment ID: 20000534 Result: Up-regulated in Transcription
  misc_feature: MA Experiment 20000534 PARAMETER Experiment Name: Zm_Hybrid_Pollen_P Parameter: Age (day) Value: 8
  misc_feature: MA Experiment 20000534 PARAMETER Experiment Name: Zm_Hybrid_Pollen_P Parameter: Organism Value: Zea mays
  misc_feature: MA Experiment 20000534 PARAMETER Experiment Name: Zm_Hybrid_Pollen_P Parameter: Plant Line Value: 35A19
  misc_feature: MA Experiment 20000534 PARAMETER Experiment Name: Zm_Hybrid_Pollen_P Parameter: Tissue Value: Pollen vs. Aerial
  misc_feature: MA Experiment ID: 20000535 Result: Up-regulated in Transcription
  misc_feature: MA Experiment 20000535 PARAMETER Experiment Name: Zm_Hybrid_Seed_Dev_P Parameter: DAP Value: 30 vs. 12
  misc_feature: MA Experiment 20000535 PARAMETER Experiment Name: Zm_Hybrid_Seed_Dev_P Parameter: Organism Value: Zea mays
  misc_feature: MA Experiment 20000535 PARAMETER Experiment Name: Zm_Hybrid_Seed_Dev_P Parameter: Plant Line Value: 35A19
  misc_feature: MA Experiment 20000535 PARAMETER Experiment Name: Zm_Hybrid_Seed_Dev_P Parameter: Tissue Value: Embryo vs. Unfert Floret
accccacaccaaaagaaaccaactaaaatcccaaaagagaggaaaggcacaaacagacggtacaaagaaagggacgctcgtctcgtctcgtcacgtgccgccgccatggctgctctgggccgtggcctgcccctcctcctcctgctcctcctcctcgccgtatcgggggccgccaacgccgcggcggcgcccggcggcatgtccatcatcacctacaacgaggagcacggcgcgcgggggctggagcggacggagccggaggtgcgggccatgtacgacctctggctcgcggagcacggccgcgcctacaacgcgctgggcgagggcgagggcgagcgcgaccgccgcttcctcgtcttctgggacaacctccgcttcgtcgacgcgcacaacgagcgcgccggcgcccgcggcttccgcctcgggatgaaccagttcgccgacctcaccaacgacgagttccgcgccgcgtacctcggcgccatggtccccgccgcccgccggggagccgtcgtgggggagaggtaccgccacgacggcgccgccgaggagctgccggagagcgtcgactggagggagaagggcgccgtcgcgcccgtcaagaaccaggggcaatgcggaagttgctgggctttctctgcagtaagctcagtggaaagcgttaaccagatcgtcaccggtgagatggtgacactgtctgaacaggagctcgtagagtgctcgactgacggagggaacagcggctgcaacggcgggctcatggacgccgctttcgatttcatcataaagaacgggggcatcgataccgaagatgactacccttacagagccgtggacgggaagtgcgacatgaacaggaaaaatgccagggttgtgagcatcgatggctttgaagacgtgcctgagaacgacgagaagtcgctgcagaaggcggttgctcaccagccagttagcgttgccattgaggccggaggccgggagttccagctctacaaatcgggtgtcttcagcggaagctgcaccacgaaccttgaccatggtgtcgtcgcggtcggctacggcgccgagaacgggaaggactactggatcgtccgcaactcgtggggcccgaagtggggcgaggctggttacatccgtatggagaggaacgtcaacgccagcactgggaagtgcgggatcgcgatgatggcgtcctacccgacgaagaagggcgcgaaccctcccaggccgtctccaaccccgccaacaccgccggctgcccctgacaatgtctgcgacgagaacttctcgtgctccgcgggcagcacctgctgctgcgcgtttggcttcaggaacgtctgcttggtctggggctgctgcccggtcgagggcgccacctgctgcaaggatcacgccagctgctgcccgccgggctaccctgtctgcaacgtcagagctggaacttgctcggtgagcaagaacagcccactgagcgtcaaggccttgaagcgcactctcgccaagctgagcaccgcatgaggacctcgatctgggactgcccattgctttttctgactcatgggcgttcagatcaccaagagcaagatttcatagattatctatatgtttgtataagtactattaccgtcccatgaatccgctgtaaataactagtacctctgattaaaaggataatattatttgtc

SEQ ID NO: 6542 - protein, 505 aa, Zea mays subsp. mays
  peptide (1)..(505): Ceres Seq. ID no. 12356348
  misc_feature (185)..(401): Pfam Name: Papain family cysteine protease Pfam Description: Papain family cysteine protease
  misc_feature (50)..(505): Homolog of NCBI NO: 32488398 NR Description: OSJNBa0043A12.28 [Oryza sativa (japonica
  misc_feature (36)..(504): Homolog of NCBI NO: 129232 NR Description: Oryzain beta chain precursor
  misc_feature (62)..(501): Homolog of NCBI NO: 6682829 NR Description: cysteine protease component of protease-inhibitor
  misc_feature (47)..(501): Homolog of NCBI NO: 13897890 NR Description: putative cysteine protease [Ipomoea batatas]
  misc_feature (62)..(501): Homolog of NCBI NO: 7435806 NR Description: cysteine proteinase mir3 (EC 3.4.22.-) - maize
  misc_feature (63)..(501): Homolog of NCBI NO: 129231 NR Description: Oryzain alpha chain precursor
  misc_feature (46)..(501): Homolog of NCBI NO: 7435791 NR Description: cysteine proteinase (EC 3.4.22.-) 3 precursor - bean >gi|2511693|emb|CAB17076.1| cysteine proteinase precursor
  misc_feature (44)..(500): Homolog of NCBI NO: 18422289 NR Description: cysteine proteinase RD21A; protein id:
  misc_feature (67)..(500): Homolog of NCBI NO: 30141019 NR Description: cysteine protease-1 [Helianthus annuus]
  misc_feature (46)..(497): Homolog of NCBI NO: 18401614 NR Description: cysteine proteinase RD21A; protein id: supported by cDNA: gi_14517541, supported by cDNA: gi_18175925, by cDNA: gi_19548038 [Arabidopsis thaliana]
TPHQKKPTKIPKERKGTNRRYKERDARLVSSRAAAMAALGRGLPLLLLLLLLAVSGAANAAAAPGGMSIITYNEEHGARGLERTEPEVRAMYDLWLAEHGRAYNALGEGEGERDRRFLVFWDNLRFVDAHNERAGARGFRLGMNQFADLTNDEFRAAYLGAMVPAARRGAVVGERYRHDGAAEELPESVDWREKGAVAPVKNQGQCGSCWAFSAVSSVESVNQIVTGEMVTLSEQELVECSTDGGNSGCNGGLMDAAFDFIIKNGGIDTEDDYPYRAVDGKCDMNRKNARVVSIDGFEDVPENDEKSLQKAVAHQPVSVAIEAGGREFQLYKSGVFSGSCTTNLDHGVVAVGYGAENGKDYWIVRNSWGPKWGEAGYIRMERNVNASTGKCGIAMMASYPTKKGANPPRPSPTPPTPPAAPDNVCDENFSCSAGSTCCCAFGFRNVCLVWGCCPVEGATCCKDHASCCPPGYPVCNVRAGTCSVSKNSPLSVKALKRTLAKLSTA

SEQ ID NO: 6543 - protein, 470 aa, Zea mays subsp. mays
  peptide (1)..(470): Ceres Seq. ID no. 12356349
  misc_feature (150)..(366): Pfam Name: Papain family cysteine protease Pfam Description: Papain family cysteine protease
  misc_feature (11)..(466): Homolog of NCBI NO: 7435791 NR Description: cysteine proteinase (EC 3.4.22.-) 3 precursor - bean >gi|2511693|emb|CAB17076.1| cysteine proteinase precursor
  misc_feature (9)..(465): Homolog of NCBI NO: 18422289 NR Description: cysteine proteinase RD21A; protein id:
  misc_feature (15)..(470): Homolog of NCBI NO: 32488398 NR Description: OSJNBa0043A12.28 [Oryza sativa (japonica
  misc_feature (27)..(466): Homolog of NCBI NO: 6682829 NR Description: cysteine protease component of protease-inhibitor
  misc_feature (27)..(466): Homolog of NCBI NO: 7435806 NR Description: cysteine proteinase mir3 (EC 3.4.22.-) - maize
  misc_feature (28)..(466): Homolog of NCBI NO: 129231 NR Description: Oryzain alpha chain precursor
  misc_feature (12)..(466): Homolog of NCBI NO: 13897890 NR Description: putative cysteine protease [Ipomoea batatas]
  misc_feature (1)..(469): Homolog of NCBI NO: 129232 NR Description: Oryzain beta chain precursor
  misc_feature (32)..(465): Homolog of NCBI NO: 30141019 NR Description: cysteine protease-1 [Helianthus annuus]
  misc_feature (11)..(462): Homolog of NCBI NO: 18401614 NR Description: cysteine proteinase RD21A; protein id: supported by cDNA: gi_14517541, supported by cDNA: gi_18175925, by cDNA: gi_19548038 [Arabidopsis thaliana]
MAALGRGLPLLLLLLLLAVSGAANAAAAPGGMSIITYNEEHGARGLERTEPEVRAMYDLWLAEHGRAYNALGEGEGERDRRFLVFWDNLRFVDAHNERAGARGFRLGMNQFADLTNDEFRAAYLGAMVPAARRGAVVGERYRHDGAAEELPESVDWREKGAVAPVKNQGQCGSCWAFSAVSSVESVNQIVTGEMVTLSEQELVECSTDGGNSGCNGGLMDAAFDFIIKNGGIDTEDDYPYRAVDGKCDMNRKNARVVSIDGFEDVPENDEKSLQKAVAHQPVSVAIEAGGREFQLYKSGVFSGSCTTNLDHGVVAVGYGAENGKDYWIVRNSWGPKWGEAGYIRMERNVNASTGKCGIAMMASYPTKKGANPPRPSPTPPTPPAAPDNVCDENFSCSAGSTCCCAFGFRNVCLVWGCCPVEGATCCKDHASCCPPGYPVCNVRAGTCSVSKNSPLSVKALKRTLAKLSTA

SEQ ID NO: 6544 - protein, 439 aa, Zea mays subsp. mays
  peptide (1)..(439): Ceres Seq. ID no. 12356350
  misc_feature (119)..(335): Pfam Name: Papain family cysteine protease Pfam Description: Papain family cysteine protease
  misc_feature (1)..(439): Homolog of NCBI NO: 32488398 NR Description: OSJNBa0043A12.28 [Oryza sativa (japonica
  misc_feature (1)..(438): Homolog of NCBI NO: 129232 NR Description: Oryzain beta chain precursor
  misc_feature (1)..(435): Homolog of NCBI NO: 6682829 NR Description: cysteine protease component of protease-inhibitor
  misc_feature (1)..(435): Homolog of NCBI NO: 13897890 NR Description: putative cysteine protease [Ipomoea batatas]
  misc_feature (1)..(435): Homolog of NCBI NO: 7435806 NR Description: cysteine proteinase mir3 (EC 3.4.22.-) - maize
  misc_feature (1)..(435): Homolog of NCBI NO: 129231 NR Description: Oryzain alpha chain precursor
  misc_feature (1)..(435): Homolog of NCBI NO: 7435791 NR Description: cysteine proteinase (EC 3.4.22.-) 3 precursor - bean >gi|2511693|emb|CAB17076.1| cysteine proteinase precursor
  misc_feature (1)..(434): Homolog of NCBI NO: 18422289 NR Description: cysteine proteinase RD21A; protein id:
  misc_feature (1)..(434): Homolog of NCBI NO: 30141019 NR Description: cysteine protease-1 [Helianthus annuus]
  misc_feature (1)..(431): Homolog of NCBI NO: 18401614 NR Description: cysteine proteinase RD21A; protein id: supported by cDNA: gi_14517541, supported by cDNA: gi_18175925, by cDNA: gi_19548038 [Arabidopsis thaliana]
MSIITYNEEHGARGLERTEPEVRAMYDLWLAEHGRAYNALGEGEGERDRRFLVFWDNLRFVDAHNERAGARGFRLGMNQFADLTNDEFRAAYLGAMVPAARRGAVVGERYRHDGAAEELPESVDWREKGAVAPVKNQGQCGSCWAFSAVSSVESVNQIVTGEMVTLSEQELVECSTDGGNSGCNGGLMDAAFDFIIKNGGIDTEDDYPYRAVDGKCDMNRKNARVVSIDGFEDVPENDEKSLQKAVAHQPVSVAIEAGGREFQLYKSGVFSGSCTTNLDHGVVAVGYGAENGKDYWIVRNSWGPKWGEAGYIRMERNVNASTGKCGIAMMASYPTKKGANPPRPSPTPPTPPAAPDNVCDENFSCSAGSTCCCAFGFRNVCLVWGCCPVEGATCCKDHASCCPPGYPVCNVRAGTCSVSKNSPLSVKALKRTLAKLSTA

SEQ ID NO: 6545 - DNA, 1201 bp, Zea mays subsp. mays
  misc_feature (1)..(1201): Ceres Seq. ID no. 12351169
  misc_feature: MA Experiment ID: 108504 Result: Down-regulated in Transcription
  misc_feature: MA Experiment 108504 PARAMETER Experiment Name: Zm_Drought_P Parameter: Age (day) Value: 8
  misc_feature: MA Experiment 108504 PARAMETER Experiment Name: Zm_Drought_P Parameter: Organism Value: Zea mays
  misc_feature: MA Experiment 108504 PARAMETER Experiment Name: Zm_Drought_P Parameter: Plant Line Value: 35A19
  misc_feature: MA Experiment 108504 PARAMETER Experiment Name: Zm_Drought_P Parameter: Timepoint (hr) Value: 12
  misc_feature: MA Experiment 108504 PARAMETER Experiment Name: Zm_Drought_P Parameter: Tissue Value: Aerial
  misc_feature: MA Experiment 108504 PARAMETER Experiment Name: Zm_Drought_P Parameter: Treatment Value: Drought vs. No Drought
  misc_feature: MA Experiment ID: 108527 Result: Down-regulated in Transcription
  misc_feature: MA Experiment 108527 PARAMETER Experiment Name: Zm_5mM_NO_P Parameter: Age (day) Value: 8
  misc_feature: MA Experiment 108527 PARAMETER Experiment Name: Zm_5mM_NO_P Parameter: Organism Value: Zea mays
  misc_feature: MA Experiment 108527 PARAMETER Experiment Name: Zm_5mM_NO_P Parameter: Plant Line Value: 35A19
  misc_feature: MA Experiment 108527 PARAMETER Experiment Name: Zm_5mM_NO_P Parameter: Timepoint (hr) Value: 6
  misc_feature: MA Experiment 108527 PARAMETER Experiment Name: Zm_5mM_NO_P Parameter: Tissue Value: Aerial
  misc_feature: MA Experiment 108527 PARAMETER Experiment Name: Zm_5mM_NO_P Parameter: Treatment Value: 5mM NO vs. No Treatment
  misc_feature: MA Experiment ID: 108529 Result: Down-regulated in Transcription
  misc_feature: MA Experiment 108529 PARAMETER Experiment Name: Zm_Imbibed_Seeds_P Parameter: Age (day) Value: 5 vs. 2
  misc_feature: MA Experiment 108529 PARAMETER Experiment Name: Zm_Imbibed_Seeds_P Parameter: Organism Value: Zea mays
  misc_feature: MA Experiment 108529 PARAMETER Experiment Name: Zm_Imbibed_Seeds_P Parameter: Plant Line Value: 35A19
  misc_feature: MA Experiment 108529 PARAMETER Experiment Name: Zm_Imbibed_Seeds_P Parameter: Tissue Value: Roots vs. Embryo
  misc_feature: MA Experiment ID: 108540 Result: Down-regulated in Transcription
  misc_feature: MA Experiment 108540 PARAMETER Experiment Name: Zm_20percent_PEG_P Parameter: Age (day) Value: 8
  misc_feature: MA Experiment 108540 PARAMETER Experiment Name: Zm_20percent_PEG_P Parameter: Organism Value: Zea mays
  misc_feature: MA Experiment 108540 PARAMETER Experiment Name: Zm_20percent_PEG_P Parameter: Plant Line Value: 35A19
  misc_feature: MA Experiment 108540 PARAMETER Experiment Name: Zm_20percent_PEG_P Parameter: Timepoint (hr) Value: 6
  misc_feature: MA Experiment 108540 PARAMETER Experiment Name: Zm_20percent_PEG_P Parameter: Tissue Value: Aerial
  misc_feature: MA Experiment 108540 PARAMETER Experiment Name: Zm_20percent_PEG_P Parameter: Treatment Value: 20percent PEG vs. No Treatment
  misc_feature: MA Experiment ID: 108544 Result: Down-regulated in Transcription
  misc_feature: MA Experiment ID: 108545 Result: Up-regulated in Transcription
  misc_feature: MA Experiment 108545 PARAMETER Experiment Name: Zm_Imbibed_Seeds_P Parameter: Age (day) Value: 3 vs. 2
  misc_feature: MA Experiment 108545 PARAMETER Experiment Name: Zm_Imbibed_Seeds_P Parameter: Organism Value: Zea mays
  misc_feature: MA Experiment 108545 PARAMETER Experiment Name: Zm_Imbibed_Seeds_P Parameter: Plant Line Value: 35A19
  misc_feature: MA Experiment 108545 PARAMETER Experiment Name: Zm_Imbibed_Seeds_P Parameter: Tissue Value: Aerial vs. Embryo
  misc_feature: MA Experiment ID: 108546 Result: Down-regulated in Transcription
  misc_feature: MA Experiment 108546 PARAMETER Experiment Name: Zm_Imbibed_Seeds_P Parameter: Age (day) Value: 3 vs. 2
  misc_feature: MA Experiment 108546 PARAMETER Experiment Name: Zm_Imbibed_Seeds_P Parameter: Organism Value: Zea mays
  misc_feature: MA Experiment 108546 PARAMETER Experiment Name: Zm_Imbibed_Seeds_P Parameter: Plant Line Value: 35A19
  misc_feature: MA Experiment 108546 PARAMETER Experiment Name: Zm_Imbibed_Seeds_P Parameter: Tissue Value: Roots vs. Embryo
  misc_feature: MA Experiment ID: 108547 Result: Up-regulated in Transcription
  misc_feature: MA Experiment 108547 PARAMETER Experiment Name: Zm_Imbibed_Seeds_P Parameter: Age (day) Value: 4 vs. 2
  misc_feature: MA Experiment 108547 PARAMETER Experiment Name: Zm_Imbibed_Seeds_P Parameter: Organism Value: Zea mays
  misc_feature: MA Experiment 108547 PARAMETER Experiment Name: Zm_Imbibed_Seeds_P Parameter: Plant Line Value: 35A19
  misc_feature: MA Experiment 108547 PARAMETER Experiment Name: Zm_Imbibed_Seeds_P Parameter: Tissue Value: Aerial vs. Embryo
  misc_feature: MA Experiment ID: 20000477 Result: Down-regulated in Transcription
  misc_feature: MA Experiment 20000477 PARAMETER Experiment Name: Zm_5mM_SA_P Parameter: Age (day) Value: 10
  misc_feature: MA Experiment 20000477 PARAMETER Experiment Name: Zm_5mM_SA_P Parameter: Organism Value: Zea mays
  misc_feature: MA Experiment 20000477 PARAMETER Experiment Name: Zm_5mM_SA_P Parameter: Plant Line Value: 35A19
  misc_feature: MA Experiment 20000477 PARAMETER Experiment Name: Zm_5mM_SA_P Parameter: Timepoint (hr) Value: 48
  misc_feature: MA Experiment 20000477 PARAMETER Experiment Name: Zm_5mM_SA_P Parameter: Tissue Value: Aerial
  misc_feature: MA Experiment 20000477 PARAMETER Experiment Name: Zm_5mM_SA_P Parameter: Treatment Value: 5mM SA vs. No Treatment
  misc_feature: MA Experiment ID: 20000478 Result: Down-regulated in Transcription
  misc_feature: MA Experiment 20000478 PARAMETER Experiment Name: Zm_5mM_SA_P Parameter: Age (day) Value: 11
  misc_feature: MA Experiment 20000478 PARAMETER Experiment Name: Zm_5mM_SA_P Parameter: Organism Value: Zea mays
  misc_feature: MA Experiment 20000478 PARAMETER Experiment Name: Zm_5mM_SA_P Parameter: Plant Line Value: 35A19
  misc_feature: MA Experiment 20000478 PARAMETER Experiment Name: Zm_5mM_SA_P Parameter: Timepoint (hr) Value: 72
  misc_feature: MA Experiment 20000478 PARAMETER Experiment Name: Zm_5mM_SA_P Parameter: Tissue Value: Aerial
  misc_feature: MA Experiment 20000478 PARAMETER Experiment Name: Zm_5mM_SA_P Parameter: Treatment Value: 5mM SA vs. No Treatment
  misc_feature: MA Experiment ID: 20000479 Result: Down-regulated in Transcription
  misc_feature: MA Experiment 20000479 PARAMETER Experiment Name: Zm_Drought_P Parameter: Age (day) Value: 10
  misc_feature: MA Experiment 20000479 PARAMETER Experiment Name: Zm_Drought_P Parameter: Organism Value: Zea mays
  misc_feature: MA Experiment 20000479 PARAMETER Experiment Name: Zm_Drought_P Parameter: Plant Line Value: 35A19
  misc_feature: MA Experiment 20000479 PARAMETER Experiment Name: Zm_Drought_P Parameter: Timepoint (hr) Value: 48
  misc_feature: MA Experiment 20000479 PARAMETER Experiment Name: Zm_Drought_P Parameter: Tissue Value: Aerial
  misc_feature: MA Experiment 20000479 PARAMETER Experiment Name: Zm_Drought_P Parameter: Treatment Value: Drought vs. No Drought
  misc_feature: MA Experiment ID: 20000480 Result: Down-regulated in Transcription
  misc_feature: MA Experiment 20000480 PARAMETER Experiment Name: Zm_Drought_P Parameter: Age (day) Value: 11
  misc_feature: MA Experiment 20000480 PARAMETER Experiment Name: Zm_Drought_P Parameter: Organism Value: Zea mays
  misc_feature: MA Experiment 20000480 PARAMETER Experiment Name: Zm_Drought_P Parameter: Plant Line Value: 35A19
  misc_feature: MA Experiment 20000480 PARAMETER Experiment Name: Zm_Drought_P Parameter: Timepoint (hr) Value: 72
  misc_feature: MA Experiment 20000480 PARAMETER Experiment Name: Zm_Drought_P Parameter: Tissue Value: Aerial
  misc_feature: MA Experiment 20000480 PARAMETER Experiment Name: Zm_Drought_P Parameter: Treatment Value: Drought vs. No Drought
  misc_feature: MA Experiment ID: 20000488 Result: Up-regulated in Transcription
  misc_feature: MA Experiment 20000488 PARAMETER Experiment Name: Zm_50mM_NH4NO3_L_to_H_P Parameter: Organism Value: Zea mays
  misc_feature: MA Experiment 20000488 PARAMETER Experiment Name: Zm_50mM_NH4NO3_L_to_H_P Parameter: Timepoint (hr) Value: 8
  misc_feature: MA Experiment 20000488 PARAMETER Experiment Name: Zm_50mM_NH4NO3_L_to_H_P Parameter: Tissue Value: Leaves
  misc_feature: MA Experiment 20000488 PARAMETER Experiment Name: Zm_50mM_NH4NO3_L_to_H_P Parameter: Treatment Value: 50mM NH4NO3 vs. 100mM Mannitol
  misc_feature: MA Experiment ID: 20000492 Result: Up-regulated in Transcription
  misc_feature: MA Experiment 20000492 PARAMETER Experiment Name: Zm_Hybrid_Seed_Dev_P Parameter: DAP Value: 12
  misc_feature: MA Experiment 20000492 PARAMETER Experiment Name: Zm_Hybrid_Seed_Dev_P Parameter: Organism Value: Zea mays
  misc_feature: MA Experiment 20000492 PARAMETER Experiment Name: Zm_Hybrid_Seed_Dev_P Parameter: Plant Line Value: 35A19
  misc_feature: MA Experiment 20000492 PARAMETER Experiment Name: Zm_Hybrid_Seed_Dev_P Parameter: Tissue Value: Fert Kernel vs. Unfert Floret
ccccaaaccccagcaggcatcctctcttcctctcctctccaatctccattgcagcagcactgcagcggcgggtgcgggtggcatggctatggcgtccgcgctgccgctcctcctcgcgccgcgcgccggtctttgcgtccgcggggccgtcttcgcctcatctccgctcccgccgcctcgcgctgcgtctccctccccctccccgacccgccgccctctccgcgccaccagccgccgtgcagccgcgcgaggcccggcgcgtccagccggccccgcgccgcctcctgctgccaagatcccgctccggccgcgggaggaggcgccagggactggcggatgttcttagcatggtacctaatggctctggacaagaacccgattgtgactaaggcggtcacttccgctgccctaactctggccggggacctcatctgtcagctttatcgatcgagttccagaacttgatttgaggagaacatttgtattcacatttttgggccttgcccttgtggggccaactttacatgtctggtacttgtatttgagcaaattagtgacaatcagtgggggcatcaggtgccattgctcgccttatgcttgatcagttcattttctctcccattttcattggcgtctttatgagcttactagtcaccttggagggaaagccctctcttgtggtgccaaagcttaagcaggaatggttatcatcggtgttggcgaattggcaattatggataccatttcagtttttgaatttttacttcgttcctcagaagtttcaggtccttggtgctaattttgtagcccttgcatggaatgtgattttatcatttaaagctcacaaggaagttatcgcgaaataggtatgaaggagcgcagtgaactcccccggtcggtccaggatagggataggcttgtaaattgtcgccatgtgggactggagtggatcattctgatcagtagtcaacacaacactgaatcgatgattgtgatggacatgcctgtgtgatctcttttgtgcatgctacaccaatacgtgtttggccagcatgtatgcctggacatgtgtgttactatttgtgctgtgatgggttgttcgagatctaggaaacacattgggttgttgatatctttaggccctgtgtggaagcgtctattttttttaaagaaactggtttatagaaattgtggtggttct

SEQ ID NO: 6546 - protein, 154 aa, Zea mays subsp. mays
  peptide (1)..(154): Ceres Seq. ID no. 12351170
  misc_feature (106)..(147): Homolog of NCBI NO: 15241166 NR Description: putative protein; protein id: At5g19750.1, by cDNA: 6789., supported by cDNA: gi_16648745 [Arabidopsis
  misc_feature (106)..(147): Homolog of NCBI NO: 16648746 NR Description: AT5g19750/T29J13_170 [Arabidopsis thaliana]
  misc_feature (112)..(147): Homolog of NCBI NO: 21594286 NR Description: unknown [Arabidopsis thaliana]
  misc_feature (115)..(153): Homolog of NCBI NO: 6679577 NR Description: peroxisomal membrane protein 2; peroxisomal protein 2, 22 kDa [Mus musculus] >gi|1172540|sp|P42925|PMP2_MOUSE kDa peroxisomal membrane protein (Peroxisomal membrane protein 2)
  misc_feature (115)..(153): Homolog of NCBI NO: 13928796 NR Description: peroxisomal membrane protein 2; peroxisomal protein 2, 22 kDa [Rattus norvegicus]
  misc_feature (81)..(154): Homolog of NCBI NO: 15226016 NR Description: 22 kDa peroxisomal membrane protein; protein id: [Arabidopsis thaliana] >gi|25411581|pir||C84522 22 kDa
PQTPAGILSSSPLQSPLQQHCSGGCGWHGYGVRAAAPPRAARRSLRPRGRLRLISAPAASRCVSLPLPDPPPSPRHQPPCSRARPGASSRPRAASCCQDPAPAAGGGARDWRMFLAWYLMALDKNPIVTKAVTSAALTLAGDLICQLYRSSSRT

SEQ ID NO: 6547 - protein, 128 aa, Zea mays subsp. mays
  peptide (1)..(128): Ceres Seq. ID no. 12351171
PNPSRHPLFLSSPISIAAALQRRVRVAWLWRPRCRSSSRRAPVFASAGPSSPHLRSRRLALRLPPPPRPAALSAPPAAVQPREARRVQPAPRRLLLPRSRSGRGRRRQGLADVLSMVPNGSGQEPDCD

SEQ ID NO: 6548 - protein, 114 aa, Zea mays subsp. mays
  peptide (1)..(114): Ceres Seq. ID no. 12351172
PKPQQASSLPLLSNLHCSSTAAAGAGGMAMASALPLLLAPRAGLCVRGAVFASSPLPPPRAASPSPSPTRRPLRATSRRAAARGPARPAGPAPPPAAKIPLRPREEAPGTGGCS

SEQ ID NO: 6549 - DNA, 662 bp, Zea mays subsp. mays
  misc_feature (1)..(662): Ceres Seq. ID no. 12372505
  misc_feature: MA Experiment ID: 108535 Result: Down-regulated in Transcription
  misc_feature: MA Experiment 108535 PARAMETER Experiment Name: Zm_Meristem_P Parameter: Age (day) Value: 8
  misc_feature: MA Experiment 108535 PARAMETER Experiment Name: Zm_Meristem_P Parameter: Organism Value: Zea mays
  misc_feature: MA Experiment 108535 PARAMETER Experiment Name: Zm_Meristem_P Parameter: Plant Line Value: 35A19
  misc_feature: MA Experiment 108535 PARAMETER Experiment Name: Zm_Meristem_P Parameter: Tissue Value: Root Meristem vs. Above Root Meristem
  misc_feature: MA Experiment ID: 108543 Result: Down-regulated in Transcription
  misc_feature: MA Experiment ID: 20000534 Result: Down-regulated in Transcription
  misc_feature: MA Experiment 20000534 PARAMETER Experiment Name: Zm_Hybrid_Pollen_P Parameter: Age (day) Value: 8
  misc_feature: MA Experiment 20000534 PARAMETER Experiment Name: Zm_Hybrid_Pollen_P Parameter: Organism Value: Zea mays
  misc_feature: MA Experiment 20000534 PARAMETER Experiment Name: Zm_Hybrid_Pollen_P Parameter: Plant Line Value: 35A19
  misc_feature: MA Experiment 20000534 PARAMETER Experiment Name: Zm_Hybrid_Pollen_P Parameter: Tissue Value: Pollen vs. Aerial
gaaaatctccccgctcacaaagcagtcctcccaccgcacgcaacgcagcctcgacctcgacctcgccgtcgccatggcgagcaagcagacccgccgcctcttcgtccttgccgccgtcgccgtatgcttcctcctcctcctcctcccagcctcctctgtcgccaccgacgtcgattactgcagtaaaaaggagtacccggtgaaggtgagcggggtgcagatcgtgcccgatccggtcgagcccggcaagcctgccactttcaagatctccgcttctactgataaaaccatcgagaaggggaagctggtgatcgacgtcaagtacttcttcttctacgtgcactcggagacgcgcgacatctgcggagagatctcctgtccggcgaccggcgacttcgtgctgtcccacgagcagacgttgccagggttcactccaccggggtcgtacacgatctacatgaagatggtcggggacgacgacgaggagctgagctgcatctcgttcggcttcagcattgggttcgtcgcctccagctgaaacccgcctgagctgcgcgccagaagtcgcccagcatggatgccattatgtaaaccactagaacataaaatttcgagaaagaatgcattacgaaggagacgctcagatttcttcaacctaaagc

SEQ ID NO: 6550 - protein, 178 aa, Zea mays subsp. mays
  peptide (1)..(178): Ceres Seq. ID no. 12372506
  misc_feature (55)..(172): Pfam Name: ML domain Pfam Description: ML domain
  misc_feature (25)..(177): Homolog of NCBI NO: 34899866 NR Description: OJ1714_H10.15 [Oryza sativa (japonica
  misc_feature (32)..(177): Homolog of NCBI NO: 15240063 NR Description: putative protein; protein id: At5g06480.1, by cDNA: 5127. [Arabidopsis thaliana] contains similarity to unknown
  misc_feature (32)..(177): Homolog of NCBI NO: 21593850 NR Description: unknown [Arabidopsis thaliana]
  misc_feature (37)..(177): Homolog of NCBI NO: 18399355 NR Description: expressed protein; protein id: At3g11780.1, by cDNA: 250294., supported by cDNA: gi_14334429 [Arabidopsis >gi|6671934|gb|AAF23194.1|AC016795_7 unknown protein [Arabidopsis
  misc_feature (37)..(177): Homolog of NCBI NO: 21554315 NR Description: unknown [Arabidopsis thaliana]
  misc_feature (25)..(172): Homolog of NCBI NO: 15229872 NR Description: putative protein; protein id: At3g44100.1, by cDNA: 5597. [Arabidopsis thaliana] >gi|11357670|pir||T49126
  misc_feature (57)..(166): Homolog of NCBI NO: 4322563 NR Description: phosphatidylglycerol/phosphatidylinositol protein [Aspergillus oryzae] phosphatidylglycerol/phosphatidylinositol transfer protein
  misc_feature (63)..(168): Homolog of NCBI NO: 18397991 NR Description: Expressed protein; protein id: At2g16005.1, by cDNA: 994., supported by cDNA: gi_13605717, supported by cDNA: [Arabidopsis thaliana] >gi|13605718|gb|AAK32852.1|AF361840_1
KISPLTKQSSHRTQRSLDLDLAVAMASKQTRRLFVLAAVAVCFLLLLLPASSVATDVDYCSKKEYPVKVSGVQIVPDPVEPGKPATFKISASTDKTIEKGKLVIDVKYFFFYVHSETRDICGEISCPATGDFVLSHEQTLPGFTPPGSYTIYMKMVGDDDEELSCISFGFSIGFVASS

SEQ ID NO: 6551 - protein, 154 aa, Zea mays subsp. mays
  peptide (1)..(154): Ceres Seq. ID no. 12372507
  misc_feature (31)..(148): Pfam Name: ML domain Pfam Description: ML domain
  misc_feature (1)..(153): Homolog of NCBI NO: 34899866 NR Description: OJ1714_H10.15 [Oryza sativa (japonica
  misc_feature (8)..(153): Homolog of NCBI NO: 15240063 NR Description: putative protein; protein id: At5g06480.1, by cDNA: 5127. [Arabidopsis thaliana] contains similarity to unknown
  misc_feature (8)..(153): Homolog of NCBI NO: 21593850 NR Description: unknown [Arabidopsis thaliana]
  misc_feature (13)..(153): Homolog of NCBI NO: 18399355 NR Description: expressed protein; protein id: At3g11780.1, by cDNA: 250294., supported by cDNA: gi_14334429 [Arabidopsis >gi|6671934|gb|AAF23194.1|AC016795_7 unknown protein [Arabidopsis
  misc_feature (13)..(153): Homolog of NCBI NO: 21554315 NR Description: unknown [Arabidopsis thaliana]
  misc_feature (1)..(148): Homolog of NCBI NO: 15229872 NR Description: putative protein; protein id: At3g44100.1, by cDNA: 5597. [Arabidopsis thaliana] >gi|11357670|pir||T49126
  misc_feature (33)..(142): Homolog of NCBI NO: 4322563 NR Description: phosphatidylglycerol/phosphatidylinositol protein [Aspergillus oryzae] phosphatidylglycerol/phosphatidylinositol transfer protein
  misc_feature (39)..(144): Homolog of NCBI NO: 18397991 NR Description: Expressed protein; protein id: At2g16005.1, by cDNA: 994., supported by cDNA: gi_13605717, supported by cDNA: [Arabidopsis thaliana] >gi|13605718|gb|AAK32852.1|AF361840_1
MASKQTRRLFVLAAVAVCFLLLLLPASSVATDVDYCSKKEYPVKVSGVQIVPDPVEPGKPATFKISASTDKTIEKGKLVIDVKYFFFYVHSETRDICGEISCPATGDFVLSHEQTLPGFTPPGSYTIYMKMVGDDDEELSCISFGFSIGFVASS

SEQ ID NO: 6552 - DNA, 772 bp, Zea mays subsp. mays
  misc_feature (1)..(772): Ceres Seq. ID no. 12341738
  misc_feature: MA Experiment ID: 20000534 Result: Down-regulated in Transcription
  misc_feature: MA Experiment 20000534 PARAMETER Experiment Name: Zm_Hybrid_Pollen_P Parameter: Age (day) Value: 8
  misc_feature: MA Experiment 20000534 PARAMETER Experiment Name: Zm_Hybrid_Pollen_P Parameter: Organism Value: Zea mays
  misc_feature: MA Experiment 20000534 PARAMETER Experiment Name: Zm_Hybrid_Pollen_P Parameter: Plant Line Value: 35A19
  misc_feature: MA Experiment 20000534 PARAMETER Experiment Name: Zm_Hybrid_Pollen_P Parameter: Tissue Value: Pollen vs. Aerial
aagtacaggaagcgctagaacaacccgaccgccgccgccgccgcctcagctactcgcctggtgatgggcgtcgaactggcgcaaccgaccgccgccgcggctgcggtgaccaccgctgagcaggctcaggatctcatcgacgccgctaggtatgacgacttggaggacgtcgtcgccctgttctccgctggtgtctcgctggactccacagattcgcaaggccgcacagctcttcacatggcttctgccaatggtcaccttgctatggtggaatacttgattcaaaatggagcgaatgttaatgccaccaacatggagaagaacacaccactccactgggcatgccttaatggacgtatagaggtaatcagggctttgatctcagcgggggctagcgtgagtgctctgaacagccacgagaaaacgccaatggacgaagcggtgaccacaggcaagatgcacgtgatcgacgcgatcggtgcggcagtagctcaagccgagctcgacggcgttactgtctcctaaaaggacctgatgagtacctggagctttgaatgacttgcagccttgttcttatctcacagcggttctgtctgtatcactcgcgaacctgaatcccccgacgggccagtatccgggcaatatctatactgacggcaatcgcctgttagtgtcattggcacgaggacccgacctgtcgttgtaaaccagatgtgcagatgtcaaagatcaggattttctcctacaaatgttgtagggccgttgcttgtcc

SEQ ID NO: 6553 - protein, 153 aa, Zea mays subsp. mays
  peptide (1)..(153): Ceres Seq. ID no. 12341739
  misc_feature (85)..(116): Pfam Name: Ankyrin repeat Pfam Description: Ankyrin repeat
  misc_feature (1)..(153): Homolog of NCBI NO: 34899080 NR Description: contains ESTs to Arabidopsis thaliana chromosome 5, At5g12320~unknown protein
  misc_feature (18)..(153): Homolog of NCBI NO: 30684047 NR Description: expressed protein [Arabidopsis thaliana] unknown protein [Arabidopsis thaliana]
  misc_feature (18)..(153): Homolog of NCBI NO: 14586362 NR Description: putative protein [Arabidopsis thaliana]
  misc_feature (27)..(135): Homolog of NCBI NO: 28373837 NR Description: Chain A, 4ank: A Designed Ankyrin Repeat Protein
  misc_feature (18)..(151): Homolog of NCBI NO: 28373666 NR Description: Chain A, Sank E3_5: An Artificial Ankyrin Repeat >gi|28274848|gb|AAO25689.1| ankyrin repeat protein E3_5
  misc_feature (18)..(151): Homolog of NCBI NO: 28274854 NR Description: ankyrin repeat protein E4_8 [synthetic construct]
  misc_feature (18)..(151): Homolog of NCBI NO: 28274852 NR Description: ankyrin repeat protein E4_2 [synthetic construct]
  misc_feature (1)..(135): Homolog of NCBI NO: 30690372 NR Description: ankyrin repeat-containing protein 2 [Arabidopsis
  misc_feature (1)..(135): Homolog of NCBI NO: 15237008 NR Description: ankyrin repeat-containing protein 2; protein id: supported by cDNA: 34698., supported by cDNA: gi_14423489, by cDNA: gi_20148296, supported by cDNA: gi_3478699, supported by
  misc_feature (18)..(151): Homolog of NCBI NO: 28274850 NR Description: ankyrin repeat protein E3_19 [synthetic construct]
MGVELAQPTAAAAAVTTAEQAQDLIDAARYDDLEDVVALFSAGVSLDSTDSQGRTALHMASANGHLAMVEYLIQNGANVNATNMEKNTPLHWACLNGRIEVIRALISAGASVSALNSHEKTPMDEAVTTGKMHVIDAIGAAVAQAELDGVTVS

SEQ ID NO: 6554 - protein, 95 aa, Zea mays subsp. mays
  peptide (1)..(95): Ceres Seq. ID no. 12341740
  misc_feature (27)..(58): Pfam Name: Ankyrin repeat Pfam Description: Ankyrin repeat
  misc_feature (1)..(95): Homolog of NCBI NO: 34899080 NR Description: contains ESTs to Arabidopsis thaliana chromosome 5, At5g12320~unknown protein
  misc_feature (1)..(95): Homolog of NCBI NO: 30684047 NR Description: expressed protein [Arabidopsis thaliana] unknown protein [Arabidopsis thaliana]
  misc_feature (1)..(95): Homolog of NCBI NO: 14586362 NR Description: putative protein [Arabidopsis thaliana]
  misc_feature (1)..(77): Homolog of NCBI NO: 28373837 NR Description: Chain A, 4ank: A Designed Ankyrin Repeat Protein
  misc_feature (1)..(93): Homolog of NCBI NO: 28373666 NR Description: Chain A, Sank E3_5: An Artificial Ankyrin Repeat >gi|28274848|gb|AAO25689.1| ankyrin repeat protein E3_5
  misc_feature (1)..(93): Homolog of NCBI NO: 28274854 NR Description: ankyrin repeat protein E4_8 [synthetic construct]
  misc_feature (1)..(93): Homolog of NCBI NO: 28274852 NR Description: ankyrin repeat protein E4_2 [synthetic construct]
  misc_feature (1)..(77): Homolog of NCBI NO: 30690372 NR Description: ankyrin repeat-containing protein 2 [Arabidopsis
  misc_feature (1)..(77): Homolog of NCBI NO: 15237008 NR Description: ankyrin repeat-containing protein 2; protein id: supported by cDNA: 34698., supported by cDNA: gi_14423489, by cDNA: gi_20148296, supported by cDNA: gi_3478699, supported by
  misc_feature (1)..(93): Homolog of NCBI NO: 28274850 NR Description: ankyrin repeat protein E3_19 [synthetic construct]
MASANGHLAMVEYLIQNGANVNATNMEKNTPLHWACLNGRIEVIRALISAGASVSALNSHEKTPMDEAVTTGKMHVIDAIGAAVAQAELDGVTVS

SEQ ID NO: 6555 - protein, 86 aa, Zea mays subsp. mays
  peptide (1)..(86): Ceres Seq. ID no. 12341741
  misc_feature (18)..(49): Pfam Name: Ankyrin repeat Pfam Description: Ankyrin repeat
  misc_feature (1)..(86): Homolog of NCBI NO: 34899080 NR Description: contains ESTs to Arabidopsis thaliana chromosome 5, At5g12320~unknown protein
  misc_feature (1)..(86): Homolog of NCBI NO: 30684047 NR Description: expressed protein [Arabidopsis thaliana] unknown protein [Arabidopsis thaliana]
  misc_feature (1)..(86): Homolog of NCBI NO: 14586362 NR Description: putative protein [Arabidopsis thaliana]
  misc_feature (1)..(68): Homolog of NCBI NO: 28373837 NR Description: Chain A, 4ank: A Designed Ankyrin Repeat Protein
  misc_feature (1)..(84): Homolog of NCBI NO: 28373666 NR Description: Chain A, Sank E3_5: An Artificial Ankyrin Repeat >gi|28274848|gb|AAO25689.1| ankyrin repeat protein E3_5
  misc_feature (1)..(84): Homolog of NCBI NO: 28274854 NR Description: ankyrin repeat protein E4_8 [synthetic construct]
  misc_feature (1)..(84): Homolog of NCBI NO: 28274852 NR Description: ankyrin repeat protein E4_2 [synthetic construct]
  misc_feature (1)..(68): Homolog of NCBI NO: 30690372 NR Description: ankyrin repeat-containing protein 2 [Arabidopsis
  misc_feature (1)..(68): Homolog of NCBI NO: 15237008 NR Description: ankyrin repeat-containing protein 2; protein id: supported by cDNA: 34698., supported by cDNA: gi_14423489, by cDNA: gi_20148296, supported by cDNA: gi_3478699, supported by
  misc_feature (1)..(84): Homolog of NCBI NO: 28274850 NR Description: ankyrin repeat protein E3_19 [synthetic construct]
MVEYLIQNGANVNATNMEKNTPLHWACLNGRIEVIRALISAGASVSALNSHEKTPMDEAVTTGKMHVIDAIGAAVAQAELDGVTVS

SEQ ID NO: 6556 - DNA, 1254 bp, Zea mays subsp. mays
  misc_feature (1)..(1254): Ceres Seq. ID no. 12402516
  misc_feature: MA Experiment ID: 108504 Result: Up-regulated in Transcription
  misc_feature: MA Experiment 108504 PARAMETER Experiment Name: Zm_Drought_P Parameter: Age (day) Value: 8
  misc_feature: MA Experiment 108504 PARAMETER Experiment Name: Zm_Drought_P Parameter: Organism Value: Zea mays
  misc_feature: MA Experiment 108504 PARAMETER Experiment Name: Zm_Drought_P Parameter: Plant Line Value: 35A19
  misc_feature: MA Experiment 108504 PARAMETER Experiment Name: Zm_Drought_P Parameter: Timepoint (hr) Value: 12
  misc_feature: MA Experiment 108504 PARAMETER Experiment Name: Zm_Drought_P Parameter: Tissue Value: Aerial
  misc_feature: MA Experiment 108504 PARAMETER Experiment Name: Zm_Drought_P Parameter: Treatment Value: Drought vs. No Drought
  misc_feature: MA Experiment ID: 108522 Result: Up-regulated in Transcription
  misc_feature: MA Experiment 108522 PARAMETER Experiment Name: Zm_42deg_Heat_P Parameter: Age (day) Value: 8
  misc_feature: MA Experiment 108522 PARAMETER Experiment Name: Zm_42deg_Heat_P Parameter: Organism Value: Zea mays
  misc_feature: MA Experiment 108522 PARAMETER Experiment Name: Zm_42deg_Heat_P Parameter: Plant Line Value: 35A19
  misc_feature: MA Experiment 108522 PARAMETER Experiment Name: Zm_42deg_Heat_P Parameter: Temperature (deg C) Value: 42 vs. 22
  misc_feature: MA Experiment 108522 PARAMETER Experiment Name: Zm_42deg_Heat_P Parameter: Timepoint (hr) Value: 1
  misc_feature: MA Experiment 108522 PARAMETER Experiment Name: Zm_42deg_Heat_P Parameter: Tissue Value: Aerial
  misc_feature: MA Experiment ID: 108535 Result: Down-regulated in Transcription
  misc_feature: MA Experiment 108535 PARAMETER Experiment Name: Zm_Meristem_P Parameter: Age (day) Value: 8
  misc_feature: MA Experiment 108535 PARAMETER Experiment Name: Zm_Meristem_P Parameter: Organism Value: Zea mays
  misc_feature: MA Experiment 108535 PARAMETER Experiment Name: Zm_Meristem_P Parameter: Plant Line Value: 35A19
  misc_feature: MA Experiment 108535 PARAMETER Experiment Name: Zm_Meristem_P Parameter: Tissue Value: Root Meristem vs. Above Root Meristem
  misc_feature: MA Experiment ID: 108556 Result: Up-regulated in Transcription
  misc_feature: MA Experiment 108556 PARAMETER Experiment Name: Zm_Drought_P Parameter: Age (day) Value: 9
  misc_feature: MA Experiment 108556 PARAMETER Experiment Name: Zm_Drought_P Parameter: Organism Value: Zea mays
  misc_feature: MA Experiment 108556 PARAMETER Experiment Name: Zm_Drought_P Parameter: Plant Line Value: 35A19
  misc_feature: MA Experiment 108556 PARAMETER Experiment Name: Zm_Drought_P Parameter: Timepoint (hr) Value: 24
  misc_feature: MA Experiment 108556 PARAMETER Experiment Name: Zm_Drought_P Parameter: Tissue Value: Aerial
  misc_feature: MA Experiment 108556 PARAMETER Experiment Name: Zm_Drought_P Parameter: Treatment Value: Drought vs. No Drought
  misc_feature: MA Experiment ID: 20000480 Result: Up-regulated in Transcription
  misc_feature: MA Experiment 20000480 PARAMETER Experiment Name: Zm_Drought_P Parameter: Age (day) Value: 11
  misc_feature: MA Experiment 20000480 PARAMETER Experiment Name: Zm_Drought_P Parameter: Organism Value: Zea mays
  misc_feature: MA Experiment 20000480 PARAMETER Experiment Name: Zm_Drought_P Parameter: Plant Line Value: 35A19
  misc_feature: MA Experiment 20000480 PARAMETER Experiment Name: Zm_Drought_P Parameter: Timepoint (hr) Value: 72
  misc_feature: MA Experiment 20000480 PARAMETER Experiment Name: Zm_Drought_P Parameter: Tissue Value: Aerial
  misc_feature: MA Experiment 20000480 PARAMETER Experiment Name: Zm_Drought_P Parameter: Treatment Value: Drought vs. No Drought
cagaagccaaattggtgctcctcttatctcgccgcgccgccaccgctccatttccgctcccccagcccccccaaaagaacctcgtaaccctactcgcgggattccgcaggccgccgcttgcttagggttcatcactcctgttcacacccgatggccgtgaacgaggcgagcagcagtggcggtggggaggaggggtgcgggtcgtggacccgcgagcaggagaaggcgttcgagaacgcggtggcgacgatgggcggggaggaggacggggacgcgaggtgggagaagctagcggaggccgtcgaggggaagacgccggaggaggtcaggcggcactacgagctgctggtggaggacgtcgacggcatcgagtcgggccgcgtcccgcttccggcgtacgcggctgacggcgctgccgaggaagggggcggtggcgggaagaagggaagtggcggaggagggacccatggggacaagcggtcggcgaagtccgccgagcaggagcgtaggaagggcatcgcctggacagaggacgagcacagattgttcctccttggacttgaaaagtatggcaaaggtgactggcggagcatctcgcggaactttgtgatctcaaggacgccgactcaagtagctagtcatgcacagaagtactttatccgtctgaactcaatgaacagagaaaggcggcgatcaagtatacatgacatcaccagtgtgaacaatggagatccatctactgcacagggtccaatcacaggccaaacaaatggtcaggctgcaaatcctggaaaaccatctaagcaatccccgcagccagcgaatacacctccaggcgtcgatgcttatggcacaacaattggacagccagttggtggcccccttgtctcagctgttggaactcccgttacactacctgtttccgctccacctcatctggcctatggcatgcgtgccccggttccaggagccgtagtacctggtgctccagtaaacattgctccgatgccctatccaatgccacccccaccatctcatgggtgacagggtgagggacacatttcaaatgctgtgtagcgtctaaacaaacccataatctccccctatgccagcattttgcgggtgtgctgctatgtctcaataaagcaatgccaataaacccttgtacattacaaactgttgtcacatgttgcattgaggacattgcagattgtgtactttgtgttgcatgcaaactttttcatgtacatctcc

SEQ ID NO: 6557 - protein, 297 aa, Zea mays subsp. mays
  peptide (1)..(297): Ceres Seq. ID no. 12402517
  misc_feature (122)..(169): Pfam Name: Myb-like DNA-binding domain Pfam Description: Myb-like DNA-binding domain
  misc_feature (17)..(295): Homolog of NCBI NO: 15241652 NR Description: putative protein; protein id: At5g08520.1, by cDNA: gi_18175699, supported by cDNA: gi_20465998 [Arabidopsis
  misc_feature (35)..(270): Homolog of NCBI NO: 34914460 NR Description: putative syringolide-induced protein 1-3-1B
  misc_feature (49)..(291): Homolog of NCBI NO: 18402458 NR Description: Expressed protein; protein id: At1g49010.1, by cDNA: 29302. [Arabidopsis thaliana] >gi|25405951|pir||F96527
  misc_feature (6)..(197): Homolog of NCBI NO: 18874263 NR Description: MYB-like transcription factor DIVARICATA
  misc_feature (1)..(243): Homolog of NCBI NO: 15237776 NR Description: I-box binding factor - like protein; protein id:
MAVNEASSSGGGEEGCGSWTREQEKAFENAVATMGGEEDGDARWEKLAEAVEGKTPEEVRRHYELLVEDVDGIESGRVPLPAYAADGAAEEGGGGGKKGSGGGGTHGDKRSAKSAEQERRKGIAWTEDEHRLFLLGLEKYGKGDWRSISRNFVISRTPTQVASHAQKYFIRLNSMNRERRRSSIHDITSVNNGDPSTAQGPITGQTNGQAANPGKPSKQSPQPANTPPGVDAYGTTIGQPVGGPLVSAVGTPVTLPVSAPPHLAYGMRAPVPGAVVPGAPVNIAPMPYPMPPPPSHG

SEQ ID NO: 6558 - protein, 264 aa, Zea mays subsp. mays
  peptide (1)..(264): Ceres Seq. ID no. 12402518
  misc_feature (89)..(136): Pfam Name: Myb-like DNA-binding domain Pfam Description: Myb-like DNA-binding domain
  misc_feature (1)..(262): Homolog of NCBI NO: 15241652 NR Description: putative protein; protein id: At5g08520.1, by cDNA: gi_18175699, supported by cDNA: gi_20465998 [Arabidopsis
  misc_feature (2)..(237): Homolog of NCBI NO: 34914460 NR Description: putative syringolide-induced protein 1-3-1B
  misc_feature (16)..(258): Homolog of NCBI NO: 18402458 NR Description: Expressed protein; protein id: At1g49010.1, by cDNA: 29302. [Arabidopsis thaliana] >gi|25405951|pir||F96527
  misc_feature (1)..(164): Homolog of NCBI NO: 18874263 NR Description: MYB-like transcription factor DIVARICATA
  misc_feature (1)..(210): Homolog of NCBI NO: 15237776 NR Description: I-box binding factor - like protein; protein id:
MGGEEDGDARWEKLAEAVEGKTPEEVRRHYELLVEDVDGIESGRVPLPAYAADGAAEEGGGGGKKGSGGGGTHGDKRSAKSAEQERRKGIAWTEDEHRLFLLGLEKYGKGDWRSISRNFVISRTPTQVASHAQKYFIRLNSMNRERRRSSIHDITSVNNGDPSTAQGPITGQTNGQAANPGKPSKQSPQPANTPPGVDAYGTTIGQPVGGPLVSAVGTPVTLPVSAPPHLAYGMRAPVPGAVVPGAPVNIAPMPYPMPPPPSHG

SEQ ID NO: 6559 - DNA, 1179 bp, Zea mays subsp. mays
  misc_feature (1)..(1179): Ceres Seq. ID no. 12340811
  misc_feature: MA Experiment ID: 108599 Result: Down-regulated in Transcription
  misc_feature: MA Experiment 108599 PARAMETER Experiment Name: Zm_RT1_P Parameter: Age (day) Value: 11
  misc_feature: MA Experiment 108599 PARAMETER Experiment Name: Zm_RT1_P Parameter: Organism Value: Zea mays
  misc_feature: MA Experiment 108599 PARAMETER Experiment Name: Zm_RT1_P Parameter: Plant Line Value: rt1 mut vs. rt1 wt
  misc_feature: MA Experiment 108599 PARAMETER Experiment Name: Zm_RT1_P Parameter: Tissue Value: Roots
  misc_feature: MA Experiment ID: 108689 Result: Down-regulated in Transcription
  misc_feature: MA Experiment 108689 PARAMETER Experiment Name: Zm_Drought_Roots_P Parameter: Age (day) Value: 9
  misc_feature: MA Experiment 108689 PARAMETER Experiment Name: Zm_Drought_Roots_P Parameter: Organism Value: Zea mays
  misc_feature: MA Experiment 108689 PARAMETER Experiment Name: Zm_Drought_Roots_P Parameter: Plant Line Value: 35A19
  misc_feature: MA Experiment 108689 PARAMETER Experiment Name: Zm_Drought_Roots_P Parameter: Timepoint (hr) Value: 24
  misc_feature: MA Experiment 108689 PARAMETER Experiment Name: Zm_Drought_Roots_P Parameter: Tissue Value: Roots
  misc_feature: MA Experiment 108689 PARAMETER Experiment Name: Zm_Drought_Roots_P Parameter: Treatment Value: Drought vs. No Drought
  misc_feature: MA Experiment ID: 20000626 Result: Up-regulated in Transcription
  misc_feature: MA Experiment 20000626 PARAMETER Experiment Name: Zm_Herbicide-Treatments_P Parameter: Timepoint (hr) Value: 12
  misc_feature: MA Experiment 20000626 PARAMETER Experiment Name: Zm_Herbicide-Treatments_P Parameter: Tissue Value: Aerial
  misc_feature: MA Experiment 20000626 PARAMETER Experiment Name: Zm_Herbicide-Treatments_P Parameter: Treatment Value: Roundup vs. No Treatment
  misc_feature: MA Experiment ID: 20001613 Result: Up-regulated in Transcription
  misc_feature: MA Experiment 20001613 PARAMETER Experiment Name: Zm_50ppm_KNO3_L-to-H_P Parameter: Age (day) Value: 20
  misc_feature: MA Experiment 20001613 PARAMETER Experiment Name: Zm_50ppm_KNO3_L-to-H_P Parameter: Organism Value: Zea mays
  misc_feature: MA Experiment 20001613 PARAMETER Experiment Name: Zm_50ppm_KNO3_L-to-H_P Parameter: Plant Line Value: 35A19
  misc_feature: MA Experiment 20001613 PARAMETER Experiment Name: Zm_50ppm_KNO3_L-to-H_P Parameter: Timepoint (hr) Value: 24
  misc_feature: MA Experiment 20001613 PARAMETER Experiment Name: Zm_50ppm_KNO3_L-to-H_P Parameter: Tissue Value: Roots
  misc_feature: MA Experiment 20001613 PARAMETER Experiment Name: Zm_50ppm_KNO3_L-to-H_P Parameter: Treatment Value: 50ppm KNO3 vs. 50ppm KCl
acaacaacttagcataacaaaagcccttgcccacgccatgacgctcagcaagaagcaaggcgcaggcactgatcagcaggccttgctggatgctcagctgcagctctggcaccacaccatcgcttttgtcaagtccatggcgctcaaggccgccgtagacctccgcatagcggacgccatccacctgcacggcggctcagccaccctctcgcagatagtcaccaaggtcacactccacccgtccaagataccatgcctgcgacgcctcatgcgcgtgctcactctcaccggcgtcttcagcgtcaacaccggcgccgttgtcgacgagcccgtttacgggctcacgccggcgtctcgccttctggtcggcccggggctgaaccagaccccgttcctgaccttgatgctcagcactttcttcgtgtcctccttcctcggcctcgacgagtggttccagcacgagacgggtccgtccccgttcgagctggccaatggccgggacatatggaccctgtccggccacgaccgagcttcggcaagctcttcgacgacgggatggtcgcggacagcggtttcatcatggacgtcgtggtcaaggagtgcggcgacgtgttccgaggggtcggctccctcgtcgacgtcgccggcgggctcggtggtgccacccagaccatcgcgaaggctttcccggacgtggcgtgcagcgtgctggacctcccacacgtcgtcgccaatgctcccaccgacaccaccgtgaagtacatcgccggcgacatgttcgagagcattccgtcggcaaacgttgtcttcctcaagtggattctgcatgactggggtgatgccgaatgcgtgaagatactgaagaactgcaagaaggctatatcatctcaagaagaagggaaggtagtgatactggatatggttgttggagcagggtcatccgacgagaagcatgtggagacgcaaatcgtattcgatctctttatgatgtttatcaatggcactgagcgagatgagacggagtggaagaagatcattttcgaagccgggtttagccgttacaagatcatacctgttctcggtgttcggtcgataatcgaggtctacccataaaaatctatgcaactcaagtatactgcatgcgtgaataatctgcgtgtgaaatcaaaactaggtgtg

SEQ ID NO: 6560 - protein, 286 aa, Zea mays subsp. mays
  peptide (1)..(286): Ceres Seq. ID no. 12340812
  misc_feature (93)..(261): Pfam Name: O-methyltransferase Pfam Description: O-methyltransferase
  misc_feature (93)..(286): Homolog of NCBI NO: 1353193 NR Description: O-METHYLTRANSFERASE ZRP4 (OMT)
  misc_feature (95)..(286): Homolog of NCBI NO: 37530606 NR Description: putative o-methyltransferase ZRP4 [Oryza sativa
  misc_feature (95)..(286): Homolog of NCBI NO: 37530600 NR Description: putative o-methyltransferase ZRP4 [Oryza sativa
  misc_feature (91)..(286): Homolog of NCBI NO: 20514369 NR Description: orcinol O-methyltransferase [Rosa hybrid cultivar]
  misc_feature (91)..(286): Homolog of NCBI NO: 20514367 NR Description: orcinol O-methyltransferase [Rosa hybrid cultivar]
  misc_feature (86)..(286): Homolog of NCBI NO: 2282586 NR Description: methyltransferase [Prunus armeniaca]
  misc_feature (93)..(286): Homolog of NCBI NO: 4098238 NR Description: o-methyltransferase [Triticum aestivum]
  misc_feature (92)..(286): Homolog of NCBI NO: 22093735 NR Description: putative o-methyltransferase [Oryza sativa
  misc_feature (92)..(286): Homolog of NCBI NO: 34909608 NR Description: putative o-methyltransferase [Oryza sativa
  misc_feature (91)..(277): Homolog of NCBI NO: 27527926 NR Description: orcinol O-methyltransferase [Rosa hybrid cultivar]
MPATPHARAHSHRRLQRQHRRRCRRARLRAHAGVSPSGRPGAEPDPVPDLDAQHFLRVLLPRPRRVVPARDGSVPVRAGQWPGHMDPVRPRPSFGKLFDDGMVADSGFIMDVVVKECGDVFRGVGSLVDVAGGLGGATQTIAKAFPDVACSVLDLPHVVANAPTDTTVKYIAGDMFESIPSANVVFLKWILHDWGDAECVKILKNCKKAISSQEEGKVVILDMVVGAGSSDEKHVETQIVFDLFMMFINGTERDETEWKKIIFEAGFSRYKIIPVLGVRSIIEVYP

SEQ ID NO: 6561 - protein, 251 aa, Zea mays subsp. mays
  peptide (1)..(251): Ceres Seq. ID no. 12340813
  misc_feature (109)..(175): Pfam Name: O-methyltransferase Pfam Description: O-methyltransferase
  misc_feature (23)..(175): Homolog of NCBI NO: 1353193 NR Description: O-METHYLTRANSFERASE ZRP4 (OMT)
  misc_feature (9)..(185): Homolog of NCBI NO: 37530606 NR Description: putative o-methyltransferase ZRP4 [Oryza sativa
  misc_feature (9)..(184): Homolog of NCBI NO: 37530600 NR Description: putative o-methyltransferase ZRP4 [Oryza sativa
  misc_feature (15)..(179): Homolog of NCBI NO: 20514369 NR Description: orcinol O-methyltransferase [Rosa hybrid cultivar]
  misc_feature (15)..(179): Homolog of NCBI NO: 20514367 NR Description: orcinol O-methyltransferase [Rosa hybrid cultivar]
  misc_feature (28)..(175): Homolog of NCBI NO: 2282586 NR Description: methyltransferase [Prunus armeniaca]
  misc_feature (28)..(185): Homolog of NCBI NO: 4098238 NR Description: o-methyltransferase [Triticum aestivum]
  misc_feature (24)..(175): Homolog of NCBI NO: 22093735 NR Description: putative o-methyltransferase [Oryza sativa
  misc_feature (13)..(175): Homolog of NCBI NO: 34909608 NR Description: putative o-methyltransferase [Oryza sativa
  misc_feature (16)..(179): Homolog of NCBI NO: 27527926 NR Description: orcinol O-methyltransferase [Rosa hybrid cultivar]
QQLSITKALAHAMTLSKKQGAGTDQQALLDAQLQLWHHTIAFVKSMALKAAVDLRIADAIHLHGGSATLSQIVTKVTLHPSKIPCLRRLMRVLTLTGVFSVNTGAVVDEPVYGLTPASRLLVGPGLNQTPFLTLMLSTFFVSSFLGLDEWFQHETGPSPFELANGRDIWTLSGHDRASASSSTTGWSRTAVSSWTSWSRSAATCSEGSAPSSTSPAGSVVPPRPSRRLSRTWRAACWTSHTSSPMLPPTPP

SEQ ID NO: 6562 - protein, 239 aa, Zea mays subsp. mays
  peptide (1)..(239): Ceres Seq. ID no. 12340814
  misc_feature (97)..(163): Pfam Name: O-methyltransferase Pfam Description: O-methyltransferase
  misc_feature (11)..(163): Homolog of NCBI NO: 1353193 NR Description: O-METHYLTRANSFERASE ZRP4 (OMT)
  misc_feature (1)..(173): Homolog of NCBI NO: 37530606 NR Description: putative o-methyltransferase ZRP4 [Oryza sativa
  misc_feature (1)..(172): Homolog of NCBI NO: 37530600 NR Description: putative o-methyltransferase ZRP4 [Oryza sativa
  misc_feature (3)..(167): Homolog of NCBI NO: 20514369 NR Description: orcinol O-methyltransferase [Rosa hybrid cultivar]
  misc_feature (3)..(167): Homolog of NCBI NO: 20514367 NR Description: orcinol O-methyltransferase [Rosa hybrid cultivar]
  misc_feature (16)..(163): Homolog of NCBI NO: 2282586 NR Description: methyltransferase [Prunus armeniaca]
  misc_feature (16)..(173): Homolog of NCBI NO: 4098238 NR Description: o-methyltransferase [Triticum aestivum]
  misc_feature (12)..(163): Homolog of NCBI NO: 22093735 NR Description: putative o-methyltransferase [Oryza sativa
  misc_feature (1)..(163): Homolog of NCBI NO: 34909608 NR Description: putative o-methyltransferase [Oryza sativa
  misc_feature (4)..(167): Homolog of NCBI NO: 27527926 NR Description: orcinol O-methyltransferase [Rosa hybrid cultivar]
MTLSKKQGAGTDQQALLDAQLQLWHHTIAFVKSMALKAAVDLRIADAIHLHGGSATLSQIVTKVTLHPSKIPCLRRLMRVLTLTGVFSVNTGAVVDEPVYGLTPASRLLVGPGLNQTPFLTLMLSTFFVSSFLGLDEWFQHETGPSPFELANGRDIWTLSGHDRASASSSTTGWSRTAVSSWTSWSRSAATCSEGSAPSSTSPAGSVVPPRPSRRLSRTWRAACWTSHTSSPMLPPTPP

SEQ ID NO: 6563 - DNA, 1282 bp, Zea mays subsp. mays
  misc_feature (1)..(1282): Ceres Seq. ID no. 12346078
  misc_feature: MA Experiment ID: 108535 Result: Down-regulated in Transcription
  misc_feature: MA Experiment 108535 PARAMETER Experiment Name: Zm_Meristem_P Parameter: Age (day) Value: 8
  misc_feature: MA Experiment 108535 PARAMETER Experiment Name: Zm_Meristem_P Parameter: Organism Value: Zea mays
  misc_feature: MA Experiment 108535 PARAMETER Experiment Name: Zm_Meristem_P Parameter: Plant Line Value: 35A19
  misc_feature: MA Experiment 108535 PARAMETER Experiment Name: Zm_Meristem_P Parameter: Tissue Value: Root Meristem vs. Above Root Meristem
  misc_feature: MA Experiment ID: 108597 Result: Down-regulated in Transcription
  misc_feature: MA Experiment 108597 PARAMETER Experiment Name: Zm_100uM_ABA_P Parameter: Age (day) Value: 9
  misc_feature: MA Experiment 108597 PARAMETER Experiment Name: Zm_100uM_ABA_P Parameter: Organism Value: Zea mays
  misc_feature: MA Experiment 108597 PARAMETER Experiment Name: Zm_100uM_ABA_P Parameter: Plant Line Value: 35A19
  misc_feature: MA Experiment 108597 PARAMETER Experiment Name: Zm_100uM_ABA_P Parameter: Timepoint (hr) Value: 24
  misc_feature: MA Experiment 108597 PARAMETER Experiment Name: Zm_100uM_ABA_P Parameter: Tissue Value: Aerial
  misc_feature: MA Experiment 108597 PARAMETER Experiment Name: Zm_100uM_ABA_P Parameter: Treatment Value: 100uM ABA vs. No Treatment
  misc_feature: MA Experiment ID: 108687 Result: Down-regulated in Transcription
  misc_feature: MA Experiment 108687 PARAMETER Experiment Name: Zm_Embryos-Flowers__P Parameter: Tissue Value: Embryo vs. Aerial+
  misc_feature: MA Experiment ID: 20000477 Result: Down-regulated in Transcription
  misc_feature: MA Experiment 20000477 PARAMETER Experiment Name: Zm_5mM_SA_P Parameter: Age (day) Value: 10
  misc_feature: MA Experiment 20000477 PARAMETER Experiment Name: Zm_5mM_SA_P Parameter: Organism Value: Zea mays
  misc_feature: MA Experiment 20000477 PARAMETER Experiment Name: Zm_5mM_SA_P Parameter: Plant Line Value: 35A19
  misc_feature: MA Experiment 20000477 PARAMETER Experiment Name: Zm_5mM_SA_P Parameter: Timepoint (hr) Value: 48
  misc_feature: MA Experiment 20000477 PARAMETER Experiment Name: Zm_5mM_SA_P Parameter: Tissue Value: Aerial
  misc_feature: MA Experiment 20000477 PARAMETER Experiment Name: Zm_5mM_SA_P Parameter: Treatment Value: 5mM SA vs. No Treatment
  misc_feature: MA Experiment ID: 20000479 Result: Down-regulated in Transcription
  misc_feature: MA Experiment 20000479 PARAMETER Experiment Name: Zm_Drought_P Parameter: Age (day) Value: 10
  misc_feature: MA Experiment 20000479 PARAMETER Experiment Name: Zm_Drought_P Parameter: Organism Value: Zea mays
  misc_feature: MA Experiment 20000479 PARAMETER Experiment Name: Zm_Drought_P Parameter: Plant Line Value: 35A19
  misc_feature: MA Experiment 20000479 PARAMETER Experiment Name: Zm_Drought_P Parameter: Timepoint (hr) Value: 48
  misc_feature: MA Experiment 20000479 PARAMETER Experiment Name: Zm_Drought_P Parameter: Tissue Value: Aerial
  misc_feature: MA Experiment 20000479 PARAMETER Experiment Name: Zm_Drought_P Parameter: Treatment Value: Drought vs. No Drought
  misc_feature: MA Experiment ID: 20000480 Result: Down-regulated in Transcription
  misc_feature: MA Experiment 20000480 PARAMETER Experiment Name: Zm_Drought_P Parameter: Age (day) Value: 11
  misc_feature: MA Experiment 20000480 PARAMETER Experiment Name: Zm_Drought_P Parameter: Organism Value: Zea mays
  misc_feature: MA Experiment 20000480 PARAMETER Experiment Name: Zm_Drought_P Parameter: Plant Line Value: 35A19
  misc_feature: MA Experiment 20000480 PARAMETER Experiment Name: Zm_Drought_P Parameter: Timepoint (hr) Value: 72
  misc_feature: MA Experiment 20000480 PARAMETER Experiment Name: Zm_Drought_P Parameter: Tissue Value: Aerial
  misc_feature: MA Experiment 20000480 PARAMETER Experiment Name: Zm_Drought_P Parameter: Treatment Value: Drought vs. No Drought
ctactttacacctcctcttcttcttcttcctcgtgcagcagctgtccatcgccgctgggttttctttgttggcattgggttttggaggagaggtcaaggctgagactcggagacgaaatgggtcataggatgttcagtcccttgggcttccttcttcttgccatcgtcgtcctctatggtggaacagagcagaggcgagcggaggcagcagaaggagggagcccgcacaggctgctggccaccatctcggtgtccaagccgtcctaccccacggtcaccacgcccatgtcggcctacggcgacccggtctccacgccagccaccccgtactcaacgttcccgtcgctggcgaccgggaacggcggtgccggtgccggtgcaggcggcggtgctggtgtaggcgggggcggcggcggcggcgggacgtggtgcgtggccagccagagcgcgagcccgaccgcgctgcaggtcgcgctggactacgcctgcggctatggcgccgactgctccccgatccagcagggcgggagctgcttcaaccccgacaccgtccacgaccacgcgtcctacgcctttaacagctactaccagaagaaccccgccccaaccagctgcgacttcggcggcacggccaccatcaccaacaccgatcccagttcagggtcgtgccagtacccatcgtcaagcggtggcgctcagagcacgatgcccccgccatccccgacgagcatgccgccgacagtgcccaccgccccgatgaccccgacgccgatgacgccggacaccaccccgaccaccggcaccccggtctacggattgtccccacccgactacggctcattgtccccacccgactctggctcgatgtcccctcccggctacggatcgacgtctcccccggactacaacgacgtcggcgccgccgcgacgacggggcagggcggcgcggcgctggcgctggcgcttctgtgcgtcctggtcgcgacagtatctctgcacgtctccaaatgagagcggcggcataggaggaaattatgcatgcctgtttcggttgagacgttacatggcgcgccccgtgcgtggtggctgaaagacgcacgcacaggtccatcgccgaggatctccggtggtgtgctgcccggcgccgggggagcattcgagcagtgttgcaagtctgcttagtgttgtataagaaatgaggcgagcttctagcagcgcccgagttctagcagatgcaccagatgtttatacatacatacatacatgcttaaatatataatgg

SEQ ID NO: 6564 - protein, 336 aa, Zea mays subsp. mays
  peptide (1)..(336): Ceres Seq. ID no. 12346079
  misc_feature (237)..(300): Pfam Name: Extensin-like region Pfam Description: Extensin-like region
  misc_feature (48)..(332): Homolog of NCBI NO: 34912962 NR Description: beta-1,3 glucanase-like protein [Oryza sativa
  misc_feature (90)..(333): Homolog of NCBI NO: 22329437 NR Description: unknown protein; protein id: At1g09460.1
  misc_feature (118)..(222): Homolog of NCBI NO: 15218919 NR Description: beta-1,3 glucanase, putative; protein id:
  misc_feature (85)..(308): Homolog of NCBI NO: 31249724 NR Description: putative glucanase [Oryza sativa (japonica
  misc_feature (137)..(295): Homolog of NCBI NO: 18394637 NR Description: glycosyl hydrolase family 17; protein id: supported by cDNA: 32195. [Arabidopsis thaliana]
  misc_feature (137)..(323): Homolog of NCBI NO: 30697478 NR Description: glycosyl hydrolase family 17 [Arabidopsis >gi|9759459|dbj|BAB10375.1| to unknown protein [Arabidopsis thaliana]
  misc_feature (90)..(219): Homolog of NCBI NO: 25402549 NR Description: hypothetical protein [imported] - Arabidopsis
  misc_feature (137)..(282): Homolog of NCBI NO: 21592859 NR Description: unknown [Arabidopsis thaliana]
  misc_feature (142)..(287): Homolog of NCBI NO: 22775658 NR Description: contains ESTs
  misc_feature (83)..(222): Homolog of NCBI NO: 37533178 NR Description: hypothetical protein [Oryza sativa (japonica group)] >gi|15217313|gb|AAK92657.1| Putative protein with
LLYTSSSSSSSCSSCPSPLGFLCWHWVLEERSRLRLGDEMGHRMFSPLGFLLLAIVVLYGGTEQRRAEAAEGGSPHRLLATISVSKPSYPTVTTPMSAYGDPVSTPATPYSTFPSLATGNGGAGAGAGGGAGVGGGGGGGGTWCVASQSASPTALQVALDYACGYGADCSPIQQGGSCFNPDTVHDHASYAFNSYYQKNPAPTSCDFGGTATITNTDPSSGSCQYPSSSGGAQSTMPPPSPTSMPPTVPTAPMTPTPMTPDTTPTTGTPVYGLSPPDYGSLSPPDSGSMSPPGYGSTSPPDYNDVGAAATTGQGGAALALALLCVLVATVSLHVSK

SEQ ID NO: 6565 - protein, 297 aa, Zea mays subsp. mays
  peptide (1)..(297): Ceres Seq. ID no. 12346080
  misc_feature (198)..(261): Pfam Name: Extensin-like region Pfam Description: Extensin-like region
  misc_feature (9)..(293): Homolog of NCBI NO: 34912962 NR Description: beta-1,3 glucanase-like protein [Oryza sativa
  misc_feature (51)..(294): Homolog of NCBI NO: 22329437 NR Description: unknown protein; protein id: At1g09460.1
  misc_feature (79)..(183): Homolog of NCBI NO: 15218919 NR Description: beta-1,3 glucanase, putative; protein id:
  misc_feature (46)..(269): Homolog of NCBI NO: 31249724 NR Description: putative glucanase [Oryza sativa (japonica
  misc_feature (98)..(256): Homolog of NCBI NO: 18394637 NR Description: glycosyl hydrolase family 17; protein id: supported by cDNA: 32195. [Arabidopsis thaliana]
  misc_feature (98)..(284): Homolog of NCBI NO: 30697478 NR Description: glycosyl hydrolase family 17 [Arabidopsis >gi|9759459|dbj|BAB10375.1| to unknown protein [Arabidopsis thaliana]
  misc_feature (51)..(180): Homolog of NCBI NO: 25402549 NR Description: hypothetical protein [imported] - Arabidopsis
  misc_feature (98)..(243): Homolog of NCBI NO: 21592859 NR Description: unknown [Arabidopsis thaliana]
  misc_feature (103)..(248): Homolog of NCBI NO: 22775658 NR Description: contains ESTs
  misc_feature (44)..(183): Homolog of NCBI NO: 37533178 NR Description: hypothetical protein [Oryza sativa (japonica group)] >gi|15217313|gb|AAK92657.1| Putative protein with
MGHRMFSPLGFLLLAIVVLYGGTEQRRAEAAEGGSPHRLLATISVSKPSYPTVTTPMSAYGDPVSTPATPYSTFPSLATGNGGAGAGAGGGAGVGGGGGGGGTWCVASQSASPTALQVALDYACGYGADCSPIQQGGSCFNPDTVHDHASYAFNSYYQKNPAPTSCDFGGTATITNTDPSSGSCQYPSSSGGAQSTMPPPSPTSMPPTVPTAPMTPTPMTPDTTPTTGTPVYGLSPPDYGSLSPPDSGSMSPPGYGSTSPPDYNDVGAAATTGQGGAALALALLCVLVATVSLHVSK

SEQ ID NO: 6566 - protein, 293 aa, Zea mays subsp. mays
  peptide (1)..(293): Ceres Seq. ID no. 12346081
  misc_feature (194)..(257): Pfam Name: Extensin-like region Pfam Description: Extensin-like region
  misc_feature (5)..(289): Homolog of NCBI NO: 34912962 NR Description: beta-1,3 glucanase-like protein [Oryza sativa
  misc_feature (47)..(290): Homolog of NCBI NO: 22329437 NR Description: unknown protein; protein id: At1g09460.1
  misc_feature (75)..(179): Homolog of NCBI NO: 15218919 NR Description: beta-1,3 glucanase, putative; protein id:
  misc_feature (42)..(265): Homolog of NCBI NO: 31249724 NR Description: putative glucanase [Oryza sativa (japonica
  misc_feature (94)..(252): Homolog of NCBI NO: 18394637 NR Description: glycosyl hydrolase family 17; protein id: supported by cDNA: 32195. [Arabidopsis thaliana]
  misc_feature (94)..(280): Homolog of NCBI NO: 30697478 NR Description: glycosyl hydrolase family 17 [Arabidopsis >gi|9759459|dbj|BAB10375.1| to unknown protein [Arabidopsis thaliana]
  misc_feature (47)..(176): Homolog of NCBI NO: 25402549 NR Description: hypothetical protein [imported] - Arabidopsis
  misc_feature (94)..(239): Homolog of NCBI NO: 21592859 NR Description: unknown [Arabidopsis thaliana]
  misc_feature (99)..(244): Homolog of NCBI NO: 22775658 NR Description: contains ESTs
  misc_feature (40)..(179): Homolog of NCBI NO: 37533178 NR Description: hypothetical protein [Oryza sativa (japonica group)] >gi|15217313|gb|AAK92657.1| Putative protein with
MFSPLGFLLLAIVVLYGGTEQRRAEAAEGGSPHRLLATISVSKPSYPTVTTPMSAYGDPVSTPATPYSTFPSLATGNGGAGAGAGGGAGVGGGGGGGGTWCVASQSASPTALQVALDYACGYGADCSPIQQGGSCFNPDTVHDHASYAFNSYYQKNPAPTSCDFGGTATITNTDPSSGSCQYPSSSGGAQSTMPPPSPTSMPPTVPTAPMTPTPMTPDTTPTTGTPVYGLSPPDYGSLSPPDSGSMSPPGYGSTSPPDYNDVGAAATTGQGGAALALALLCVLVATVSLHVSK

SEQ ID NO: 6567 - DNA, 1217 bp, Zea mays subsp. mays
  misc_feature (1)..(1217): Ceres Seq. ID no. 12344527
  misc_feature: MA Experiment ID: 108543 Result: Up-regulated in Transcription
  misc_feature: MA Experiment ID: 108689 Result: Down-regulated in Transcription
  misc_feature: MA Experiment 108689 PARAMETER Experiment Name: Zm_Drought_Roots_P Parameter: Age (day) Value: 9
  misc_feature: MA Experiment 108689 PARAMETER Experiment Name: Zm_Drought_Roots_P Parameter: Organism Value: Zea mays
  misc_feature: MA Experiment 108689 PARAMETER Experiment Name: Zm_Drought_Roots_P Parameter: Plant Line Value: 35A19
  misc_feature: MA Experiment 108689 PARAMETER Experiment Name: Zm_Drought_Roots_P Parameter: Timepoint (hr) Value: 24
  misc_feature: MA Experiment 108689 PARAMETER Experiment Name: Zm_Drought_Roots_P Parameter: Tissue Value: Roots
  misc_feature: MA Experiment 108689 PARAMETER Experiment Name: Zm_Drought_Roots_P Parameter: Treatment Value: Drought vs. No Drought
  misc_feature: MA Experiment ID: 20000478 Result: Down-regulated in Transcription
  misc_feature: MA Experiment 20000478 PARAMETER Experiment Name: Zm_5mM_SA_P Parameter: Age (day) Value: 11
  misc_feature: MA Experiment 20000478 PARAMETER Experiment Name: Zm_5mM_SA_P Parameter: Organism Value: Zea mays
  misc_feature: MA Experiment 20000478 PARAMETER Experiment Name: Zm_5mM_SA_P Parameter: Plant Line Value: 35A19
  misc_feature: MA Experiment 20000478 PARAMETER Experiment Name: Zm_5mM_SA_P Parameter: Timepoint (hr) Value: 72
  misc_feature: MA Experiment 20000478 PARAMETER Experiment Name: Zm_5mM_SA_P Parameter: Tissue Value: Aerial
  misc_feature: MA Experiment 20000478 PARAMETER Experiment Name: Zm_5mM_SA_P Parameter: Treatment Value: 5mM SA vs. No Treatment
  misc_feature: MA Experiment ID: 20000479 Result: Down-regulated in Transcription
  misc_feature: MA Experiment 20000479 PARAMETER Experiment Name: Zm_Drought_P Parameter: Age (day) Value: 10
  misc_feature: MA Experiment 20000479 PARAMETER Experiment Name: Zm_Drought_P Parameter: Organism Value: Zea mays
  misc_feature: MA Experiment 20000479 PARAMETER Experiment Name: Zm_Drought_P Parameter: Plant Line Value: 35A19
  misc_feature: MA Experiment 20000479 PARAMETER Experiment Name: Zm_Drought_P Parameter: Timepoint (hr) Value: 48
  misc_feature: MA Experiment 20000479 PARAMETER Experiment Name: Zm_Drought_P Parameter: Tissue Value: Aerial
  misc_feature: MA Experiment 20000479 PARAMETER Experiment Name: Zm_Drought_P Parameter: Treatment Value: Drought vs. No Drought
  misc_feature: MA Experiment ID: 20000480 Result: Down-regulated in Transcription
  misc_feature: MA Experiment 20000480 PARAMETER Experiment Name: Zm_Drought_P Parameter: Age (day) Value: 11
  misc_feature: MA Experiment 20000480 PARAMETER Experiment Name: Zm_Drought_P Parameter: Organism Value: Zea mays
  misc_feature: MA Experiment 20000480 PARAMETER Experiment Name: Zm_Drought_P Parameter: Plant Line Value: 35A19
  misc_feature: MA Experiment 20000480 PARAMETER Experiment Name: Zm_Drought_P Parameter: Timepoint (hr) Value: 72
  misc_feature: MA Experiment 20000480 PARAMETER Experiment Name: Zm_Drought_P Parameter: Tissue Value: Aerial
  misc_feature: MA Experiment 20000480 PARAMETER Experiment Name: Zm_Drought_P Parameter: Treatment Value: Drought vs. No Drought
  misc_feature: MA Experiment ID: 20000535 Result: Down-regulated in Transcription
  misc_feature: MA Experiment 20000535 PARAMETER Experiment Name: Zm_Hybrid_Seed_Dev_P Parameter: DAP Value: 30 vs. 12
  misc_feature: MA Experiment 20000535 PARAMETER Experiment Name: Zm_Hybrid_Seed_Dev_P Parameter: Organism Value: Zea mays
  misc_feature: MA Experiment 20000535 PARAMETER Experiment Name: Zm_Hybrid_Seed_Dev_P Parameter: Plant Line Value: 35A19
  misc_feature: MA Experiment 20000535 PARAMETER Experiment Name: Zm_Hybrid_Seed_Dev_P Parameter: Tissue Value: Embryo vs. Unfert Floret
  misc_feature: MA Experiment ID: 20000626 Result: Down-regulated in Transcription
  misc_feature: MA Experiment 20000626 PARAMETER Experiment Name: Zm_Herbicide-Treatments_P Parameter: Timepoint (hr) Value: 12
  misc_feature: MA Experiment 20000626 PARAMETER Experiment Name: Zm_Herbicide-Treatments_P Parameter: Tissue Value: Aerial
  misc_feature: MA Experiment 20000626 PARAMETER Experiment Name: Zm_Herbicide-Treatments_P Parameter: Treatment Value: Roundup vs. No Treatment
ctcttcagtctcctcgcgccaacgaccacatcccaccgaacaccgatcaaggtaaacctgttcgctgctccgccagaagccgaggtcgagctgttcacggcagcgagcatgcaccacgatcccaaccccttcgacgagggcgccgacgagaaccccttctcgaatggaggcggaggagcgcgtggcggaggcgtcaagccgcagtacgggttccggccgacggagcccgcggggttcggcggcgggcaggggcgatgcgaccaccgacatccctctggacaccatgaacgattcgaaggggcaaggcgaaggagctgtctcagtgggagtcagatctcaggaggagggagtcggatatcaggaggagggaggaagctctcaagagcgctggggtgcccatggaggacaagaactggccgcctttcttcccaatcatccaccatgatattgccaatgagataccagcaaacgctcagaagttgcagtatcttgcgtttgcgagctggcttggtattgtgctttgcctcttttggaattttattgctgtcatagtctgttggatcagagggggagattctaaactatttttcctggctaccatctatggtatgcttggcatccctttgtcctacttgatgtggtatagacctctgtaccgagcaatgagaactgacagtgctttcagctttggatggtttttcctttgttacctgctccatattggtttttgcatatttgctgccattgctcctgcagttgtattccgtggaaaatcattaacgggtatactggcagcgatcgacaccttttctgatcatgcaatagttgggatcttttactttgtcggatttgccttgttttgcttggagacacttgtgagcatatgggttcttcagaaagtatacatgtacttcagagggcacaagtaggctatggaagcacttgcaatagtcaaccaactaccatctcatctgattgccatgtggttttgtatgttaggacaacgtatatttttccgtttgcattgtggagggtaagtacgactatatgtataattttcggtttgcatggtggagggtaaatacgactatattgtagcgtctctctcgactgatctgtttttaaccccaattctttgctcatatacaaattgtgctttgtatgcacttttgtttgctaccaaggctgcacattgtatgcacttctgttggtgcctt

SEQ ID NO: 6568 - protein, 183 aa, Zea mays subsp. mays
  peptide (1)..(183): Ceres Seq. ID no. 12344528
  misc_feature (37)..(84): Homolog of NCBI NO: 38347080 NR Description: OSJNBa0006A01.21 [Oryza sativa (japonica
  misc_feature (37)..(84): Homolog of NCBI NO: 38567965 NR Description: OSJNBa0093F12.6 [Oryza sativa (japonica
LFSLLAPTTTSHRTPIKVNLFAAPPEAEVELFTAASMHHDPNPFDEGADENPFSNGGGGARGGGVKPQYGFRPTEPAGFGGGQGRCDHRHPSGHHERFEGARRRSCLSGSQISGGGSRISGGGRKLSRALGCPWRTRTGRLSSQSSTMILPMRYQQTLRSCSILRLRAGLVLCFASFGILLLS

SEQ ID NO: 6569 - protein, 176 aa, Zea mays subsp. mays
  peptide (1)..(176): Ceres Seq. ID no. 12344529
  misc_feature (2)..(176): Pfam Name: SCAMP family Pfam Description: SCAMP family
  misc_feature (1)..(176): Homolog of NCBI NO: 38347080 NR Description: OSJNBa0006A01.21 [Oryza sativa (japonica
  misc_feature (1)..(166): Homolog of NCBI NO: 38567965 NR Description: OSJNBa0093F12.6 [Oryza sativa (japonica
  misc_feature (1)..(176): Homolog of NCBI NO: 15222550 NR Description: secretory carrier membrane protein, putative; id: At1g32050.1, supported by cDNA: 34837. [Arabidopsis thaliana]
  misc_feature (1)..(174): Homolog of NCBI NO: 15219893 NR Description: secretory carrier membrane protein; protein id: supported by cDNA: 27197., supported by cDNA: gi_15027862, by cDNA: gi_19310672, supported by cDNA: gi_7109227 [Arabidopsis
  misc_feature (1)..(176): Homolog of NCBI NO: 15226410 NR Description: putative secretory carrier-associated membrane protein id: At2g20840.1 [Arabidopsis thaliana]
  misc_feature (1)..(174): Homolog of NCBI NO: 3941289 NR Description: similarity to SCAMP37 [Pisum sativum]
  misc_feature (1)..(174): Homolog of NCBI NO: 15220305 NR Description: secretory carrier membrane protein, putative;
  misc_feature (1)..(176): Homolog of NCBI NO: 34899754 NR Description: putative secretory carrier membrane protein
  misc_feature (1)..(176): Homolog of NCBI NO: 7109232 NR Description: secretory carrier membrane protein [Oryza sativa]
  misc_feature (1)..(176): Homolog of NCBI NO: 18379111 NR Description: expressed protein; protein id: At1g03550.1, by cDNA: 30006. [Arabidopsis thaliana] F21B7.17 [Arabidopsis thaliana] >gi|21592580|gb|AAM64529.1|
MEDKNWPPFFPIIHHDIANEIPANAQKLQYLAFASWLGIVLCLFWNFIAVIVCWIRGGDSKLFFLATIYGMLGIPLSYLMWYRPLYRAMRTDSAFSFGWFFLCYLLHIGFCIFAAIAPAVVFRGKSLTGILAAIDTFSDHAIVGIFYFVGFALFCLETLVSIWVLQKVYMYFRGHK

SEQ ID NO: 6570 - protein, 147 aa, Zea mays subsp. mays
  peptide (1)..(147): Ceres Seq. ID no. 12344530
  misc_feature (1)..(48): Homolog of NCBI NO: 38347080 NR Description: OSJNBa0006A01.21 [Oryza sativa (japonica
  misc_feature (1)..(48): Homolog of NCBI NO: 38567965 NR Description: OSJNBa0093F12.6 [Oryza sativa (japonica
MHHDPNPFDEGADENPFSNGGGGARGGGVKPQYGFRPTEPAGFGGGQGRCDHRHPSGHHERFEGARRRSCLSGSQISGGGSRISGGGRKLSRALGCPWRTRTGRLSSQSSTMILPMRYQQTLRSCSILRLRAGLVLCFASFGILLLS

SEQ ID NO: 6571 - DNA, 1579 bp, Zea mays subsp. mays
  misc_feature (1)..(1579): Ceres Seq. ID no. 12409052
  misc_feature: MA Experiment ID: 20000487 Result: Up-regulated in Transcription
  misc_feature: MA Experiment 20000487 PARAMETER Experiment Name: Zm_50mM_NH4NO3_L_to_H_P Parameter: Organism Value: Zea mays
  misc_feature: MA Experiment 20000487 PARAMETER Experiment Name: Zm_50mM_NH4NO3_L_to_H_P Parameter: Timepoint (hr) Value: 4
  misc_feature: MA Experiment 20000487 PARAMETER Experiment Name: Zm_50mM_NH4NO3_L_to_H_P Parameter: Tissue Value: Leaves
  misc_feature: MA Experiment 20000487 PARAMETER Experiment Name: Zm_50mM_NH4NO3_L_to_H_P Parameter: Treatment Value: 50mM NH4NO3 vs. 100mM Mannitol
aaaaagctaaagctgtgtaagcagcagaatccaatccaatccccagctcgcgccgccccctctaatccctcctccgcagacagaggccggcgttcactcgggcatccgcgggacggacggggagcaaagcctcagcggcgagtgcgggcgatgaggtcttcggaggcgtcgtcgcggctcgtgcaggagctcgtgctgtacgccgccagcgccgcgctcagctgcctcgtcctcttcgctggcctccgccacctagaccccaaccgcgcggcttcccagaaggcgcagcagcagaagaaggagatcgccaagcgcctcggccggcccctcgtctccaccacgccctatgaggacgtgattgcgtgcgacgtcatcaaccccgacagcatcgacgtcgaattcgactccatcggcggcctggaccagatcaagcaggcgctctacgagctcgtcatcctgcccctgcgccgccccgagctcttcaccttcggcaagctcctcagcccccagaagggcgtcctcctctatggcccgcccggcacaggcaagaccatgctcgccaaggccatcgccagggagtccggcgccgtcttcatcaatgtcaggatctccaatctcatgagcaagtggttcggggacgcacagaagcttgtggctgctgtctttagtctcgctcacaagctccagcctgctattatcttcattgacgaggtcgacagtttcttggggcagcgacggacaactgaccatgaagccatgactaatatgaagacagagttcatgtccctctgggatggcttcaccactgaccagaatgctcgtgtaatggtcctggctgctacaaacaggccttctgagctagatgaggccatccttaggcgctttactcagatatttgaaattggaattcctgttcagagtgaaaggagcaagatacttcaggttgtgttgaagggagaaaatgtcgagcataatattgattatgatcacattgcaagtttgtgcgagggctttactggatcagacatcctagaactgtgcaagcaggccgcattctatcctatcagggagctgttggacgatgagaaaaaaggtaggaaattagataaacctaggcccttgagacaatcagacttggagagagccttgtcagtgtctagaaagggcaagaaggctgcaagttcagcactgcagtcacctttgtgggtacggccgacagattcagaagacgatcagatctcgtgaaaatctgcagcggagtaaatgcaggcattacgtcgataccgttaggtttccttatgcagtttgcagaggttcaacatatttatatatgtattaattcgttttgcgtttggaacctccaccgttttttttgaagcaaactgcagctggcgaagtggcaagcgtgccctcgtgtttaagttgatcatttcaaaatacgtgccccctgtgggccgtaaaactgagaactctatagttgtctggtcaacagtcggtcttggttgcctctgtattttatcttcggtttgactactctagggtggcgaattacaacatacagtataatgcagaaaggttc

SEQ ID NO: 6572 - protein, 414 aa, Zea mays subsp. mays
  peptide (1)..(414): Ceres Seq. ID no. 12409053
  misc_feature (172)..(356): Pfam Name: ATPase family associated with various cellular Pfam Description: ATPase family associated with various cellular
  misc_feature (53)..(402): Homolog of NCBI NO: 15234242 NR Description: putative protein; protein id: At4g27680.1, by cDNA: 142160., supported by cDNA: gi_20260327 [Arabidopsis
  misc_feature (53)..(412): Homolog of NCBI NO: 15238774 NR Description: 26S proteasome regulatory particle chain protein; protein id: At5g53540.1, supported by cDNA: 38213., by cDNA: gi_16604477 [Arabidopsis thaliana]
  misc_feature (85)..(393): Homolog of NCBI NO: 39794661 NR Description: Unknown (protein for IMAGE:4386512) [Homo sapiens]
  misc_feature (85)..(393): Homolog of NCBI NO: 18033709 NR Description: FNP001 [Homo sapiens]
  misc_feature (48)..(407): Homolog of NCBI NO: 27802754 NR Description: SI:zC156N3.1 (novel protein with ATPase domain)
  misc_feature (96)..(364): Homolog of NCBI NO: 7487016 NR Description: hypothetical protein T14P8.7 - Arabidopsis >gi|3193292|gb|AAC19276.1| similar to ATPases associated with
  misc_feature (92)..(372): Homolog of NCBI NO: 18407974 NR Description: expressed protein; protein id: At1g64110.1, by cDNA: gi_15810166 [Arabidopsis thaliana]
  misc_feature (92)..(372): Homolog of NCBI NO: 30696968 NR Description: expressed protein [Arabidopsis thaliana]
  misc_feature (94)..(393): Homolog of NCBI NO: 21740032 NR Description: hypothetical protein [Homo sapiens]
  misc_feature (92)..(363): Homolog of NCBI NO: 17065032 NR Description: similar to homeobox protein [Arabidopsis thaliana]
KKLKLCKQQNPIQSPARAAPSNPSSADRGRRSLGHPRDGRGAKPQRRVRAMRSSEASSRLVQELVLYAASAALSCLVLFAGLRHLDPNRAASQKAQQQKKEIAKRLGRPLVSTTPYEDVIACDVINPDSIDVEFDSIGGLDQIKQALYELVILPLRRPELFTFGKLLSPQKGVLLYGPPGTGKTMLAKAIARESGAVFINVRISNLMSKWFGDAQKLVAAVFSLAHKLQPAIIFIDEVDSFLGQRRTTDHEAMTNMKTEFMSLWDGFTTDQNARVMVLAATNRPSELDEAILRRFTQIFEIGIPVQSERSKILQVVLKGENVEHNIDYDHIASLCEGFTGSDILELCKQAAFYPIRELLDDEKKGRKLDKPRPLRQSDLERALSVSRKGKKAASSALQSPLWVRPTDSEDDQIS

SEQ ID NO: 6573 - protein, 364 aa, Zea mays subsp. mays
  peptide (1)..(364): Ceres Seq. ID no. 12409054
  misc_feature (122)..(306): Pfam Name: ATPase family associated with various cellular Pfam Description: ATPase family associated with various cellular
  misc_feature (3)..(352): Homolog of NCBI NO: 15234242 NR Description: putative protein; protein id: At4g27680.1, by cDNA: 142160., supported by cDNA: gi_20260327 [Arabidopsis
  misc_feature (3)..(362): Homolog of NCBI NO: 15238774 NR Description: 26S proteasome regulatory particle chain protein; protein id: At5g53540.1, supported by cDNA: 38213., by cDNA: gi_16604477 [Arabidopsis thaliana]
  misc_feature (35)..(343): Homolog of NCBI NO: 39794661 NR Description: Unknown (protein for IMAGE:4386512) [Homo sapiens]
  misc_feature (35)..(343): Homolog of NCBI NO: 18033709 NR Description: FNP001 [Homo sapiens]
  misc_feature (1)..(357): Homolog of NCBI NO: 27802754 NR Description: SI:zC156N3.1 (novel protein with ATPase domain)
  misc_feature (46)..(314): Homolog of NCBI NO: 7487016 NR Description: hypothetical protein T14P8.7 - Arabidopsis >gi|3193292|gb|AAC19276.1| similar to ATPases associated with
  misc_feature (42)..(322): Homolog of NCBI NO: 18407974 NR Description: expressed protein; protein id: At1g64110.1, by cDNA: gi_15810166 [Arabidopsis thaliana]
  misc_feature (42)..(322): Homolog of NCBI NO: 30696968 NR Description: expressed protein [Arabidopsis thaliana]
  misc_feature (44)..(343): Homolog of NCBI NO: 21740032 NR Description: hypothetical protein [Homo sapiens]
  misc_feature (42)..(313): Homolog of NCBI NO: 17065032 NR Description: similar to homeobox protein [Arabidopsis thaliana]
MRSSEASSRLVQELVLYAASAALSCLVLFAGLRHLDPNRAASQKAQQQKKEIAKRLGRPLVSTTPYEDVIACDVINPDSIDVEFDSIGGLDQIKQALYELVILPLRRPELFTFGKLLSPQKGVLLYGPPGTGKTMLAKAIARESGAVFINVRISNLMSKWFGDAQKLVAAVFSLAHKLQPAIIFIDEVDSFLGQRRTTDHEAMTNMKTEFMSLWDGFTTDQNARVMVLAATNRPSELDEAILRRFTQIFEIGIPVQSERSKILQVVLKGENVEHNIDYDHIASLCEGFTGSDILELCKQAAFYPIRELLDDEKKGRKLDKPRPLRQSDLERALSVSRKGKKAASSALQSPLWVRPTDSEDDQIS

SEQ ID NO: 6574 - protein, 230 aa, Zea mays subsp. mays
  peptide (1)..(230): Ceres Seq. ID no. 12409055
  misc_feature (1)..(172): Pfam Name: ATPase family associated with various cellular Pfam Description: ATPase family associated with various cellular
  misc_feature (1)..(218): Homolog of NCBI NO: 15234242 NR Description: putative protein; protein id: At4g27680.1, by cDNA: 142160., supported by cDNA: gi_20260327 [Arabidopsis
  misc_feature (1)..(228): Homolog of NCBI NO: 15238774 NR Description: 26S proteasome regulatory particle chain protein; protein id: At5g53540.1, supported by cDNA: 38213., by cDNA: gi_16604477 [Arabidopsis thaliana]
  misc_feature (1)..(209): Homolog of NCBI NO: 39794661 NR Description: Unknown (protein for IMAGE:4386512) [Homo sapiens]
  misc_feature (1)..(209): Homolog of NCBI NO: 18033709 NR Description: FNP001 [Homo sapiens]
  misc_feature (1)..(223): Homolog of NCBI NO: 27802754 NR Description: SI:zC156N3.1 (novel protein with ATPase domain)
  misc_feature (1)..(180): Homolog of NCBI NO: 7487016 NR Description: hypothetical protein T14P8.7 - Arabidopsis >gi|3193292|gb|AAC19276.1| similar to ATPases associated with
  misc_feature (1)..(188): Homolog of NCBI NO: 18407974 NR Description: expressed protein; protein id: At1g64110.1, by cDNA: gi_15810166 [Arabidopsis thaliana]
  misc_feature (1)..(188): Homolog of NCBI NO: 30696968 NR Description: expressed protein [Arabidopsis thaliana]
  misc_feature (1)..(209): Homolog of NCBI NO: 21740032 NR Description: hypothetical protein [Homo sapiens]
  misc_feature (1)..(179): Homolog of NCBI NO: 17065032 NR Description: similar to homeobox protein [Arabidopsis thaliana]
MLAKAIARESGAVFINVRISNLMSKWFGDAQKLVAAVFSLAHKLQPAIIFIDEVDSFLGQRRTTDHEAMTNMKTEFMSLWDGFTTDQNARVMVLAATNRPSELDEAILRRFTQIFEIGIPVQSERSKILQVVLKGENVEHNIDYDHIASLCEGFTGSDILELCKQAAFYPIRELLDDEKKGRKLDKPRPLRQSDLERALSVSRKGKKAASSALQSPLWVRPTDSEDDQIS

SEQ ID NO: 6575 - DNA, 1772 bp, Zea mays subsp. mays
  misc_feature (1)..(1772): Ceres Seq. ID no. 12406872
  misc_feature: MA Experiment ID: 108522 Result: Up-regulated in Transcription
  misc_feature: MA Experiment 108522 PARAMETER Experiment Name: Zm_42deg_Heat_P Parameter: Age (day) Value: 8
  misc_feature: MA Experiment 108522 PARAMETER Experiment Name: Zm_42deg_Heat_P Parameter: Organism Value: Zea mays
  misc_feature: MA Experiment 108522 PARAMETER Experiment Name: Zm_42deg_Heat_P Parameter: Plant Line Value: 35A19
  misc_feature: MA Experiment 108522 PARAMETER Experiment Name: Zm_42deg_Heat_P Parameter: Temperature (deg C) Value: 42 vs. 22
  misc_feature: MA Experiment 108522 PARAMETER Experiment Name: Zm_42deg_Heat_P Parameter: Timepoint (hr) Value: 1
  misc_feature: MA Experiment 108522 PARAMETER Experiment Name: Zm_42deg_Heat_P Parameter: Tissue Value: Aerial
  misc_feature: MA Experiment ID: 108523 Result: Up-regulated in Transcription
  misc_feature: MA Experiment 108523 PARAMETER Experiment Name: Zm_42deg_Heat_P Parameter: Age (day) Value: 8
  misc_feature: MA Experiment 108523 PARAMETER Experiment Name: Zm_42deg_Heat_P Parameter: Organism Value: Zea mays
  misc_feature: MA Experiment 108523 PARAMETER Experiment Name: Zm_42deg_Heat_P Parameter: Plant Line Value: 35A19
  misc_feature: MA Experiment 108523 PARAMETER Experiment Name: Zm_42deg_Heat_P Parameter: Temperature (deg C) Value: 42 vs. 22
  misc_feature: MA Experiment 108523 PARAMETER Experiment Name: Zm_42deg_Heat_P Parameter: Timepoint (hr) Value: 6
  misc_feature: MA Experiment 108523 PARAMETER Experiment Name: Zm_42deg_Heat_P Parameter: Tissue Value: Aerial
  misc_feature: MA Experiment ID: 108526 Result: Up-regulated in Transcription
  misc_feature: MA Experiment 108526 PARAMETER Experiment Name: Zm_5mM_NO_P Parameter: Age (day) Value: 8
  misc_feature: MA Experiment 108526 PARAMETER Experiment Name: Zm_5mM_NO_P Parameter: Organism Value: Zea mays
  misc_feature: MA Experiment 108526 PARAMETER Experiment Name: Zm_5mM_NO_P Parameter: Plant Line Value: 35A19
  misc_feature: MA Experiment 108526 PARAMETER Experiment Name: Zm_5mM_NO_P Parameter: Timepoint (hr) Value: 1
  misc_feature: MA Experiment 108526 PARAMETER Experiment Name: Zm_5mM_NO_P Parameter: Tissue Value: Aerial
  misc_feature: MA Experiment 108526 PARAMETER Experiment Name: Zm_5mM_NO_P Parameter: Treatment Value: 5mM NO vs. No Treatment
  misc_feature: MA Experiment ID: 108527 Result: Up-regulated in Transcription
  misc_feature: MA Experiment 108527 PARAMETER Experiment Name: Zm_5mM_NO_P Parameter: Age (day) Value: 8
  misc_feature: MA Experiment 108527 PARAMETER Experiment Name: Zm_5mM_NO_P Parameter: Organism Value: Zea mays
  misc_feature: MA Experiment 108527 PARAMETER Experiment Name: Zm_5mM_NO_P Parameter: Plant Line Value: 35A19
  misc_feature: MA Experiment 108527 PARAMETER Experiment Name: Zm_5mM_NO_P Parameter: Timepoint (hr) Value: 6
  misc_feature: MA Experiment 108527 PARAMETER Experiment Name: Zm_5mM_NO_P Parameter: Tissue Value: Aerial
  misc_feature: MA Experiment 108527 PARAMETER Experiment Name: Zm_5mM_NO_P Parameter: Treatment Value: 5mM NO vs. No Treatment
  misc_feature: MA Experiment ID: 108528 Result: Up-regulated in Transcription
  misc_feature: MA Experiment 108528 PARAMETER Experiment Name: Zm_Imbibed_Seeds_P Parameter: Age (day) Value: 5 vs. 2
  misc_feature: MA Experiment 108528 PARAMETER Experiment Name: Zm_Imbibed_Seeds_P Parameter: Organism Value: Zea mays
  misc_feature: MA Experiment 108528 PARAMETER Experiment Name: Zm_Imbibed_Seeds_P Parameter: Plant Line Value: 35A19
  misc_feature: MA Experiment 108528 PARAMETER Experiment Name: Zm_Imbibed_Seeds_P Parameter: Tissue Value: Aerial vs. Embryo
  misc_feature: MA Experiment ID: 108530 Result: Up-regulated in Transcription
  misc_feature: MA Experiment 108530 PARAMETER Experiment Name: Zm_Imbibed_Seeds_P Parameter: Age (day) Value: 6 vs. 2
  misc_feature: MA Experiment 108530 PARAMETER Experiment Name: Zm_Imbibed_Seeds_P Parameter: Organism Value: Zea mays
  misc_feature: MA Experiment 108530 PARAMETER Experiment Name: Zm_Imbibed_Seeds_P Parameter: Plant Line Value: 35A19
  misc_feature: MA Experiment 108530 PARAMETER Experiment Name: Zm_Imbibed_Seeds_P Parameter: Tissue Value: Aerial vs. Embryo
  misc_feature: MA Experiment ID: 108533 Result: Up-regulated in Transcription
  misc_feature: MA Experiment 108533 PARAMETER Experiment Name: Zm_4deg_Cold_P Parameter: Age (hr) Value: 8
  misc_feature: MA Experiment 108533 PARAMETER Experiment Name: Zm_4deg_Cold_P Parameter: Organism Value: Zea mays
  misc_feature: MA Experiment 108533 PARAMETER Experiment Name: Zm_4deg_Cold_P Parameter: Plant Line Value: 35A19
  misc_feature: MA Experiment 108533 PARAMETER Experiment Name: Zm_4deg_Cold_P Parameter: Temperature (deg C) Value: 4 vs. 22
  misc_feature: MA Experiment 108533 PARAMETER Experiment Name: Zm_4deg_Cold_P Parameter: Timepoint (hr) Value: 1
  misc_feature: MA Experiment 108533 PARAMETER Experiment Name: Zm_4deg_Cold_P Parameter: Tissue Value: Aerial
  misc_feature: MA Experiment ID: 108534 Result: Up-regulated in Transcription
  misc_feature: MA Experiment 108534 PARAMETER Experiment Name: Zm_4deg_Cold_P Parameter: Age (hr) Value: 8
  misc_feature: MA Experiment 108534 PARAMETER Experiment Name: Zm_4deg_Cold_P Parameter: Organism Value: Zea mays
  misc_feature: MA Experiment 108534 PARAMETER Experiment Name: Zm_4deg_Cold_P Parameter: Plant Line Value: 35A19
  misc_feature: MA Experiment 108534 PARAMETER Experiment Name: Zm_4deg_Cold_P Parameter: Temperature (deg C) Value: 4 vs. 22
  misc_feature: MA Experiment 108534 PARAMETER Experiment Name: Zm_4deg_Cold_P Parameter: Timepoint (hr) Value: 6
  misc_feature: MA Experiment 108534 PARAMETER Experiment Name: Zm_4deg_Cold_P Parameter: Tissue Value: Aerial
  misc_feature: MA Experiment ID: 108536 Result: Up-regulated in Transcription
  misc_feature: MA Experiment 108536 PARAMETER Experiment Name: Zm_Meristem_P Parameter: Age (day) Value: 8
  misc_feature: MA Experiment 108536 PARAMETER Experiment Name: Zm_Meristem_P Parameter: Organism Value: Zea mays
  misc_feature: MA Experiment 108536 PARAMETER Experiment Name: Zm_Meristem_P Parameter: Plant Line Value: 35A19
  misc_feature: MA Experiment 108536 PARAMETER Experiment Name: Zm_Meristem_P Parameter: Tissue Value: Shoot Meristem vs. Above Shoot Meristem
  misc_feature: MA Experiment ID: 108547 Result: Up-regulated in Transcription
  misc_feature: MA Experiment 108547 PARAMETER Experiment Name: Zm_Imbibed_Seeds_P Parameter: Age (day) Value: 4 vs. 2
  misc_feature: MA Experiment 108547 PARAMETER Experiment Name: Zm_Imbibed_Seeds_P Parameter: Organism Value: Zea mays
  misc_feature: MA Experiment 108547 PARAMETER Experiment Name: Zm_Imbibed_Seeds_P Parameter: Plant Line Value: 35A19
  misc_feature: MA Experiment 108547 PARAMETER Experiment Name: Zm_Imbibed_Seeds_P Parameter: Tissue Value: Aerial vs. Embryo
  misc_feature: MA Experiment ID: 20000108 Result: Down-regulated in Transcription
  misc_feature: MA Experiment 20000108 PARAMETER Experiment Name: Zm_Root-Tips_P Parameter: Age (day) Value: 12
  misc_feature: MA Experiment 20000108 PARAMETER Experiment Name: Zm_Root-Tips_P Parameter: Organism Value: Zea mays
  misc_feature: MA Experiment 20000108 PARAMETER Experiment Name: Zm_Root-Tips_P Parameter: Tissue Value: Root tips vs. Root mid region    35
  misc_feature: MA Experiment 20000108 PARAMETER Experiment Name: Zm_Root-Tips_P Parameter: Tissue Value: Root tips vs. Root mid region   Sequence Listing-Misc Features (4)
ccaagcggtgggggtggaggagcagcagctggtgcaggtgcagcagcaggggacgacgacttcgccttctactgctcctacctccaggacgccgacgctgccgccgcctcagcgacgtcgacgctcgccctcgccgtcgacgaccccaaccccaaccccagcgccgcagggatgacgaacggccggcgccggaagcagcgcggggcagaggacgccggagccgccggggaaggggaggaggaggccaagaaggacggcaagaagcggtccatagccaagctgctcacctcgctggcggcgctggaggcggaggagcacgccgaccgcgcgggcgccgcggacgcgtccaggcgggagctggcgctgctcgagtccaacgccgacacccgctcgcaggccaccatggactactacgccaagatggagagcagcttcgacgccaccgccgagtccgaggccgccgccaggtccaagcgctccaggctcgccgcgtcggccgccaccgcggccgtcgtggccggggaggaggcggcagcgtcagcggcggcgtcgccctccgcgtcggcctcgccgacgcgcgccgcggggcaggggcagggaggccaccaccagcgccggctgtgggtcaaggaccggtcgcgcgcgtggtgggaccggtgcaacagcgccgactaccggaggaggagttccggcgcgcgttccggatggggcgcgggaccttcgacatgatctgcgacgcgctgggctcctcggtggccaaggaggacaccatgctccgcgccgccatccccgtccgccagcgcgtcgccgtctgcgtctggcgcctcgccacgggggagccgctccgcctcgtttccaagcgcttcggcctcggcatctccacctgccacaagctcgtcctggaggtgtgcgccgccatcaagtccgtgctcatgccgcgcttcctgcagtggcccgacgccgacgccgcggcgcgcttcaaggagggcttcgagcgcgcctcgggcgtgccgggcgtcatcggcgccatgtacaccacccacatccccatcatcgcgcccaagatctcggtggcggcctacttcaaccgccgccacacggagcgcaaccagaagacgtcctactccatcactctccagggcgtcgtcggccccgacggcgccttcaccgacgtctgcatcggctggcccggctccatgcccgacgaccaggtcctggagaagtccatgctccaccagcgcgccgcggcggggatgatgcacgactcgtggctggtggctggcgccagctacccgctcatggactgggtgctggtgccgtacacgcaccccaacctgacgtggacgcagcacgcgttcaacgagaaggtggccgagctccggcgcgtcgcggtggaggcgttcgcgcgcctcaaggcgcgctgggcgtgcctgcagaagcgcaccgaggtcaagctgcaggacctccccgtcgtgctgggcgcctgctgcgtgctccacaacatctgcgagattcggggcgaggaggtggacccagccatccgctgcgaactggtggacgacgagaccacgccggagaaccccgtgcgctccgagacggccagtcgcgccagggacaacatcgcgcacaacctgctccaccgtggcttgggcggcaacacattcttctgatctcatccgtcaccttcttcttttttatgctttgctagtacagtagtacagaattgggctggaacaagaaagaaataggcattcttttcttttaattacact

SEQ ID NO: 6576 - protein, 555 aa, Zea mays subsp. mays
  peptide (1)..(555): Ceres Seq. ID no. 12406873
  misc_feature (70)..(555): Homolog of NCBI NO: 21902022 NR Description: B1097D05.23 [Oryza sativa (japonica
  misc_feature (225)..(554): Homolog of NCBI NO: 15239835 NR Description: putative protein; protein id: At5g12010.1, by cDNA: gi_16604351 [Arabidopsis thaliana]
  misc_feature (177)..(551): Homolog of NCBI NO: 30688449 NR Description: expressed protein [Arabidopsis thaliana] unknown protein [Arabidopsis thaliana]
  misc_feature (177)..(551): Homolog of NCBI NO: 21592524 NR Description: unknown [Arabidopsis thaliana]
  misc_feature (177)..(551): Homolog of NCBI NO: 7452044 NR Description: hypothetical protein F27B13.20 - Arabidopsis >gi|4914402|emb|CAB43653.1| hypothetical protein [Arabidopsis >gi|7269877|emb|CAB79736.1| hypothetical protein [Arabidopsis
  misc_feature (225)..(555): Homolog of NCBI NO: 34906342 NR Description: unnamed protein product [Oryza sativa (japonica group)] >gi|9558493|dbj|BAB03412.1| unnamed protein product
  misc_feature (62)..(107): Homolog of NCBI NO: 34906342 NR Description: unnamed protein product [Oryza sativa (japonica group)] >gi|9558493|dbj|BAB03412.1| unnamed protein product
  misc_feature (229)..(544): Homolog of NCBI NO: 15233248 NR Description: putative protein; protein id: At3g55350.1, by cDNA: 37855. [Arabidopsis thaliana] >gi|11358194|pir||T47674
  misc_feature (224)..(501): Homolog of NCBI NO: 18412695 NR Description: putative protein; protein id: At3g63270.1, by cDNA: gi_13878074, supported by cDNA: gi_17104744 [Arabidopsis >gi|13878075|gb|AAK44115.1|AF370300_1 unknown protein
  misc_feature (196)..(501): Homolog of NCBI NO: 34908114 NR Description: P0031D11.14 [Oryza sativa (japonica
KRWGWRSSSWCRCSSRGRRLRLLLLLPPGRRRCRRLSDVDARPRRRRPQPQPQRRRDDERPAPEAARGRGRRSRRGRGGGGQEGRQEAVHSQAAHLAGGAGGGGARRPRGRRGRVQAGAGAARVQRRHPLAGHHGLLRQDGEQLRRHRRVRGRRQVQALQARRVGRHRGRRGRGGGGSVSGGVALRVGLADARRGAGAGRPPPAPAVGQGPVARVVGPVQQRRLPEEEFRRAFRMGRGTFDMICDALGSSVAKEDTMLRAAIPVRQRVAVCVWRLATGEPLRLVSKRFGLGISTCHKLVLEVCAAIKSVLMPRFLQWPDADAAARFKEGFERASGVPGVIGAMYTTHIPIIAPKISVAAYFNRRHTERNQKTSYSITLQGVVGPDGAFTDVCIGWPGSMPDDQVLEKSMLHQRAAAGMMHDSWLVAGASYPLMDWVLVPYTHPNLTWTQHAFNEKVAELRRVAVEAFARLKARWACLQKRTEVKLQDLPVVLGACCVLHNICEIRGEEVDPAIRCELVDDETTPENPVRSETASRARDNIAHNLLHRGLGGNTFF

SEQ ID NO: 6577 - protein, 321 aa, Zea mays subsp. mays
  peptide (1)..(321): Ceres Seq. ID no. 12406874
  misc_feature (1)..(321): Homolog of NCBI NO: 21902022 NR Description: B1097D05.23 [Oryza sativa (japonica
  misc_feature (1)..(320): Homolog of NCBI NO: 15239835 NR Description: putative protein; protein id: At5g12010.1, by cDNA: gi_16604351 [Arabidopsis thaliana]
  misc_feature (1)..(317): Homolog of NCBI NO: 30688449 NR Description: expressed protein [Arabidopsis thaliana] unknown protein [Arabidopsis thaliana]
  misc_feature (1)..(317): Homolog of NCBI NO: 21592524 NR Description: unknown [Arabidopsis thaliana]
  misc_feature (1)..(317): Homolog of NCBI NO: 7452044 NR Description: hypothetical protein F27B13.20 - Arabidopsis >gi|4914402|emb|CAB43653.1| hypothetical protein [Arabidopsis >gi|7269877|emb|CAB79736.1| hypothetical protein [Arabidopsis
  misc_feature (1)..(321): Homolog of NCBI NO: 34906342 NR Description: unnamed protein product [Oryza sativa (japonica group)] >gi|9558493|dbj|BAB03412.1| unnamed protein product
  misc_feature (1)..(310): Homolog of NCBI NO: 15233248 NR Description: putative protein; protein id: At3g55350.1, by cDNA: 37855. [Arabidopsis thaliana] >gi|11358194|pir||T47674
  misc_feature (1)..(267): Homolog of NCBI NO: 18412695 NR Description: putative protein; protein id: At3g63270.1, by cDNA: gi_13878074, supported by cDNA: gi_17104744 [Arabidopsis >gi|13878075|gb|AAK44115.1|AF370300_1 unknown protein
  misc_feature (1)..(267): Homolog of NCBI NO: 34908114 NR Description: P0031D11.14 [Oryza sativa (japonica
  misc_feature (1)..(289): Homolog of NCBI NO: 25553597 NR Description: OJ1656_E11.28 [Oryza sativa (japonica
MGRGTFDMICDALGSSVAKEDTMLRAAIPVRQRVAVCVWRLATGEPLRLVSKRFGLGISTCHKLVLEVCAAIKSVLMPRFLQWPDADAAARFKEGFERASGVPGVIGAMYTTHIPIIAPKISVAAYFNRRHTERNQKTSYSITLQGVVGPDGAFTDVCIGWPGSMPDDQVLEKSMLHQRAAAGMMHDSWLVAGASYPLMDWVLVPYTHPNLTWTQHAFNEKVAELRRVAVEAFARLKARWACLQKRTEVKLQDLPVVLGACCVLHNICEIRGEEVDPAIRCELVDDETTPENPVRSETASRARDNIAHNLLHRGLGGNTFF

SEQ ID NO: 6578 - protein, 314 aa, Zea mays subsp. mays
  peptide (1)..(314): Ceres Seq. ID no. 12406875
  misc_feature (1)..(310): Homolog of NCBI NO: 7452044 NR Description: hypothetical protein F27B13.20 - Arabidopsis >gi|4914402|emb|CAB43653.1| hypothetical protein [Arabidopsis >gi|7269877|emb|CAB79736.1| hypothetical protein [Arabidopsis
  misc_feature (1)..(314): Homolog of NCBI NO: 34906342 NR Description: unnamed protein product [Oryza sativa (japonica group)] >gi|9558493|dbj|BAB03412.1| unnamed protein product
  misc_feature (1)..(303): Homolog of NCBI NO: 15233248 NR Description: putative protein; protein id: At3g55350.1, by cDNA: 37855. [Arabidopsis thaliana] >gi|11358194|pir||T47674
  misc_feature (1)..(260): Homolog of NCBI NO: 18412695 NR Description: putative protein; protein id: At3g63270.1, by cDNA: gi_13878074, supported by cDNA: gi_17104744 [Arabidopsis >gi|13878075|gb|AAK44115.1|AF370300_1 unknown protein
  misc_feature (1)..(260): Homolog of NCBI NO: 34908114 NR Description: P0031D11.14 [Oryza sativa (japonica
  misc_feature (1)..(282): Homolog of NCBI NO: 25553597 NR Description: OJ1656_E11.28 [Oryza sativa (japonica
  misc_feature (1)..(314): Homolog of NCBI NO: 21902022 NR Description: B1097D05.23 [Oryza sativa (japonica
  misc_feature (1)..(313): Homolog of NCBI NO: 15239835 NR Description: putative protein; protein id: At5g12010.1, by cDNA: gi_16604351 [Arabidopsis thaliana]
  misc_feature (1)..(310): Homolog of NCBI NO: 30688449 NR Description: expressed protein [Arabidopsis thaliana] unknown protein [Arabidopsis thaliana]
  misc_feature (1)..(310): Homolog of NCBI NO: 21592524 NR Description: unknown [Arabidopsis thaliana]
MICDALGSSVAKEDTMLRAAIPVRQRVAVCVWRLATGEPLRLVSKRFGLGISTCHKLVLEVCAAIKSVLMPRFLQWPDADAAARFKEGFERASGVPGVIGAMYTTHIPIIAPKISVAAYFNRRHTERNQKTSYSITLQGVVGPDGAFTDVCIGWPGSMPDDQVLEKSMLHQRAAAGMMHDSWLVAGASYPLMDWVLVPYTHPNLTWTQHAFNEKVAELRRVAVEAFARLKARWACLQKRTEVKLQDLPVVLGACCVLHNICEIRGEEVDPAIRCELVDDETTPENPVRSETASRARDNIAHNLLHRGLGGNTFF

SEQ ID NO: 6579 - DNA, 2183 bp, Zea mays subsp. mays
  misc_feature (1)..(2183): Ceres Seq. ID no. 12404878
  misc_feature: MA Experiment ID: 108543 Result: Down-regulated in Transcription
  misc_feature: MA Experiment ID: 20000479 Result: Up-regulated in Transcription
  misc_feature: MA Experiment 20000479 PARAMETER Experiment Name: Zm_Drought_P Parameter: Age (day) Value: 10
  misc_feature: MA Experiment 20000479 PARAMETER Experiment Name: Zm_Drought_P Parameter: Organism Value: Zea mays
  misc_feature: MA Experiment 20000479 PARAMETER Experiment Name: Zm_Drought_P Parameter: Plant Line Value: 35A19
  misc_feature: MA Experiment 20000479 PARAMETER Experiment Name: Zm_Drought_P Parameter: Timepoint (hr) Value: 48
  misc_feature: MA Experiment 20000479 PARAMETER Experiment Name: Zm_Drought_P Parameter: Tissue Value: Aerial
  misc_feature: MA Experiment 20000479 PARAMETER Experiment Name: Zm_Drought_P Parameter: Treatment Value: Drought vs. No Drought
gcattaccaagtgataataacggatctcattcagcctctctatagcataggaccaagatcatagtgccgtccctgccggcagagagcaagatggtctcacactcactctcagcatggtccatgtcctcggcgccgccgccggntggttcgccgccctggtcgccgtgggcctgtacacggcgctgcggtccgccgccaccttcctggcgtggctccaccgcgcgttcctgcgcccaggccgggacctggcggggcggtacgggacgtgggcggtggtgaccggcgccacggacggcatcgggcgcgcggtggcgctggagctggcgcgcgcggggctccacctcgtgctggtggggcggagccccgacaagctggcgcgggtggcgaaggagctctgcggccnccgcgccggcgtgcaaggtgcggagcgtggcgttcgacctcgccgtgaccggggacnccgcgcggcgcggggtggcgcgggtgnnggccgccgtggagggccgcgacgtgggcgtgctcgtcaacaacgccggcgcgacgtacccgtgcgccgcctacttccacgaggtggagggccccgtgtgggaggccgtggtgcgggtcaacgtcgaggccgccacgcggatcacgcgcgccctgctgccggcgatggcggccaggggcaggggcgccgtcgtcaacgtgggctccggctccagcgtcgtcgtcccggccttcccgctctacgccgtctacgcggccagcaaagcgtacgtcgaccagttttctcgaagcctgagtgtggaatacaaacaatacggcgtagacgtgcagtgccagatacccctgtacgtcgctaccaagatgtcgcccgtgaagggcgcgtctccgttcataccgtcgcccgaggagtacgccagggccgcccttcgctgcgttggctacgaggcgaggtgcgtcccgtactggcgccactcggtccagtggttcctggcgtccctagcgccggacgctgctctcaaccactggcgcctccaaactggcctccagaagaggaacgagatgaaggctctgctaaggggaaaagactgcagttagattaataataatagtaattgttgtatagattggaatattatagccttccagacagtactcgcgatcgtgcacttatttaccctctctgtttctttttagttgtcgctagatagttgaacaactaaaaaagaaaccaaagaagtatctgtcagctctattccgtacagacgcgaacccatggtacgcgcgtatgtatccatgtagtggttctttttcagtggtaagggtaaaacgcgcgaggtncaaaaaaaaaaaaaaaaaagcttctcgtgccgttttttttttttttttttatataatagcaaattttattcatgatattacacagatacggtaatgtaagatatcatattaagggcttgttcggttaggtgtggattgaagagtattggaggagattaaaacccctctattagaatagaaggaaaattaatcaccttcaattcccttcgatacagacacaaccaaacaagccctaatagggttgtagtcttatgaaattacacaagggagcatggctccttattctgcaactttgctttgagcttcaggctcgcacatggagaaggagacatccttaggcgctagcaccctcttcaacaggtttgaattcctgcagctccttgaacttctcccatggcttctcccataccttagcttcgtagagcttcttgacttcgccatccttcacttcaatagtgagatagtacatcgtgccagcaaccacttgtgtcttggccttcacaagcttctcgaaccccagaagagcattggccttcttgttgtgctcatcgacggcgaagcgggcgagctcctggaggtgaaggtcgttctcgctccccggcacgtcctggatgccgcccaccaacgtcccggtgttgttggccatggaatcctcctgtgcgttgcgggtggacgatacggcgagggcaagcagtatgagcagggcagacacgagtgagacgattcgatgtttgcgcatctggattggggaattggggcggaaatttatagccggagaagatcccgggagacgactggaggaggctacgatgaacgatctgtcaatgcgatattgttgtggcggatatcattgtgctgct

SEQ ID NO: 6580 - protein, 323 aa, Zea mays subsp. mays
  peptide (1)..(323): Ceres Seq. ID no. 12404879
  misc_feature (1)..(94): Homolog of NCBI NO: 7489413 NR Description: probable b-keto acyl reductase (EC 1.1.-.-) -
  misc_feature (5)..(96): Homolog of NCBI NO: 38345332 NR Description: OSJNBa0081L15.5 [Oryza sativa (japonica
  misc_feature (1)..(94): Homolog of NCBI NO: 7489808 NR Description: probable beta-keto acyl reductase - maize
  misc_feature (11)..(94): Homolog of NCBI NO: 28565601 NR Description: putative 3-ketoacyl-CoA reductase 2 [Brassica
  misc_feature (11)..(94): Homolog of NCBI NO: 28565597 NR Description: putative 3-ketoacyl-CoA reductase 1 [Brassica
  misc_feature (11)..(93): Homolog of NCBI NO: 15221751 NR Description: putative b-keto acyl reductase; protein id: [Arabidopsis thaliana] >gi|9743335|gb|AAF97959.1|AC000103_9
  misc_feature (11)..(94): Homolog of NCBI NO: 18408847 NR Description: Expressed protein; protein id: At1g67730.1, by cDNA: 7434. [Arabidopsis thaliana] >gi|21594872|gb|AAM66051.1|
  misc_feature (38)..(94): Homolog of NCBI NO: 11072027 NR Description: F12A21.14 [Arabidopsis thaliana]
  misc_feature (6)..(100): Homolog of NCBI NO: 38344108 NR Description: OSJNBb0050O03.5 [Oryza sativa (japonica
  misc_feature (12)..(94): Homolog of NCBI NO: 37589733 NR Description: Unknown (protein for MGC:73289) [Danio rerio]
  misc_feature (10)..(10): Xaa is any aa, unknown or other
  misc_feature (97)..(97): Xaa is any aa, unknown or other
  misc_feature (116)..(116): Xaa is any aa, unknown or other
  misc_feature (125)..(125): Xaa is any aa, unknown or other
MVHVLGAAAXWFAALVAVGLYTALRSAATFLAWLHRAFLRPGRDLAGRYGTWAVVTGATDGIGRAVALELARAGLHLVLVGRSPDKLARVAKELCGXRAGVQGAERGVRPRRDRGXRAARGGAGXGRRGGPRRGRARQQRRRDVPVRRLLPRGGGPRVGGRGAGQRRGRHADHARPAAGDGGQGQGRRRQRGLRLQRRRPGLPALRRLRGQQSVRRPVFSKPECGIQTIRRRRAVPDTPVRRYQDVAREGRVSVHTVARGVRQGRPSLRWLRGEVRPVLAPLGPVVPGVPSAGRCSQPLAPPNWPPEEERDEGSAKGKRLQLD

SEQ ID NO: 6581 - DNA, 721 bp, Zea mays subsp. mays
  misc_feature (1)..(721): Ceres Seq. ID no. 12374412
  misc_feature: MA Experiment ID: 108535 Result: Up-regulated in Transcription
  misc_feature: MA Experiment 108535 PARAMETER Experiment Name: Zm_Meristem_P Parameter: Age (day) Value: 8
  misc_feature: MA Experiment 108535 PARAMETER Experiment Name: Zm_Meristem_P Parameter: Organism Value: Zea mays
  misc_feature: MA Experiment 108535 PARAMETER Experiment Name: Zm_Meristem_P Parameter: Plant Line Value: 35A19
  misc_feature: MA Experiment 108535 PARAMETER Experiment Name: Zm_Meristem_P Parameter: Tissue Value: Root Meristem vs. Above Root Meristem
  misc_feature: MA Experiment ID: 108556 Result: Down-regulated in Transcription
  misc_feature: MA Experiment 108556 PARAMETER Experiment Name: Zm_Drought_P Parameter: Age (day) Value: 9
  misc_feature: MA Experiment 108556 PARAMETER Experiment Name: Zm_Drought_P Parameter: Organism Value: Zea mays
  misc_feature: MA Experiment 108556 PARAMETER Experiment Name: Zm_Drought_P Parameter: Plant Line Value: 35A19
  misc_feature: MA Experiment 108556 PARAMETER Experiment Name: Zm_Drought_P Parameter: Timepoint (hr) Value: 24
  misc_feature: MA Experiment 108556 PARAMETER Experiment Name: Zm_Drought_P Parameter: Tissue Value: Aerial
  misc_feature: MA Experiment 108556 PARAMETER Experiment Name: Zm_Drought_P Parameter: Treatment Value: Drought vs. No Drought
  misc_feature: MA Experiment ID: 20000488 Result: Up-regulated in Transcription
  misc_feature: MA Experiment 20000488 PARAMETER Experiment Name: Zm_50mM_NH4NO3_L_to_H_P Parameter: Organism Value: Zea mays
  misc_feature: MA Experiment 20000488 PARAMETER Experiment Name: Zm_50mM_NH4NO3_L_to_H_P Parameter: Timepoint (hr) Value: 8
  misc_feature: MA Experiment 20000488 PARAMETER Experiment Name: Zm_50mM_NH4NO3_L_to_H_P Parameter: Tissue Value: Leaves
  misc_feature: MA Experiment 20000488 PARAMETER Experiment Name: Zm_50mM_NH4NO3_L_to_H_P Parameter: Treatment Value: 50mM NH4NO3 vs. 100mM Mannitol
aaaaaccctagactgcacccccatcccgcagcagccaaaacctacctagccgccgccgcaggcggccccccatcgccgccaagatgcagatctttgtgaagactctgacggggaagaccatcactttggaggtggagtcctccgacaccattgacaatgtgaaggccaagatccaggacaaggagggcatccccccggaccagcagcggctcatcttcgccggcaagcagctcgaggacggtcgcaccctcgccgactacaacattcagaaggagtccaccctccacctggtgctccgcctccgcggtggcgccaagaagcgtaagaagaagacgtacaccaagcccaagaagatcaagcacaagcacaagaaggtgaagctctccgtgctgcagttctataaggtggacgacgccactggcaaggtgacccgcctccgcaaggagtgccccaacacagagtgcggcgcgggcgtcttcatggccaaccacttcgaccgccactactgcggcaagtgcggcctcacctatgtctacaaccagaaggcgtaattgcttgccccgatttgctttatccgccaacctatcaagcattcagatgttggttactcaaattgtatctcatttagatctgtctgaggttgaaacttaaatggagcagtagtatctatcatattggtacccctgttactgagtataattttgttttcatatccatcctt

SEQ ID NO: 6582 - protein, 155 aa, Zea mays subsp. mays; identical to SEQ ID NO: 4073
  peptide (1)..(155): Ceres Seq. ID no. 12374413
  misc_feature (1)..(74): Pfam Name: Ubiquitin family Pfam Description: Ubiquitin family
  misc_feature (1)..(155): Homolog of NCBI NO: 82733 NR Description: ubiquitin / ribosomal protein S27a - maize ubiquitin fusion protein >gi|902527|gb|AAA70105.1| ubiquitin
  misc_feature (1)..(155): Homolog of NCBI NO: 902525 NR Description: ubiquitin fusion protein
  misc_feature (1)..(155): Homolog of NCBI NO: 100598 NR Description: ubiquitin / ribosomal protein S27a.1 - barley
  misc_feature (1)..(155): Homolog of NCBI NO: 34894792 NR Description: ubiquitin / ribosomal protein S27a [Oryza sativa
  misc_feature (1)..(155): Homolog of NCBI NO: 100599 NR Description: ubiquitin / ribosomal protein S27a.2 - barley
  misc_feature (1)..(155): Homolog of NCBI NO: 1044940 NR Description: fusion gene [Zea mays]
  misc_feature (1)..(153): Homolog of NCBI NO: 34581769 NR Description: ubiquitin extension protein [Cucumis sativus]
  misc_feature (1)..(155): Homolog of NCBI NO: 541953 NR Description: ubiquitin/ribosomal protein S27a fusion protein - lupine >gi|438109|emb|CAA80333.1| ubiquitin extension protein
  misc_feature (1)..(153): Homolog of NCBI NO: 279636 NR Description: ubiquitin / ribosomal protein S27a - tomato
  misc_feature (1)..(155): Homolog of NCBI NO: 541954 NR Description: ubiquitin/ribosomal protein S27a fusion protein - lupine >gi|438111|emb|CAA80334.1| ubiquitin extension protein

SEQ ID NO: 6583 - DNA, 1054 bp, Zea mays subsp. mays
  misc_feature (1)..(1054): Ceres Seq. ID no. 12412719
  misc_feature: MA Experiment ID: 108543 Result: Down-regulated in Transcription
agaggcgttggctcgtgtatttttgcaaatatctcctatcccttttctccctcccgcgatctcctccgctcgacgcctgtaccccgccgtcccgcgtccccggtccagctcgaaaccctagacctgtgcggctgtccctattctccccaacggaaagatgtactcggaccagatctccaccgggcgcaagcgctccatccacgaccgccttgacggcgacctccccgccggcacgggcgccggcggccgtgttcgtcacacggtgtccaagaggcaacggcagatagatgaaaaatggaagcatgatctgtatcgggaagacgatgaaccagcttcaaaatcaatagatccaaaggatttgcgattgaagcttcagaggcgaagttctcaacaaagctttaccagcacaaggagatctggtgtgcgtgatttacgtgagaagctatctggtataatgcacccacagccatcaaatgctgatccaaagcccaagccaaagccagtatcagaggttgttaacatctcaaggcgtcaaactgctgatgaaatgcctgcacgtcaaagcaagagagcaccaaaacagacttcattgaagaagacttcacagccaaaggctgaaagtccactcggcagtttcctgagttcccttgggcttgagaagtattcgattaccttccaggcagaggaggttgacatggcagccctaaggcatatgacggagagtgatctgaaagctttgggcattccaatgggtcctcggaagaagattatccttgccttggagccaagagcataagggaatggcaagtgtaggaaggtgggagggatttgctaggcatgctcatgtgcaagttcgataaaactctgtaaccacatcttggaaagggacaaagggtaacaacgacaatggtttgtgggcttcttgtaacacatatcctgccctgttgagcatgttcaacgaagtttaggatgttagaaggcaggccacggcgtgtattgatgcaacttctatttctgtgttgattaaatggtgcggtatacatgttggggctcc

SEQ ID NO: 6584 - protein, 212 aa, Zea mays subsp. mays
  peptide (1)..(212): Ceres Seq. ID no. 12412720
  misc_feature (152)..(208): Pfam Name: SAM domain (Sterile alpha motif) Pfam Description: SAM domain (Sterile alpha motif)
  misc_feature (1)..(198): Homolog of NCBI NO: 39546279 NR Description: OSJNBa0083D01.12 [Oryza sativa (japonica
  misc_feature (1)..(208): Homolog of NCBI NO: 18397861 NR Description: expressed protein; protein id: At3g07170.1, by cDNA: gi_15294217 [Arabidopsis thaliana] unknown protein [Arabidopsis thaliana]
  misc_feature (1)..(208): Homolog of NCBI NO: 30695517 NR Description: expressed protein [Arabidopsis thaliana]
  misc_feature (41)..(210): Homolog of NCBI NO: 38345636 NR Description: OSJNBb0048E02.6 [Oryza sativa (japonica
  misc_feature (75)..(208): Homolog of NCBI NO: 22330538 NR Description: hypothetical protein; protein id: At1g70180.1, by cDNA: gi_17473773 [Arabidopsis thaliana]
MYSDQISTGRKRSIHDRLDGDLPAGTGAGGRVRHTVSKRQRQIDEKWKHDLYREDDEPASKSIDPKDLRLKLQRRSSQQSFTSTRRSGVRDLREKLSGIMHPQPSNADPKPKPKPVSEVVNISRRQTADEMPARQSKRAPKQTSLKKTSQPKAESPLGSFLSSLGLEKYSITFQAEEVDMAALRHMTESDLKALGIPMGPRKKIILALEPRA

SEQ ID NO: 6585 - protein, 113 aa, Zea mays subsp. mays
  peptide (1)..(113): Ceres Seq. ID no. 12412721
  misc_feature (53)..(109): Pfam Name: SAM domain (Sterile alpha motif) Pfam Description: SAM domain (Sterile alpha motif)
  misc_feature (1)..(99): Homolog of NCBI NO: 39546279 NR Description: OSJNBa0083D01.12 [Oryza sativa (japonica
  misc_feature (1)..(109): Homolog of NCBI NO: 18397861 NR Description: expressed protein; protein id: At3g07170.1, by cDNA: gi_15294217 [Arabidopsis thaliana] unknown protein [Arabidopsis thaliana]
  misc_feature (1)..(109): Homolog of NCBI NO: 30695517 NR Description: expressed protein [Arabidopsis thaliana]
  misc_feature (1)..(111): Homolog of NCBI NO: 38345636 NR Description: OSJNBb0048E02.6 [Oryza sativa (japonica
  misc_feature (1)..(109): Homolog of NCBI NO: 22330538 NR Description: hypothetical protein; protein id: At1g70180.1, by cDNA: gi_17473773 [Arabidopsis thaliana]
MHPQPSNADPKPKPKPVSEVVNISRRQTADEMPARQSKRAPKQTSLKKTSQPKAESPLGSFLSSLGLEKYSITFQAEEVDMAALRHMTESDLKALGIPMGPRKKIILALEPRA

SEQ ID NO: 6586 - DNA, 1357 bp, Zea mays subsp. mays
  misc_feature (1)..(1357): Ceres Seq. ID no. 12356351
  misc_feature: MA Experiment ID: 108527 Result: Down-regulated in Transcription
  misc_feature: MA Experiment 108527 PARAMETER Experiment Name: Zm_5mM_NO_P Parameter: Age (day) Value: 8
  misc_feature: MA Experiment 108527 PARAMETER Experiment Name: Zm_5mM_NO_P Parameter: Organism Value: Zea mays
  misc_feature: MA Experiment 108527 PARAMETER Experiment Name: Zm_5mM_NO_P Parameter: Plant Line Value: 35A19
  misc_feature: MA Experiment 108527 PARAMETER Experiment Name: Zm_5mM_NO_P Parameter: Timepoint (hr) Value: 6
  misc_feature: MA Experiment 108527 PARAMETER Experiment Name: Zm_5mM_NO_P Parameter: Tissue Value: Aerial
  misc_feature: MA Experiment 108527 PARAMETER Experiment Name: Zm_5mM_NO_P Parameter: Treatment Value: 5mM NO vs. No Treatment
  misc_feature: MA Experiment ID: 108535 Result: Up-regulated in Transcription
  misc_feature: MA Experiment 108535 PARAMETER Experiment Name: Zm_Meristem_P Parameter: Age (day) Value: 8
  misc_feature: MA Experiment 108535 PARAMETER Experiment Name: Zm_Meristem_P Parameter: Organism Value: Zea mays
  misc_feature: MA Experiment 108535 PARAMETER Experiment Name: Zm_Meristem_P Parameter: Plant Line Value: 35A19
  misc_feature: MA Experiment 108535 PARAMETER Experiment Name: Zm_Meristem_P Parameter: Tissue Value: Root Meristem vs. Above Root Meristem
  misc_feature: MA Experiment ID: 108544 Result: Down-regulated in Transcription
  misc_feature: MA Experiment ID: 108556 Result: Down-regulated in Transcription
  misc_feature: MA Experiment 108556 PARAMETER Experiment Name: Zm_Drought_P Parameter: Age (day) Value: 9
  misc_feature: MA Experiment 108556 PARAMETER Experiment Name: Zm_Drought_P Parameter: Organism Value: Zea mays
  misc_feature: MA Experiment 108556 PARAMETER Experiment Name: Zm_Drought_P Parameter: Plant Line Value: 35A19
  misc_feature: MA Experiment 108556 PARAMETER Experiment Name: Zm_Drought_P Parameter: Timepoint (hr) Value: 24
  misc_feature: MA Experiment 108556 PARAMETER Experiment Name: Zm_Drought_P Parameter: Tissue Value: Aerial
  misc_feature: MA Experiment 108556 PARAMETER Experiment Name: Zm_Drought_P Parameter: Treatment Value: Drought vs. No Drought
  misc_feature: MA Experiment ID: 108597 Result: Down-regulated in Transcription
  misc_feature: MA Experiment 108597 PARAMETER Experiment Name: Zm_100uM_ABA_P Parameter: Age (day) Value: 9
  misc_feature: MA Experiment 108597 PARAMETER Experiment Name: Zm_100uM_ABA_P Parameter: Organism Value: Zea mays
  misc_feature: MA Experiment 108597 PARAMETER Experiment Name: Zm_100uM_ABA_P Parameter: Plant Line Value: 35A19
  misc_feature: MA Experiment 108597 PARAMETER Experiment Name: Zm_100uM_ABA_P Parameter: Timepoint (hr) Value: 24
  misc_feature: MA Experiment 108597 PARAMETER Experiment Name: Zm_100uM_ABA_P Parameter: Tissue Value: Aerial
  misc_feature: MA Experiment 108597 PARAMETER Experiment Name: Zm_100uM_ABA_P Parameter: Treatment Value: 100uM ABA vs. No Treatment
  misc_feature: MA Experiment ID: 108687 Result: Down-regulated in Transcription
  misc_feature: MA Experiment 108687 PARAMETER Experiment Name: Zm_Embryos-Flowers__P Parameter: Tissue Value: Embryo vs. Aerial+
  misc_feature: MA Experiment ID: 20000108 Result: Up-regulated in Transcription
  misc_feature: MA Experiment 20000108 PARAMETER Experiment Name: Zm_Root-Tips_P Parameter: Age (day) Value: 12
  misc_feature: MA Experiment 20000108 PARAMETER Experiment Name: Zm_Root-Tips_P Parameter: Organism Value: Zea mays
  misc_feature: MA Experiment 20000108 PARAMETER Experiment Name: Zm_Root-Tips_P Parameter: Tissue Value: Root tips vs. Root mid region    35
  misc_feature: MA Experiment 20000108 PARAMETER Experiment Name: Zm_Root-Tips_P Parameter: Tissue Value: Root tips vs. Root mid region   Sequence Listing-Misc Features (4)
  misc_feature: MA Experiment ID: 20000488 Result: Down-regulated in Transcription
  misc_feature: MA Experiment 20000488 PARAMETER Experiment Name: Zm_50mM_NH4NO3_L_to_H_P Parameter: Organism Value: Zea mays
  misc_feature: MA Experiment 20000488 PARAMETER Experiment Name: Zm_50mM_NH4NO3_L_to_H_P Parameter: Timepoint (hr) Value: 8
  misc_feature: MA Experiment 20000488 PARAMETER Experiment Name: Zm_50mM_NH4NO3_L_to_H_P Parameter: Tissue Value: Leaves
  misc_feature: MA Experiment 20000488 PARAMETER Experiment Name: Zm_50mM_NH4NO3_L_to_H_P Parameter: Treatment Value: 50mM NH4NO3 vs. 100mM Mannitol
  misc_feature: MA Experiment ID: 20000626 Result: Down-regulated in Transcription
  misc_feature: MA Experiment 20000626 PARAMETER Experiment Name: Zm_Herbicide-Treatments_P Parameter: Timepoint (hr) Value: 12
  misc_feature: MA Experiment 20000626 PARAMETER Experiment Name: Zm_Herbicide-Treatments_P Parameter: Tissue Value: Aerial
  misc_feature: MA Experiment 20000626 PARAMETER Experiment Name: Zm_Herbicide-Treatments_P Parameter: Treatment Value: Roundup vs. No Treatment
aggagaactcgaacagacatccgctccccgctcccgagtcccgagtaccggcctcgcggtctcggttcggctacgcccggtccctagagaaaggccacacacacccggacaccccccacttcttgctctcgcagtgtcgctcactcctgccgccaccatctggatcacgtcgccggcgccaatgtcggcgcacctcaccgtcgcgctgttgctcgcagtagccgccgcgtcggcccgcggctccgacgtgccgtcgttcccgctctcccaggcgcagtccccgtccaactcctcgtccccgtcgaacgcctcctcgccgccgtgtcacctcgacctctccgcccgagctcttcggtggcgtggcagcggcgtgcggctccagcggggggccgggctcgctcgaccgcggccgctgctgccctgtcctcgcggcctggctcttcgcggcgcacgcgcgcaccgcgctgtccgtgcccccggcacccgccccctcggcggtcgccggggaggaggggctggggcccggcgacgacgggcccatggtgccgtacgacaaccagaggtgcgtggacgcgctgggcgccgctttggagaagcgcggggtggcgctgccccggcccaacgcaacttgcgacactgtgctctgcttctgcggcatccggctccaccagatcggctcgctccgctgcccctccgcgttcgccgtcggcgctggcgctggcgccgcggccaagaacgccacgcccaccgccgccgtgaagggcctggagaagagctgccgcaacgcctcctacgccggctgctctcgatgcgtgcagtctctgcaaaagctgaaggggaacgtgagccgcgaggtctccggtgccggcggcgaccgcgcgcggcggatgctggggcgggactgccagcttatgggcctcacgtggctgctggccaagaacaagacggcgtacatccccaccgtctccgccgtgctgcgcgccatgctctacaccgcgcgcccgacggagtccgccggcgcggcgccgcggtgcagccccgaccaggagaacatgccgctggccgtggactcgctgcagttcgagcgcaccggcagcaccacgggatccgcggctgccaacgcgacgccgcgcggcgccctcctcctcggcctcgcgctcggcctgacgatcggccggtgggatgcgttctggttcttgtgaaccaatgcaaagagggctggaccgctgcagggcgtagggtcggtggtggaaccttgtcgatagacgtatcttgtagtgctagtcgttagcaggaggtactgtagcttattttgcatagcgaggatttggcagagatgacggcatgcatggctgtg

SEQ ID NO: 6587 - protein, 429 aa, Zea mays subsp. mays
  peptide (1)..(429): Ceres Seq. ID no. 12356352
  misc_feature (61)..(166): Homolog of NCBI NO: 34394002 NR Description: unknown protein [Oryza sativa (japonica
  misc_feature (106)..(368): Homolog of NCBI NO: 23106243 NR Description: hypothetical protein [Azotobacter vinelandii]
GELEQTSAPRSRVPSTGLAVSVRLRPVPRERPHTPGHPPLLALAVSLTPAATIWITSPAPMSAHLTVALLLAVAAASARGSDVPSFPLSQAQSPSNSSSPSNASSPPCHLDLSARALRWRGSGVRLQRGAGLARPRPLLPCPRGLALRGARAHRAVRAPGTRPLGGRRGGGAGARRRRAHGAVRQPEVRGRAGRRFGEARGGAAPAQRNLRHCALLLRHPAPPDRLAPLPLRVRRRRWRWRRGQERHAHRRREGPGEELPQRLLRRLLSMRAVSAKAEGEREPRGLRCRRRPRAADAGAGLPAYGPHVAAGQEQDGVHPHRLRRAARHALHRAPDGVRRRGAAVQPRPGEHAAGRGLAAVRAHRQHHGIRGCQRDAARRPPPRPRARPDDRPVGCVLVLVNQCKEGWTAAGRRVGGGTLSIDVSCSASR

SEQ ID NO: 6588 - protein, 369 aa, Zea mays subsp. mays
  peptide (1)..(369): Ceres Seq. ID no. 12356353
  misc_feature (1)..(106): Homolog of NCBI NO: 34394002 NR Description: unknown protein [Oryza sativa (japonica
  misc_feature (46)..(308): Homolog of NCBI NO: 23106243 NR Description: hypothetical protein [Azotobacter vinelandii]
MSAHLTVALLLAVAAASARGSDVPSFPLSQAQSPSNSSSPSNASSPPCHLDLSARALRWRGSGVRLQRGAGLARPRPLLPCPRGLALRGARAHRAVRAPGTRPLGGRRGGGAGARRRRAHGAVRQPEVRGRAGRRFGEARGGAAPAQRNLRHCALLLRHPAPPDRLAPLPLRVRRRRWRWRRGQERHAHRRREGPGEELPQRLLRRLLSMRAVSAKAEGEREPRGLRCRRRPRAADAGAGLPAYGPHVAAGQEQDGVHPHRLRRAARHALHRAPDGVRRRGAAVQPRPGEHAAGRGLAAVRAHRQHHGIRGCQRDAARRPPPRPRARPDDRPVGCVLVLVNQCKEGWTAAGRRVGGGTLSIDVSCSASR

SEQ ID NO: 6589 - protein, 220 aa, Zea mays subsp. mays
  peptide (1)..(220): Ceres Seq. ID no. 12356354
  misc_feature (1)..(212): Homolog of NCBI NO: 34394002 NR Description: unknown protein [Oryza sativa (japonica
  misc_feature (1)..(188): Homolog of NCBI NO: 18417127 NR Description: expressed protein; protein id: At4g28100.1, by cDNA: 42155. [Arabidopsis thaliana] >gi|7486959|pir||T02911
  misc_feature (1)..(188): Homolog of NCBI NO: 21593735 NR Description: unknown [Arabidopsis thaliana]
  misc_feature (1)..(188): Homolog of NCBI NO: 18401752 NR Description: expressed protein; protein id: At3g18050.1, by cDNA: gi_15451205 [Arabidopsis thaliana] emb|CAB36779.1~gene_id:MRC8.3~similar to unknown protein
MVPYDNQRCVDALGAALEKRGVALPRPNATCDTVLCFCGIRLHQIGSLRCPSAFAVGAGAGAAAKNATPTAAVKGLEKSCRNASYAGCSRCVQSLQKLKGNVSREVSGAGGDRARRMLGRDCQLMGLTWLLAKNKTAYIPTVSAVLRAMLYTARPTESAGAAPRCSPDQENMPLAVDSLQFERTGSTTGSAAANATPRGALLLGLALGLTIGRWDAFWFL

SEQ ID NO: 6590 - DNA, 1345 bp, Zea mays subsp. mays
  misc_feature (1)..(1345): Ceres Seq. ID no. 12348011
  misc_feature: MA Experiment ID: 108527 Result: Down-regulated in Transcription
  misc_feature: MA Experiment 108527 PARAMETER Experiment Name: Zm_5mM_NO_P Parameter: Age (day) Value: 8
  misc_feature: MA Experiment 108527 PARAMETER Experiment Name: Zm_5mM_NO_P Parameter: Organism Value: Zea mays
  misc_feature: MA Experiment 108527 PARAMETER Experiment Name: Zm_5mM_NO_P Parameter: Plant Line Value: 35A19
  misc_feature: MA Experiment 108527 PARAMETER Experiment Name: Zm_5mM_NO_P Parameter: Timepoint (hr) Value: 6
  misc_feature: MA Experiment 108527 PARAMETER Experiment Name: Zm_5mM_NO_P Parameter: Tissue Value: Aerial
  misc_feature: MA Experiment 108527 PARAMETER Experiment Name: Zm_5mM_NO_P Parameter: Treatment Value: 5mM NO vs. No Treatment
  misc_feature: MA Experiment ID: 108535 Result: Down-regulated in Transcription
  misc_feature: MA Experiment 108535 PARAMETER Experiment Name: Zm_Meristem_P Parameter: Age (day) Value: 8
  misc_feature: MA Experiment 108535 PARAMETER Experiment Name: Zm_Meristem_P Parameter: Organism Value: Zea mays
  misc_feature: MA Experiment 108535 PARAMETER Experiment Name: Zm_Meristem_P Parameter: Plant Line Value: 35A19
  misc_feature: MA Experiment 108535 PARAMETER Experiment Name: Zm_Meristem_P Parameter: Tissue Value: Root Meristem vs. Above Root Meristem
  misc_feature: MA Experiment ID: 108688 Result: Down-regulated in Transcription
  misc_feature: MA Experiment 108688 PARAMETER Experiment Name: Zm_Embryos-Flowers__P Parameter: Tissue Value: Immature Flowers vs. Aerial+
  misc_feature: MA Experiment ID: 108689 Result: Up-regulated in Transcription
  misc_feature: MA Experiment 108689 PARAMETER Experiment Name: Zm_Drought_Roots_P Parameter: Age (day) Value: 9
  misc_feature: MA Experiment 108689 PARAMETER Experiment Name: Zm_Drought_Roots_P Parameter: Organism Value: Zea mays
  misc_feature: MA Experiment 108689 PARAMETER Experiment Name: Zm_Drought_Roots_P Parameter: Plant Line Value: 35A19
  misc_feature: MA Experiment 108689 PARAMETER Experiment Name: Zm_Drought_Roots_P Parameter: Timepoint (hr) Value: 24
  misc_feature: MA Experiment 108689 PARAMETER Experiment Name: Zm_Drought_Roots_P Parameter: Tissue Value: Roots
  misc_feature: MA Experiment 108689 PARAMETER Experiment Name: Zm_Drought_Roots_P Parameter: Treatment Value: Drought vs. No Drought
  misc_feature: MA Experiment ID: 20000108 Result: Down-regulated in Transcription
  misc_feature: MA Experiment 20000108 PARAMETER Experiment Name: Zm_Root-Tips_P Parameter: Age (day) Value: 12
  misc_feature: MA Experiment 20000108 PARAMETER Experiment Name: Zm_Root-Tips_P Parameter: Organism Value: Zea mays
  misc_feature: MA Experiment 20000108 PARAMETER Experiment Name: Zm_Root-Tips_P Parameter: Tissue Value: Root tips vs. Root mid region    35
  misc_feature: MA Experiment 20000108 PARAMETER Experiment Name: Zm_Root-Tips_P Parameter: Tissue Value: Root tips vs. Root mid region   Sequence Listing-Misc Features (4)
  misc_feature: MA Experiment ID: 20000487 Result: Up-regulated in Transcription
  misc_feature: MA Experiment 20000487 PARAMETER Experiment Name: Zm_50mM_NH4NO3_L_to_H_P Parameter: Organism Value: Zea mays
  misc_feature: MA Experiment 20000487 PARAMETER Experiment Name: Zm_50mM_NH4NO3_L_to_H_P Parameter: Timepoint (hr) Value: 4
  misc_feature: MA Experiment 20000487 PARAMETER Experiment Name: Zm_50mM_NH4NO3_L_to_H_P Parameter: Tissue Value: Leaves
  misc_feature: MA Experiment 20000487 PARAMETER Experiment Name: Zm_50mM_NH4NO3_L_to_H_P Parameter: Treatment Value: 50mM NH4NO3 vs. 100mM Mannitol
  misc_feature: MA Experiment ID: 20000488 Result: Up-regulated in Transcription
  misc_feature: MA Experiment 20000488 PARAMETER Experiment Name: Zm_50mM_NH4NO3_L_to_H_P Parameter: Organism Value: Zea mays
  misc_feature: MA Experiment 20000488 PARAMETER Experiment Name: Zm_50mM_NH4NO3_L_to_H_P Parameter: Timepoint (hr) Value: 8
  misc_feature: MA Experiment 20000488 PARAMETER Experiment Name: Zm_50mM_NH4NO3_L_to_H_P Parameter: Tissue Value: Leaves
  misc_feature: MA Experiment 20000488 PARAMETER Experiment Name: Zm_50mM_NH4NO3_L_to_H_P Parameter: Treatment Value: 50mM NH4NO3 vs. 100mM Mannitol
  misc_feature: MA Experiment ID: 20000492 Result: Down-regulated in Transcription
  misc_feature: MA Experiment 20000492 PARAMETER Experiment Name: Zm_Hybrid_Seed_Dev_P Parameter: DAP Value: 12
  misc_feature: MA Experiment 20000492 PARAMETER Experiment Name: Zm_Hybrid_Seed_Dev_P Parameter: Organism Value: Zea mays
  misc_feature: MA Experiment 20000492 PARAMETER Experiment Name: Zm_Hybrid_Seed_Dev_P Parameter: Plant Line Value: 35A19
  misc_feature: MA Experiment 20000492 PARAMETER Experiment Name: Zm_Hybrid_Seed_Dev_P Parameter: Tissue Value: Fert Kernel vs. Unfert Floret
  misc_feature: MA Experiment ID: 20000535 Result: Down-regulated in Transcription
  misc_feature: MA Experiment 20000535 PARAMETER Experiment Name: Zm_Hybrid_Seed_Dev_P Parameter: DAP Value: 30 vs. 12
  misc_feature: MA Experiment 20000535 PARAMETER Experiment Name: Zm_Hybrid_Seed_Dev_P Parameter: Organism Value: Zea mays
  misc_feature: MA Experiment 20000535 PARAMETER Experiment Name: Zm_Hybrid_Seed_Dev_P Parameter: Plant Line Value: 35A19
  misc_feature: MA Experiment 20000535 PARAMETER Experiment Name: Zm_Hybrid_Seed_Dev_P Parameter: Tissue Value: Embryo vs. Unfert Floret
  misc_feature: MA Experiment ID: 20001606 Result: Up-regulated in Transcription
  misc_feature: MA Experiment 20001606 PARAMETER Experiment Name: Zm_50ppm_KNO3_L-to-H_P Parameter: Age (day) Value: 19
  misc_feature: MA Experiment 20001606 PARAMETER Experiment Name: Zm_50ppm_KNO3_L-to-H_P Parameter: Organism Value: Zea mays
  misc_feature: MA Experiment 20001606 PARAMETER Experiment Name: Zm_50ppm_KNO3_L-to-H_P Parameter: Plant Line Value: 35A19
  misc_feature: MA Experiment 20001606 PARAMETER Experiment Name: Zm_50ppm_KNO3_L-to-H_P Parameter: Timepoint (hr) Value: 8
  misc_feature: MA Experiment 20001606 PARAMETER Experiment Name: Zm_50ppm_KNO3_L-to-H_P Parameter: Tissue Value: Shoots
  misc_feature: MA Experiment 20001606 PARAMETER Experiment Name: Zm_50ppm_KNO3_L-to-H_P Parameter: Treatment Value: 50ppm KNO3 vs. 50ppm KCl
  misc_feature: MA Experiment ID: 20001613 Result: Up-regulated in Transcription
  misc_feature: MA Experiment 20001613 PARAMETER Experiment Name: Zm_50ppm_KNO3_L-to-H_P Parameter: Age (day) Value: 20
  misc_feature: MA Experiment 20001613 PARAMETER Experiment Name: Zm_50ppm_KNO3_L-to-H_P Parameter: Organism Value: Zea mays
  misc_feature: MA Experiment 20001613 PARAMETER Experiment Name: Zm_50ppm_KNO3_L-to-H_P Parameter: Plant Line Value: 35A19
  misc_feature: MA Experiment 20001613 PARAMETER Experiment Name: Zm_50ppm_KNO3_L-to-H_P Parameter: Timepoint (hr) Value: 24
  misc_feature: MA Experiment 20001613 PARAMETER Experiment Name: Zm_50ppm_KNO3_L-to-H_P Parameter: Tissue Value: Roots
  misc_feature: MA Experiment 20001613 PARAMETER Experiment Name: Zm_50ppm_KNO3_L-to-H_P Parameter: Treatment Value: 50ppm KNO3 vs. 50ppm KCl
actccggcattcgcccccaaaaaatcgagccgaaaaagatcaaaagaaaaaaaaaagaagaaaaaaaaccctaaccactccgatcgaatcatccgagggccgcagcagcccgacgaggctatgtctcaggcaaccgccgcctcccgggatcgcttcccctggtgatacaactcgggccgttcatttcatctttccgtggggatatgagggccgctccgaccgatccgcccacggcgccggcgaagtcgatgctgaggcggctgttcgatcgccagctcctgcggatctcgccagcggagcgtctaccgtcggcgggggcgggagagaaggatgaggcggagccgagctccgtgtgcctggacggcatggtgcgcagcttcatggaggacgacgtcggcagcgagaaggctgcccacgggggccggtactgtaactgcttccacggaggcgataattcagatgacgaggaggacgacgaagcggcggcggcggcctccgacgtcgccgagacgatcaagggcctcgtccactgcgccacgcttcgggagcgcaacctcctcgccgacgtgtgcgcgcacctggagcggcatcgcgaggcgggggcccggcggcgcgacctcctccgcctggtagcctcgtcgctgcgcggcgcggggcacgacgcctccgtctgcgtctcccgctgggacaagtccccgtcccacccggtcggcgagcacgcttacatcgacgtgctcctcccggcggcctcggaccgcggcgcgcgcgagcgcgtcctggtggacgtggacttccggtcggcgttcgaggtcgcgcgacccaccaaggcgtaccgcgccctgctgcagcggctgccggcggtgttcgtgggcaaggacgacaggctccgcctcctcgttgccgccgccgccgacgccgcgcgcgccagcctcaagaagcgcggcctccacctcccgccctggcgtaagcccgagtacatgcgcgccaagtggctctccccctaccaccgcgaggcgccggtggccgaagaggcggcctccgcctccgcggacgaggacgacgggttcggacccggaaccggaaccgccgcgtgacaactggacacttgcaatttttgtcttggaagaggttgtagctgcaaaagcttgagattctcttgaaattactctttgttcgggggttgtacctagagtaactatggactacggtgtgtgtgagagagagagagaggtatgcatcactcatcactgtgctgagtaccgcgcgagaaatgaaggcgaggggtatatcatgggtagtgctagttttaggaagagaaataaagcaaaatatcggattaatatcc

SEQ ID NO: 6591 - protein, 296 aa, Zea mays subsp. mays
  peptide (1)..(296): Ceres Seq. ID no. 12348012
  misc_feature (52)..(269): Pfam Name: Protein of unknown function (DUF506) Pfam Description: Protein of unknown function (DUF506)
  misc_feature (1)..(287): Homolog of NCBI NO: 37534384 NR Description: unknown protein [Oryza sativa (japonica
  misc_feature (16)..(287): Homolog of NCBI NO: 20042978 NR Description: Hypothetical protein [Oryza sativa]
  misc_feature (3)..(294): Homolog of NCBI NO: 34902608 NR Description: Unknown protein [Oryza sativa (japonica
  misc_feature (8)..(278): Homolog of NCBI NO: 34897230 NR Description: unknown protein [Oryza sativa (japonica
  misc_feature (1)..(269): Homolog of NCBI NO: 25408622 NR Description: hypothetical protein At2g38820 [imported] -
  misc_feature (1)..(283): Homolog of NCBI NO: 15228917 NR Description: unknown protein; protein id: At3g22970.1 thaliana] >gi|11994729|dbj|BAB03045.1|
  misc_feature (1)..(132): Homolog of NCBI NO: 18404867 NR Description: expressed protein; protein id: At2g38820.1, by cDNA: gi_16649128, supported by cDNA: gi_20148590 [Arabidopsis >gi|16649129|gb|AAL24416.1| Unknown protein [Arabidopsis
  misc_feature (135)..(269): Homolog of NCBI NO: 18404867 NR Description: expressed protein; protein id: At2g38820.1, by cDNA: gi_16649128, supported by cDNA: gi_20148590 [Arabidopsis >gi|16649129|gb|AAL24416.1| Unknown protein [Arabidopsis
  misc_feature (1)..(283): Homolog of NCBI NO: 28058790 NR Description: unknown protein [Arabidopsis thaliana]
  misc_feature (1)..(285): Homolog of NCBI NO: 30682929 NR Description: expressed protein [Arabidopsis thaliana]
MRAAPTDPPTAPAKSMLRRLFDRQLLRISPAERLPSAGAGEKDEAEPSSVCLDGMVRSFMEDDVGSEKAAHGGRYCNCFHGGDNSDDEEDDEAAAAASDVAETIKGLVHCATLRERNLLADVCAHLERHREAGARRRDLLRLVASSLRGAGHDASVCVSRWDKSPSHPVGEHAYIDVLLPAASDRGARERVLVDVDFRSAFEVARPTKAYRALLQRLPAVFVGKDDRLRLLVAAAADAARASLKKRGLHLPPWRKPEYMRAKWLSPYHREAPVAEEAASASADEDDGFGPGTGTAA

SEQ ID NO: 6592 - protein, 281 aa, Zea mays subsp. mays
  peptide (1)..(281): Ceres Seq. ID no. 12348013
  misc_feature (37)..(254): Pfam Name: Protein of unknown function (DUF506) Pfam Description: Protein of unknown function (DUF506)
  misc_feature (1)..(272): Homolog of NCBI NO: 37534384 NR Description: unknown protein [Oryza sativa (japonica
  misc_feature (1)..(272): Homolog of NCBI NO: 20042978 NR Description: Hypothetical protein [Oryza sativa]
  misc_feature (1)..(279): Homolog of NCBI NO: 34902608 NR Description: Unknown protein [Oryza sativa (japonica
  misc_feature (1)..(263): Homolog of NCBI NO: 34897230 NR Description: unknown protein [Oryza sativa (japonica
  misc_feature (1)..(254): Homolog of NCBI NO: 25408622 NR Description: hypothetical protein At2g38820 [imported] -
  misc_feature (1)..(268): Homolog of NCBI NO: 15228917 NR Description: unknown protein; protein id: At3g22970.1 thaliana] >gi|11994729|dbj|BAB03045.1|
  misc_feature (1)..(117): Homolog of NCBI NO: 18404867 NR Description: expressed protein; protein id: At2g38820.1, by cDNA: gi_16649128, supported by cDNA: gi_20148590 [Arabidopsis >gi|16649129|gb|AAL24416.1| Unknown protein [Arabidopsis
  misc_feature (120)..(254): Homolog of NCBI NO: 18404867 NR Description: expressed protein; protein id: At2g38820.1, by cDNA: gi_16649128, supported by cDNA: gi_20148590 [Arabidopsis >gi|16649129|gb|AAL24416.1| Unknown protein [Arabidopsis
  misc_feature (1)..(268): Homolog of NCBI NO: 28058790 NR Description: unknown protein [Arabidopsis thaliana]
  misc_feature (1)..(270): Homolog of NCBI NO: 30682929 NR Description: expressed protein [Arabidopsis thaliana]
MLRRLFDRQLLRISPAERLPSAGAGEKDEAEPSSVCLDGMVRSFMEDDVGSEKAAHGGRYCNCFHGGDNSDDEEDDEAAAAASDVAETIKGLVHCATLRERNLLADVCAHLERHREAGARRRDLLRLVASSLRGAGHDASVCVSRWDKSPSHPVGEHAYIDVLLPAASDRGARERVLVDVDFRSAFEVARPTKAYRALLQRLPAVFVGKDDRLRLLVAAAADAARASLKKRGLHLPPWRKPEYMRAKWLSPYHREAPVAEEAASASADEDDGFGPGTGTAA

SEQ ID NO: 6593 - protein, 242 aa, Zea mays subsp. mays
  peptide (1)..(242): Ceres Seq. ID no. 12348014
  misc_feature (1)..(215): Pfam Name: Protein of unknown function (DUF506) Pfam Description: Protein of unknown function (DUF506)
  misc_feature (1)..(233): Homolog of NCBI NO: 37534384 NR Description: unknown protein [Oryza sativa (japonica
  misc_feature (1)..(233): Homolog of NCBI NO: 20042978 NR Description: Hypothetical protein [Oryza sativa]
  misc_feature (1)..(240): Homolog of NCBI NO: 34902608 NR Description: Unknown protein [Oryza sativa (japonica
  misc_feature (1)..(224): Homolog of NCBI NO: 34897230 NR Description: unknown protein [Oryza sativa (japonica
  misc_feature (1)..(215): Homolog of NCBI NO: 25408622 NR Description: hypothetical protein At2g38820 [imported] -
  misc_feature (1)..(229): Homolog of NCBI NO: 15228917 NR Description: unknown protein; protein id: At3g22970.1 thaliana] >gi|11994729|dbj|BAB03045.1|
  misc_feature (1)..(78): Homolog of NCBI NO: 18404867 NR Description: expressed protein; protein id: At2g38820.1, by cDNA: gi_16649128, supported by cDNA: gi_20148590 [Arabidopsis >gi|16649129|gb|AAL24416.1| Unknown protein [Arabidopsis
  misc_feature (81)..(215): Homolog of NCBI NO: 18404867 NR Description: expressed protein; protein id: At2g38820.1, by cDNA: gi_16649128, supported by cDNA: gi_20148590 [Arabidopsis >gi|16649129|gb|AAL24416.1| Unknown protein [Arabidopsis
  misc_feature (1)..(229): Homolog of NCBI NO: 28058790 NR Description: unknown protein [Arabidopsis thaliana]
  misc_feature (1)..(231): Homolog of NCBI NO: 30682929 NR Description: expressed protein [Arabidopsis thaliana]
MVRSFMEDDVGSEKAAHGGRYCNCFHGGDNSDDEEDDEAAAAASDVAETIKGLVHCATLRERNLLADVCAHLERHREAGARRRDLLRLVASSLRGAGHDASVCVSRWDKSPSHPVGEHAYIDVLLPAASDRGARERVLVDVDFRSAFEVARPTKAYRALLQRLPAVFVGKDDRLRLLVAAAADAARASLKKRGLHLPPWRKPEYMRAKWLSPYHREAPVAEEAASASADEDDGFGPGTGTAA

SEQ ID NO: 6594 - DNA, 2011 bp, Zea mays subsp. mays
  misc_feature (1)..(2011): Ceres Seq. ID no. 12372807
  misc_feature: MA Experiment ID: 108533 Result: Up-regulated in Transcription
  misc_feature: MA Experiment 108533 PARAMETER Experiment Name: Zm_4deg_Cold_P Parameter: Age (hr) Value: 8
  misc_feature: MA Experiment 108533 PARAMETER Experiment Name: Zm_4deg_Cold_P Parameter: Organism Value: Zea mays
  misc_feature: MA Experiment 108533 PARAMETER Experiment Name: Zm_4deg_Cold_P Parameter: Plant Line Value: 35A19
  misc_feature: MA Experiment 108533 PARAMETER Experiment Name: Zm_4deg_Cold_P Parameter: Temperature (deg C) Value: 4 vs. 22
  misc_feature: MA Experiment 108533 PARAMETER Experiment Name: Zm_4deg_Cold_P Parameter: Timepoint (hr) Value: 1
  misc_feature: MA Experiment 108533 PARAMETER Experiment Name: Zm_4deg_Cold_P Parameter: Tissue Value: Aerial
  misc_feature: MA Experiment ID: 20000626 Result: Down-regulated in Transcription
  misc_feature: MA Experiment 20000626 PARAMETER Experiment Name: Zm_Herbicide-Treatments_P Parameter: Timepoint (hr) Value: 12
  misc_feature: MA Experiment 20000626 PARAMETER Experiment Name: Zm_Herbicide-Treatments_P Parameter: Tissue Value: Aerial
  misc_feature: MA Experiment 20000626 PARAMETER Experiment Name: Zm_Herbicide-Treatments_P Parameter: Treatment Value: Roundup vs. No Treatment
  misc_feature: MA Experiment ID: 20001610 Result: Up-regulated in Transcription
  misc_feature: MA Experiment 20001610 PARAMETER Experiment Name: Zm_50ppm_KNO3_L-to-H_P Parameter: Age (day) Value: 19
  misc_feature: MA Experiment 20001610 PARAMETER Experiment Name: Zm_50ppm_KNO3_L-to-H_P Parameter: Organism Value: Zea mays
  misc_feature: MA Experiment 20001610 PARAMETER Experiment Name: Zm_50ppm_KNO3_L-to-H_P Parameter: Plant Line Value: 35A19
  misc_feature: MA Experiment 20001610 PARAMETER Experiment Name: Zm_50ppm_KNO3_L-to-H_P Parameter: Timepoint (hr) Value: 2
  misc_feature: MA Experiment 20001610 PARAMETER Experiment Name: Zm_50ppm_KNO3_L-to-H_P Parameter: Tissue Value: Roots
  misc_feature: MA Experiment 20001610 PARAMETER Experiment Name: Zm_50ppm_KNO3_L-to-H_P Parameter: Treatment Value: 50ppm KNO3 vs. 50ppm KCl
agaggacgcgcacccggggtggagctgagagcaacaggagctcctgcggcgaattcgggccccgagtacgccggttcaggcggccgccgccggtggaattgtgccagtcgaggtggcctgctggtgcggcgggagtttgcgagtagggcggttccggttttgagtgagcgaaggtgttgttgggggcgtggatctggccggcggcgggcgatgggaaggagggactagggctcgattggagggaaaggcgtgatccatgggcggatgcttctcgcaggaggagcaccggctccagagcaggccagctgaagctgctggaccagacggactgcagaagtcaaaatctgattctaaagctacagcaagtgttcttgctccaccaaaagctgtggtggatctgcaagtggaaggatatggaaatgtgaatattttcacatatgacgaattgagcgcagccacaaaaaacttccgaccagatcaaattcttggagagggtgggtttggagttgtttacaaaggtgtaattgatgaaaatgttagagcaggtttcccatccaggcaggttgctgtgaaagaactaaacccagagggttttcaaggggacaaggagtggctggcagaagtcaactatcttgggcaacttagtcatccaaatcttgttgaactgattggctattgctgtgagggttcacatagactgcttgtgtatgagtacatgggcttgtggaagcctcgaaaagcacctttttcggcgggtttgccttaatatgccatggtcaacacgcatgaagattgcattgggtgctgcaagggggctcgagtaccttcacagagctgagagatccatcatttatcgagatttcaagacatcaaacatcttgctagatgcggattataatgctaagctttcagactttggtctcgcaagaacaggtcctagtggagaccaaacccacgtgtcaactcgtgttatgggaacttatggatacgcggctccagaatatgtcatgactggccatctgacagcacgaagtgatgtttatggctttggagtcgtgcttctagagatgattattggaagaagggctgtggacgatagccggccgagccgtgagcataacctagttgactgggcacggcccctcctcgtccataacaggaagctgttccggataatcgatccaagaatggaagggcagtactccaccaaggctgccaccgaggtggcaagccttgcataccgctgcctgagccagaaccccaaaggacgaccaaccatgagccaagttgttgagacctttgaggccgtgcagaacatgcctgaatgccaggacatactcctccagaacggcatcacaggtgccgtgacgctctacgaggtcccaaaggagcctgcagacagagttgagctggagaaggccaagcaggaaccggcagtaaagaccgccgcaatcccgcccgtgaacggaaagccggccccccagagcaggcgaacgcggcctgggaatggccggagcaagagcgagccatcgttggagtgtaagatgtacatcccatcaccagactctgacgaacagcagctcggcctggaggcactggcgtccccaaatggcagcatgaaggaccatcctgatgaggatttgtacaagatataaaaccagagccctcgttgctcgccttttgcgccgcacaccccagttctcaaagatcggtcagttacaattttttctctgatagccaccggcctcgctagggttcttattcttccgattagcaatagtatgtagagggagagttgtgatggaaagcatgtgtgtgcttgccatgacgatgctgtagagatctgatacacttctttctggggaatttccactccaaaaatggaagttgagagatgtgtcctgacgattggtgcgttttacccgtgtgttgagtttacttgtaaagatgcttcttcgttgtaatcttcagttctgcgggaaatcaacaccagcatagaaattgatagatc

SEQ ID NO: 6595 - protein, 315 aa, Zea mays subsp. mays
  peptide (1)..(315): Ceres Seq. ID no. 12372808
  misc_feature (7)..(197): Pfam Name: Protein kinase domain Pfam Description: Protein kinase domain
  misc_feature (7)..(264): Homolog of NCBI NO: 30679085 NR Description: protein kinase family [Arabidopsis thaliana]
  misc_feature (7)..(264): Homolog of NCBI NO: 9542860 NR Description: protein kinase-like protein [Arabidopsis thaliana]
  misc_feature (7)..(202): Homolog of NCBI NO: 34897424 NR Description: putative protein kinase [Oryza sativa (japonica group)] >gi|27545044|gb|AAO18450.1| putative protein kinase
  misc_feature (7)..(206): Homolog of NCBI NO: 34912198 NR Description: putative protein kinase [Oryza sativa (japonica group)] >gi|20160990|dbj|BAB89924.1| putative protein kinase
  misc_feature (7)..(242): Homolog of NCBI NO: 15225019 NR Description: putative protein kinase; protein id: At2g05940.1, by cDNA: gi_15810412, supported by cDNA: gi_21280976 [Arabidopsis >gi|25287639|pir||C84473 probable protein kinase putative protein
  misc_feature (7)..(285): Homolog of NCBI NO: 30013675 NR Description: Avr9/Cf-9 rapidly elicited protein 264 [Nicotiana
  misc_feature (7)..(206): Homolog of NCBI NO: 15227001 NR Description: putative protein kinase; protein id: At2g28930.1
  misc_feature (7)..(231): Homolog of NCBI NO: 33147001 NR Description: putative auxin-regulated dual specificity
  misc_feature (5)..(206): Homolog of NCBI NO: 37534008 NR Description: putative serine/threonine protein kinase [Oryza
  misc_feature (7)..(210): Homolog of NCBI NO: 28804505 NR Description: serine/threonine protein kinase [Aster tripolium]
MSTWACGSLEKHLFRRVCLNMPWSTRMKIALGAARGLEYLHRAERSIIYRDFKTSNILLDADYNAKLSDFGLARTGPSGDQTHVSTRVMGTYGYAAPEYVMTGHLTARSDVYGFGVVLLEMIIGRRAVDDSRPSREHNLVDWARPLLVHNRKLFRIIDPRMEGQYSTKAATEVASLAYRCLSQNPKGRPTMSQVVETFEAVQNMPECQDILLQNGITGAVTLYEVPKEPADRVELEKAKQEPAVKTAAIPPVNGKPAPQSRRTRPGNGRSKSEPSLECKMYIPSPDSDEQQLGLEALASPNGSMKDHPDEDLYKI

SEQ ID NO: 6596 - protein, 295 aa, Zea mays subsp. mays
  peptide (1)..(295): Ceres Seq. ID no. 12372809
  misc_feature (1)..(177): Pfam Name: Protein kinase domain Pfam Description: Protein kinase domain
  misc_feature (1)..(244): Homolog of NCBI NO: 30679085 NR Description: protein kinase family [Arabidopsis thaliana]
  misc_feature (1)..(244): Homolog of NCBI NO: 9542860 NR Description: protein kinase-like protein [Arabidopsis thaliana]
  misc_feature (1)..(182): Homolog of NCBI NO: 34897424 NR Description: putative protein kinase [Oryza sativa (japonica group)] >gi|27545044|gb|AAO18450.1| putative protein kinase
  misc_feature (1)..(186): Homolog of NCBI NO: 34912198 NR Description: putative protein kinase [Oryza sativa (japonica group)] >gi|20160990|dbj|BAB89924.1| putative protein kinase
  misc_feature (1)..(222): Homolog of NCBI NO: 15225019 NR Description: putative protein kinase; protein id: At2g05940.1, by cDNA: gi_15810412, supported by cDNA: gi_21280976 [Arabidopsis >gi|25287639|pir||C84473 probable protein kinase putative protein
  misc_feature (1)..(265): Homolog of NCBI NO: 30013675 NR Description: Avr9/Cf-9 rapidly elicited protein 264 [Nicotiana
  misc_feature (1)..(186): Homolog of NCBI NO: 15227001 NR Description: putative protein kinase; protein id: At2g28930.1
  misc_feature (1)..(211): Homolog of NCBI NO: 33147001 NR Description: putative auxin-regulated dual specificity
  misc_feature (1)..(186): Homolog of NCBI NO: 37534008 NR Description: putative serine/threonine protein kinase [Oryza
  misc_feature (1)..(190): Homolog of NCBI NO: 28804505 NR Description: serine/threonine protein kinase [Aster tripolium]
MPWSTRMKIALGAARGLEYLHRAERSIIYRDFKTSNILLDADYNAKLSDFGLARTGPSGDQTHVSTRVMGTYGYAAPEYVMTGHLTARSDVYGFGVVLLEMIIGRRAVDDSRPSREHNLVDWARPLLVHNRKLFRIIDPRMEGQYSTKAATEVASLAYRCLSQNPKGRPTMSQVVETFEAVQNMPECQDILLQNGITGAVTLYEVPKEPADRVELEKAKQEPAVKTAAIPPVNGKPAPQSRRTRPGNGRSKSEPSLECKMYIPSPDSDEQQLGLEALASPNGSMKDHPDEDLYKI

SEQ ID NO: 6597 - protein, 289 aa, Zea mays subsp. mays
  peptide (1)..(289): Ceres Seq. ID no. 12372810
  misc_feature (1)..(171): Pfam Name: Protein kinase domain Pfam Description: Protein kinase domain
  misc_feature (1)..(205): Homolog of NCBI NO: 33147001 NR Description: putative auxin-regulated dual specificity
  misc_feature (1)..(180): Homolog of NCBI NO: 37534008 NR Description: putative serine/threonine protein kinase [Oryza
  misc_feature (1)..(238): Homolog of NCBI NO: 9542860 NR Description: protein kinase-like protein [Arabidopsis thaliana]
  misc_feature (1)..(180): Homolog of NCBI NO: 34912198 NR Description: putative protein kinase [Oryza sativa (japonica group)] >gi|20160990|dbj|BAB89924.1| putative protein kinase
  misc_feature (1)..(259): Homolog of NCBI NO: 30013675 NR Description: Avr9/Cf-9 rapidly elicited protein 264 [Nicotiana
  misc_feature (1)..(180): Homolog of NCBI NO: 15227001 NR Description: putative protein kinase; protein id: At2g28930.1
  misc_feature (1)..(216): Homolog of NCBI NO: 15225019 NR Description: putative protein kinase; protein id: At2g05940.1, by cDNA: gi_15810412, supported by cDNA: gi_21280976 [Arabidopsis >gi|25287639|pir||C84473 probable protein kinase putative protein
  misc_feature (1)..(176): Homolog of NCBI NO: 34897424 NR Description: putative protein kinase [Oryza sativa (japonica group)] >gi|27545044|gb|AAO18450.1| putative protein kinase
  misc_feature (1)..(238): Homolog of NCBI NO: 30679085 NR Description: protein kinase family [Arabidopsis thaliana]
  misc_feature (1)..(184): Homolog of NCBI NO: 28804505 NR Description: serine/threonine protein kinase [Aster tripolium]
MKIALGAARGLEYLHRAERSIIYRDFKTSNILLDADYNAKLSDFGLARTGPSGDQTHVSTRVMGTYGYAAPEYVMTGHLTARSDVYGFGVVLLEMIIGRRAVDDSRPSREHNLVDWARPLLVHNRKLFRIIDPRMEGQYSTKAATEVASLAYRCLSQNPKGRPTMSQVVETFEAVQNMPECQDILLQNGITGAVTLYEVPKEPADRVELEKAKQEPAVKTAAIPPVNGKPAPQSRRTRPGNGRSKSEPSLECKMYIPSPDSDEQQLGLEALASPNGSMKDHPDEDLYKI

SEQ ID NO: 6598 - DNA, 1776 bp, Zea mays subsp. mays
  misc_feature (1)..(1776): Ceres Seq. ID no. 12373590
  misc_feature: MA Experiment ID: 108544 Result: Down-regulated in Transcription
  misc_feature: MA Experiment ID: 108556 Result: Down-regulated in Transcription
  misc_feature: MA Experiment 108556 PARAMETER Experiment Name: Zm_Drought_P Parameter: Age (day) Value: 9
  misc_feature: MA Experiment 108556 PARAMETER Experiment Name: Zm_Drought_P Parameter: Organism Value: Zea mays
  misc_feature: MA Experiment 108556 PARAMETER Experiment Name: Zm_Drought_P Parameter: Plant Line Value: 35A19
  misc_feature: MA Experiment 108556 PARAMETER Experiment Name: Zm_Drought_P Parameter: Timepoint (hr) Value: 24
  misc_feature: MA Experiment 108556 PARAMETER Experiment Name: Zm_Drought_P Parameter: Tissue Value: Aerial
  misc_feature: MA Experiment 108556 PARAMETER Experiment Name: Zm_Drought_P Parameter: Treatment Value: Drought vs. No Drought
  misc_feature: MA Experiment ID: 20000534 Result: Down-regulated in Transcription
  misc_feature: MA Experiment 20000534 PARAMETER Experiment Name: Zm_Hybrid_Pollen_P Parameter: Age (day) Value: 8
  misc_feature: MA Experiment 20000534 PARAMETER Experiment Name: Zm_Hybrid_Pollen_P Parameter: Organism Value: Zea mays
  misc_feature: MA Experiment 20000534 PARAMETER Experiment Name: Zm_Hybrid_Pollen_P Parameter: Plant Line Value: 35A19
  misc_feature: MA Experiment 20000534 PARAMETER Experiment Name: Zm_Hybrid_Pollen_P Parameter: Tissue Value: Pollen vs. Aerial
aaagaaaaacggtccaccacaccttgtatgtgccctccggcgggcgggtcagagctcgcaactcgcaccagcacagcagcaccggcagcaccaccaaccccagggcagccgcgccgccagccacgacaagcttagcagcccctcgcactcgctagggtatttattggtacaatcgggtgatctgcgtgccgcatcgcgccgggacacgggagacaatggcgttcacgacgctcggcggctgtggggcgcaggcttcagtgcggttggctccccagaatggaatccttggatctaattcgaagccattcgcgggcatcatactcaagaaacctcagcaggttggatccctgcccctccgtgcaaggggatccattttttcttcaccacgcaggcttttctcccctaaggcagcagcccctaaatcaggggattccatacgcattgcagtgctaggggccagcggttatactggagctgagattgttcggattctagcgaaccaccctcagtttcatataaaagtgatgactgcagatagaaaagctggcgagcaatttggatcagtatttcctcacttgataacacaggacctgccgagactggtcgcaataaaagacgctgacttttcagatgttgatgctgttttttgctgcttgccacatggtacaacccaggaaattatcaaaagcttaccccgacacttaaagattgttgatctctcagcggacttccgactacgcgacattaatgagtatgctgagtggtatggacattcccacagggcaccggaacttcagggggaagctgtgtatggtttgaccgaacttaaacgagatgacataagaaatgcacgcctggtagcaaatccagggtgttatcccacatctattcaacttccgctcgttcctttggtaaaggcaaaactgatcaagctaaccaacattattattgatgcaaaatctggagtcagtggtgcaggacgtggggctaaggaagcaaatctttacactgaaatcgctgagggtatccatgcttatgggataacaagccatcggcatgtgcctgagattgagcaaggacttacagatgctgctgaatcaaaagttactatcagctttactccacatttgatgtgtatgaaacgtgggatgcaatctactgtgtatgttgaattggcatctggagtgactcccagggatttgtatgaacacctaaagtctacttacgagaatgaagaatttgtcaagctgttacatggtagcaatgttccttgcacaagccatgttgtgggatcaaattactgcttcatgaatgtctatgaggatagaatacctggaagggccatcatcatctctgtcatagataatcttgtgaagggagcatctggtcaggctttgcaaaatcttaatctgatgatgggactgcctgagaatatggggctgcaataccagcccctgttcccttgatcttttgtgtcattatctattattacattatttaggagtccagaaaccaaattatcattactgtcaagaggtggcaaggagcctgacatcagaattcagtcaagtcgaagttagacagttagtgtagcttggtctgtgttgttttagctttattaaaccattaagagaataatgatgatggcaatttagcagtacaatggtagtattatgtgggcagcttggttccaataaaatcataagcctatacacatcttgtgcccgcaatgttgtttgctattttgatcacgaaatcaatattgagcttgaatcc

SEQ ID NO: 6599 - protein, 416 aa, Zea mays subsp. mays
  peptide (1)..(416): Ceres Seq. ID no. 12373591
  misc_feature (229)..(387): Pfam Name: Semialdehyde dehydrogenase, dimerisation domain Pfam Description: Semialdehyde dehydrogenase, dimerisation domain
  misc_feature (1)..(416): Homolog of NCBI NO: 37535658 NR Description: putative N-acetyl-gamma-glutamyl-phosphate
  misc_feature (51)..(416): Homolog of NCBI NO: 16604368 NR Description: At2g19940/F6F22.3 [Arabidopsis thaliana]
  misc_feature (65)..(416): Homolog of NCBI NO: 18399202 NR Description: putative N-acetyl-gamma-glutamyl-phosphate protein id: At2g19940.1, supported by cDNA: gi_16604367, by cDNA: gi_19699207 [Arabidopsis thaliana]
  misc_feature (51)..(416): Homolog of NCBI NO: 25284367 NR Description: hypothetical protein At2g19940 [imported] -
  misc_feature (72)..(416): Homolog of NCBI NO: 22968389 NR Description: hypothetical protein [Rhodospirillum rubrum]
  misc_feature (142)..(416): Homolog of NCBI NO: 23013472 NR Description: hypothetical protein [Magnetospirillum
  misc_feature (75)..(416): Homolog of NCBI NO: 6714965 NR Description: N-acetyl-gamma-glutamyl-phosphate reductase
  misc_feature (75)..(416): Homolog of NCBI NO: 28376951 NR Description: N-acetyl-gamma-glutamyl-phosphate reductase
  misc_feature (76)..(416): Homolog of NCBI NO: 22956652 NR Description: hypothetical protein [Rhodobacter sphaeroides]
  misc_feature (71)..(416): Homolog of NCBI NO: 22998260 NR Description: hypothetical protein [Magnetococcus sp. MC-1]
MAFTTLGGCGAQASVRLAPQNGILGSNSKPFAGIILKKPQQVGSLPLRARGSIFSSPRRLFSPKAAAPKSGDSIRIAVLGASGYTGAEIVRILANHPQFHIKVMTADRKAGEQFGSVFPHLITQDLPRLVAIKDADFSDVDAVFCCLPHGTTQEIIKSLPRHLKIVDLSADFRLRDINEYAEWYGHSHRAPELQGEAVYGLTELKRDDIRNARLVANPGCYPTSIQLPLVPLVKAKLIKLTNIIIDAKSGVSGAGRGAKEANLYTEIAEGIHAYGITSHRHVPEIEQGLTDAAESKVTISFTPHLMCMKRGMQSTVYVELASGVTPRDLYEHLKSTYENEEFVKLLHGSNVPCTSHVVGSNYCFMNVYEDRIPGRAIIISVIDNLVKGASGQALQNLNLMMGLPENMGLQYQPLFP

SEQ ID NO: 6600 - protein, 313 aa, Zea mays subsp. mays
  peptide (1)..(313): Ceres Seq. ID no. 12373592
  misc_feature (126)..(284): Pfam Name: Semialdehyde dehydrogenase, dimerisation domain Pfam Description: Semialdehyde dehydrogenase, dimerisation domain
  misc_feature (1)..(313): Homolog of NCBI NO: 37535658 NR Description: putative N-acetyl-gamma-glutamyl-phosphate
  misc_feature (1)..(313): Homolog of NCBI NO: 16604368 NR Description: At2g19940/F6F22.3 [Arabidopsis thaliana]
  misc_feature (1)..(313): Homolog of NCBI NO: 18399202 NR Description: putative N-acetyl-gamma-glutamyl-phosphate protein id: At2g19940.1, supported by cDNA: gi_16604367, by cDNA: gi_19699207 [Arabidopsis thaliana]
  misc_feature (1)..(313): Homolog of NCBI NO: 25284367 NR Description: hypothetical protein At2g19940 [imported] -
  misc_feature (1)..(313): Homolog of NCBI NO: 22968389 NR Description: hypothetical protein [Rhodospirillum rubrum]
  misc_feature (39)..(313): Homolog of NCBI NO: 23013472 NR Description: hypothetical protein [Magnetospirillum
  misc_feature (1)..(313): Homolog of NCBI NO: 6714965 NR Description: N-acetyl-gamma-glutamyl-phosphate reductase
  misc_feature (1)..(313): Homolog of NCBI NO: 28376951 NR Description: N-acetyl-gamma-glutamyl-phosphate reductase
  misc_feature (1)..(313): Homolog of NCBI NO: 22956652 NR Description: hypothetical protein [Rhodobacter sphaeroides]
  misc_feature (1)..(313): Homolog of NCBI NO: 22998260 NR Description: hypothetical protein [Magnetococcus sp. MC-1]
MTADRKAGEQFGSVFPHLITQDLPRLVAIKDADFSDVDAVFCCLPHGTTQEIIKSLPRHLKIVDLSADFRLRDINEYAEWYGHSHRAPELQGEAVYGLTELKRDDIRNARLVANPGCYPTSIQLPLVPLVKAKLIKLTNIIIDAKSGVSGAGRGAKEANLYTEIAEGIHAYGITSHRHVPEIEQGLTDAAESKVTISFTPHLMCMKRGMQSTVYVELASGVTPRDLYEHLKSTYENEEFVKLLHGSNVPCTSHVVGSNYCFMNVYEDRIPGRAIIISVIDNLVKGASGQALQNLNLMMGLPENMGLQYQPLFP

SEQ ID NO: 6601 - DNA, 1460 bp, Zea mays subsp. mays
  misc_feature (1)..(1460): Ceres Seq. ID no. 12381233
  misc_feature: MA Experiment ID: 108523 Result: Down-regulated in Transcription
  misc_feature: MA Experiment 108523 PARAMETER Experiment Name: Zm_42deg_Heat_P Parameter: Age (day) Value: 8
  misc_feature: MA Experiment 108523 PARAMETER Experiment Name: Zm_42deg_Heat_P Parameter: Organism Value: Zea mays
  misc_feature: MA Experiment 108523 PARAMETER Experiment Name: Zm_42deg_Heat_P Parameter: Plant Line Value: 35A19
  misc_feature: MA Experiment 108523 PARAMETER Experiment Name: Zm_42deg_Heat_P Parameter: Temperature (deg C) Value: 42 vs. 22
  misc_feature: MA Experiment 108523 PARAMETER Experiment Name: Zm_42deg_Heat_P Parameter: Timepoint (hr) Value: 6
  misc_feature: MA Experiment 108523 PARAMETER Experiment Name: Zm_42deg_Heat_P Parameter: Tissue Value: Aerial
  misc_feature: MA Experiment ID: 108529 Result: Down-regulated in Transcription
  misc_feature: MA Experiment 108529 PARAMETER Experiment Name: Zm_Imbibed_Seeds_P Parameter: Age (day) Value: 5 vs. 2
  misc_feature: MA Experiment 108529 PARAMETER Experiment Name: Zm_Imbibed_Seeds_P Parameter: Organism Value: Zea mays
  misc_feature: MA Experiment 108529 PARAMETER Experiment Name: Zm_Imbibed_Seeds_P Parameter: Plant Line Value: 35A19
  misc_feature: MA Experiment 108529 PARAMETER Experiment Name: Zm_Imbibed_Seeds_P Parameter: Tissue Value: Roots vs. Embryo
  misc_feature: MA Experiment ID: 108535 Result: Up-regulated in Transcription
  misc_feature: MA Experiment 108535 PARAMETER Experiment Name: Zm_Meristem_P Parameter: Age (day) Value: 8
  misc_feature: MA Experiment 108535 PARAMETER Experiment Name: Zm_Meristem_P Parameter: Organism Value: Zea mays
  misc_feature: MA Experiment 108535 PARAMETER Experiment Name: Zm_Meristem_P Parameter: Plant Line Value: 35A19
  misc_feature: MA Experiment 108535 PARAMETER Experiment Name: Zm_Meristem_P Parameter: Tissue Value: Root Meristem vs. Above Root Meristem
  misc_feature: MA Experiment ID: 108536 Result: Down-regulated in Transcription
  misc_feature: MA Experiment 108536 PARAMETER Experiment Name: Zm_Meristem_P Parameter: Age (day) Value: 8
  misc_feature: MA Experiment 108536 PARAMETER Experiment Name: Zm_Meristem_P Parameter: Organism Value: Zea mays
  misc_feature: MA Experiment 108536 PARAMETER Experiment Name: Zm_Meristem_P Parameter: Plant Line Value: 35A19
  misc_feature: MA Experiment 108536 PARAMETER Experiment Name: Zm_Meristem_P Parameter: Tissue Value: Shoot Meristem vs. Above Shoot Meristem
  misc_feature: MA Experiment ID: 108544 Result: Down-regulated in Transcription
  misc_feature: MA Experiment ID: 108597 Result: Down-regulated in Transcription
  misc_feature: MA Experiment 108597 PARAMETER Experiment Name: Zm_100uM_ABA_P Parameter: Age (day) Value: 9
  misc_feature: MA Experiment 108597 PARAMETER Experiment Name: Zm_100uM_ABA_P Parameter: Organism Value: Zea mays
  misc_feature: MA Experiment 108597 PARAMETER Experiment Name: Zm_100uM_ABA_P Parameter: Plant Line Value: 35A19
  misc_feature: MA Experiment 108597 PARAMETER Experiment Name: Zm_100uM_ABA_P Parameter: Timepoint (hr) Value: 24
  misc_feature: MA Experiment 108597 PARAMETER Experiment Name: Zm_100uM_ABA_P Parameter: Tissue Value: Aerial
  misc_feature: MA Experiment 108597 PARAMETER Experiment Name: Zm_100uM_ABA_P Parameter: Treatment Value: 100uM ABA vs. No Treatment
  misc_feature: MA Experiment ID: 108689 Result: Down-regulated in Transcription
  misc_feature: MA Experiment 108689 PARAMETER Experiment Name: Zm_Drought_Roots_P Parameter: Age (day) Value: 9
  misc_feature: MA Experiment 108689 PARAMETER Experiment Name: Zm_Drought_Roots_P Parameter: Organism Value: Zea mays
  misc_feature: MA Experiment 108689 PARAMETER Experiment Name: Zm_Drought_Roots_P Parameter: Plant Line Value: 35A19
  misc_feature: MA Experiment 108689 PARAMETER Experiment Name: Zm_Drought_Roots_P Parameter: Timepoint (hr) Value: 24
  misc_feature: MA Experiment 108689 PARAMETER Experiment Name: Zm_Drought_Roots_P Parameter: Tissue Value: Roots
  misc_feature: MA Experiment 108689 PARAMETER Experiment Name: Zm_Drought_Roots_P Parameter: Treatment Value: Drought vs. No Drought
  misc_feature: MA Experiment ID: 20000108 Result: Up-regulated in Transcription
  misc_feature: MA Experiment 20000108 PARAMETER Experiment Name: Zm_Root-Tips_P Parameter: Age (day) Value: 12
  misc_feature: MA Experiment 20000108 PARAMETER Experiment Name: Zm_Root-Tips_P Parameter: Organism Value: Zea mays
  misc_feature: MA Experiment 20000108 PARAMETER Experiment Name: Zm_Root-Tips_P Parameter: Tissue Value: Root tips vs. Root mid region    35
  misc_feature: MA Experiment 20000108 PARAMETER Experiment Name: Zm_Root-Tips_P Parameter: Tissue Value: Root tips vs. Root mid region   Sequence Listing-Misc Features (4)
  misc_feature: MA Experiment ID: 20000477 Result: Down-regulated in Transcription
  misc_feature: MA Experiment 20000477 PARAMETER Experiment Name: Zm_5mM_SA_P Parameter: Age (day) Value: 10
  misc_feature: MA Experiment 20000477 PARAMETER Experiment Name: Zm_5mM_SA_P Parameter: Organism Value: Zea mays
  misc_feature: MA Experiment 20000477 PARAMETER Experiment Name: Zm_5mM_SA_P Parameter: Plant Line Value: 35A19
  misc_feature: MA Experiment 20000477 PARAMETER Experiment Name: Zm_5mM_SA_P Parameter: Timepoint (hr) Value: 48
  misc_feature: MA Experiment 20000477 PARAMETER Experiment Name: Zm_5mM_SA_P Parameter: Tissue Value: Aerial
  misc_feature: MA Experiment 20000477 PARAMETER Experiment Name: Zm_5mM_SA_P Parameter: Treatment Value: 5mM SA vs. No Treatment
  misc_feature: MA Experiment ID: 20000478 Result: Down-regulated in Transcription
  misc_feature: MA Experiment 20000478 PARAMETER Experiment Name: Zm_5mM_SA_P Parameter: Age (day) Value: 11
  misc_feature: MA Experiment 20000478 PARAMETER Experiment Name: Zm_5mM_SA_P Parameter: Organism Value: Zea mays
  misc_feature: MA Experiment 20000478 PARAMETER Experiment Name: Zm_5mM_SA_P Parameter: Plant Line Value: 35A19
  misc_feature: MA Experiment 20000478 PARAMETER Experiment Name: Zm_5mM_SA_P Parameter: Timepoint (hr) Value: 72
  misc_feature: MA Experiment 20000478 PARAMETER Experiment Name: Zm_5mM_SA_P Parameter: Tissue Value: Aerial
  misc_feature: MA Experiment 20000478 PARAMETER Experiment Name: Zm_5mM_SA_P Parameter: Treatment Value: 5mM SA vs. No Treatment
  misc_feature: MA Experiment ID: 20000479 Result: Down-regulated in Transcription
  misc_feature: MA Experiment 20000479 PARAMETER Experiment Name: Zm_Drought_P Parameter: Age (day) Value: 10
  misc_feature: MA Experiment 20000479 PARAMETER Experiment Name: Zm_Drought_P Parameter: Organism Value: Zea mays
  misc_feature: MA Experiment 20000479 PARAMETER Experiment Name: Zm_Drought_P Parameter: Plant Line Value: 35A19
  misc_feature: MA Experiment 20000479 PARAMETER Experiment Name: Zm_Drought_P Parameter: Timepoint (hr) Value: 48
  misc_feature: MA Experiment 20000479 PARAMETER Experiment Name: Zm_Drought_P Parameter: Tissue Value: Aerial
  misc_feature: MA Experiment 20000479 PARAMETER Experiment Name: Zm_Drought_P Parameter: Treatment Value: Drought vs. No Drought
  misc_feature: MA Experiment ID: 20000492 Result: Down-regulated in Transcription
  misc_feature: MA Experiment 20000492 PARAMETER Experiment Name: Zm_Hybrid_Seed_Dev_P Parameter: DAP Value: 12
  misc_feature: MA Experiment 20000492 PARAMETER Experiment Name: Zm_Hybrid_Seed_Dev_P Parameter: Organism Value: Zea mays
  misc_feature: MA Experiment 20000492 PARAMETER Experiment Name: Zm_Hybrid_Seed_Dev_P Parameter: Plant Line Value: 35A19
  misc_feature: MA Experiment 20000492 PARAMETER Experiment Name: Zm_Hybrid_Seed_Dev_P Parameter: Tissue Value: Fert Kernel vs. Unfert Floret
  misc_feature: MA Experiment ID: 20000535 Result: Down-regulated in Transcription
  misc_feature: MA Experiment 20000535 PARAMETER Experiment Name: Zm_Hybrid_Seed_Dev_P Parameter: DAP Value: 30 vs. 12
  misc_feature: MA Experiment 20000535 PARAMETER Experiment Name: Zm_Hybrid_Seed_Dev_P Parameter: Organism Value: Zea mays
  misc_feature: MA Experiment 20000535 PARAMETER Experiment Name: Zm_Hybrid_Seed_Dev_P Parameter: Plant Line Value: 35A19
  misc_feature: MA Experiment 20000535 PARAMETER Experiment Name: Zm_Hybrid_Seed_Dev_P Parameter: Tissue Value: Embryo vs. Unfert Floret
aactattataaaaagtcgggcgcgccggcctcatctgacccgtccgtgtccgtgtccgagtccgcccccgcaaggcccagctcctcactccacagcgccgcgcaatggcggccaagcagcggcaccggcagctgccactcctgcccctcctcgccgcggccgtcgcgtggtcgctactgcgcgccgccgccgccgcgggcacgggcactggcacgctcggcctccggcacaagcccgcgaggcagcacaacagcacgcggcacgggggagggcggcgcgcccagcgtggtggcgctcccggcactggcatggcgtcgtgcaacctgttccagggcagctgggtgtacgacgacacgctgccgatgtacgacgcggcggggtgccccttcgtggagccggagttcgactgccagaagtacggccgccccgacaagctgtacctcaagtaccggtggcgcccggcgtcctgcgagctcccgaggttcaacgggcaggacttgctgaggcggtggaaggggaagaagatactgttcgtgggggactccatcagcctgaaccagtgggagtcgcttgcgtgcatgctgcgcgcggccgcgccggcctcctccagggtcgcctacgccaggggcaaccccgtctccagcgtcacgttccaggactacggggtgtcggtggcctactaccggagcacctacctggtggacatcgtcgaggagtccgtcggtcgggtgctcaagctcgactccatcaccggcgacgcgtggctcggcgccgacgtcctcgtcttcaacacgtggcactggtggacgcacaccggcagggaccaaccgtgggactacgtccaagacggagggcaggtgatgaaggacatggaccggctcacggccttctccaaggggatgtccacatgggccaggtgggtcgactccagcgtcgacacctccaggaccaaggtctacttccagggaatctcgccgacccactacaacggagccgactggggcgagggctcgcggagctgcgcgcagcagacgcagccggtcgccgggccggcgtaccccgccggccccgtcccggcgcaggccgccgtgcgggccgcgctggccgccatgtccaagccggtgtacctgctcgacgtcacgctgctgtcgcagctcaggcgcgacggccacccctcggcctacagcggcggccacccgggcaacgattgcagccactggtgcctcgccggcgtgccggacacgtggaaccagatcctctacgcgtcgctcctcctggcataggaccggggagaaaaaaaacgcacactgtataccaattggcgcaggctataggcatttcgtatttaaaaattggtgattcgattgtttctttttttcttcttcttcttggaaaaatcaatgttatgtcatatcagcatataagaagcagcagcaaacgagtttataatgttgtataat

SEQ ID NO: 6602 - protein, 485 aa, Zea mays subsp. mays
  peptide (1)..(485): Ceres Seq. ID no. 12381234
TIIKSRARRPHLTRPCPCPSPPPQGPAPHSTAPRNGGQAAAPAAATPAPPRRGRRVVATARRRRRGHGHWHARPPAQAREAAQQHAARGRAARPAWWRSRHWHGVVQPVPGQLGVRRHAADVRRGGVPLRGAGVRLPEVRPPRQAVPQVPVAPGVLRAPEVQRAGLAEAVEGEEDTVRGGLHQPEPVGVACVHAARGRAGLLQGRLRQGQPRLQRHVPGLRGVGGLLPEHLPGGHRRGVRRSGAQARLHHRRRVARRRRPRLQHVALVDAHRQGPTVGLRPRRRAGDEGHGPAHGLLQGDVHMGQVGRLQRRHLQDQGLLPGNLADPLQRSRLGRGLAELRAADAAGRRAGVPRRPRPGAGRRAGRAGRHVQAGVPARRHAAVAAQARRPPLGLQRRPPGQRLQPLVPRRRAGHVEPDPLRVAPPGIGPGRKKTHTVYQLAQAIGISYLKIGDSIVSFFLLLLGKINVMSYQHIRSSSKRVYNVV

SEQ ID NO: 6603 - protein, 392 aa, Zea mays subsp. mays
  peptide (1)..(392): Ceres Seq. ID no. 12381235
  misc_feature (1)..(390): Homolog of NCBI NO: 34911864 NR Description: OSJNBb0032K15.9 [Oryza sativa (japonica
  misc_feature (55)..(391): Homolog of NCBI NO: 18396930 NR Description: expressed protein; protein id: At1g29050.1, by cDNA: 30068., supported by cDNA: gi_18377637, supported by gi_20465654 [Arabidopsis thaliana] >gi|18377638|gb|AAL66969.1|
  misc_feature (9)..(389): Homolog of NCBI NO: 18403435 NR Description: expressed protein; protein id: At2g34070.1, by cDNA: 25519. [Arabidopsis thaliana] expressed protein [Arabidopsis thaliana]
  misc_feature (72)..(389): Homolog of NCBI NO: 18406003 NR Description: expressed protein; protein id: At2g42570.1, by cDNA: 17752., supported by cDNA: gi_14334589, supported by
  misc_feature (182)..(389): Homolog of NCBI NO: 34904010 NR Description: unnamed protein product [Oryza sativa (japonica group)] >gi|7523484|dbj|BAA94212.1| unnamed protein product
  misc_feature (57)..(187): Homolog of NCBI NO: 34904010 NR Description: unnamed protein product [Oryza sativa (japonica group)] >gi|7523484|dbj|BAA94212.1| unnamed protein product
  misc_feature (55)..(391): Homolog of NCBI NO: 25366741 NR Description: F28N24.24 protein - Arabidopsis thaliana
  misc_feature (72)..(389): Homolog of NCBI NO: 21593142 NR Description: unknown [Arabidopsis thaliana]
  misc_feature (72)..(389): Homolog of NCBI NO: 28393769 NR Description: unknown protein [Arabidopsis thaliana]
  misc_feature (72)..(390): Homolog of NCBI NO: 15219157 NR Description: hypothetical protein; protein id: At1g78710.1
MAAKQRHRQLPLLPLLAAAVAWSLLRAAAAAGTGTGTLGLRHKPARQHNSTRHGGGRRAQRGGAPGTGMASCNLFQGSWVYDDTLPMYDAAGCPFVEPEFDCQKYGRPDKLYLKYRWRPASCELPRFNGQDLLRRWKGKKILFVGDSISLNQWESLACMLRAAAPASSRVAYARGNPVSSVTFQDYGVSVAYYRSTYLVDIVEESVGRVLKLDSITGDAWLGADVLVFNTWHWWTHTGRDQPWDYVQDGGQVMKDMDRLTAFSKGMSTWARWVDSSVDTSRTKVYFQGISPTHYNGADWGEGSRSCAQQTQPVAGPAYPAGPVPAQAAVRAALAAMSKPVYLLDVTLLSQLRRDGHPSAYSGGHPGNDCSHWCLAGVPDTWNQILYASLLLA

SEQ ID NO: 6604 - protein, 324 aa, Zea mays subsp. mays
  peptide (1)..(324): Ceres Seq. ID no. 12381236
  misc_feature (1)..(322): Homolog of NCBI NO: 34911864 NR Description: OSJNBb0032K15.9 [Oryza sativa (japonica
  misc_feature (1)..(323): Homolog of NCBI NO: 18396930 NR Description: expressed protein; protein id: At1g29050.1, by cDNA: 30068., supported by cDNA: gi_18377637, supported by gi_20465654 [Arabidopsis thaliana] >gi|18377638|gb|AAL66969.1|
  misc_feature (1)..(321): Homolog of NCBI NO: 18403435 NR Description: expressed protein; protein id: At2g34070.1, by cDNA: 25519. [Arabidopsis thaliana] expressed protein [Arabidopsis thaliana]
  misc_feature (4)..(321): Homolog of NCBI NO: 18406003 NR Description: expressed protein; protein id: At2g42570.1, by cDNA: 17752., supported by cDNA: gi_14334589, supported by
  misc_feature (114)..(321): Homolog of NCBI NO: 34904010 NR Description: unnamed protein product [Oryza sativa (japonica group)] >gi|7523484|dbj|BAA94212.1| unnamed protein product
  misc_feature (1)..(119): Homolog of NCBI NO: 34904010 NR Description: unnamed protein product [Oryza sativa (japonica group)] >gi|7523484|dbj|BAA94212.1| unnamed protein product
  misc_feature (1)..(323): Homolog of NCBI NO: 25366741 NR Description: F28N24.24 protein - Arabidopsis thaliana
  misc_feature (4)..(321): Homolog of NCBI NO: 21593142 NR Description: unknown [Arabidopsis thaliana]
  misc_feature (4)..(321): Homolog of NCBI NO: 28393769 NR Description: unknown protein [Arabidopsis thaliana]
  misc_feature (4)..(322): Homolog of NCBI NO: 15219157 NR Description: hypothetical protein; protein id: At1g78710.1
MASCNLFQGSWVYDDTLPMYDAAGCPFVEPEFDCQKYGRPDKLYLKYRWRPASCELPRFNGQDLLRRWKGKKILFVGDSISLNQWESLACMLRAAAPASSRVAYARGNPVSSVTFQDYGVSVAYYRSTYLVDIVEESVGRVLKLDSITGDAWLGADVLVFNTWHWWTHTGRDQPWDYVQDGGQVMKDMDRLTAFSKGMSTWARWVDSSVDTSRTKVYFQGISPTHYNGADWGEGSRSCAQQTQPVAGPAYPAGPVPAQAAVRAALAAMSKPVYLLDVTLLSQLRRDGHPSAYSGGHPGNDCSHWCLAGVPDTWNQILYASLLLA

SEQ ID NO: 6605 - DNA, 1485 bp, Zea mays subsp. mays
  misc_feature (1)..(1485): Ceres Seq. ID no. 13498718
  misc_feature: MA Experiment ID: 108530 Result: Down-regulated in Transcription
  misc_feature: MA Experiment 108530 PARAMETER Experiment Name: Zm_Imbibed_Seeds_P Parameter: Age (day) Value: 6 vs. 2
  misc_feature: MA Experiment 108530 PARAMETER Experiment Name: Zm_Imbibed_Seeds_P Parameter: Organism Value: Zea mays
  misc_feature: MA Experiment 108530 PARAMETER Experiment Name: Zm_Imbibed_Seeds_P Parameter: Plant Line Value: 35A19
  misc_feature: MA Experiment 108530 PARAMETER Experiment Name: Zm_Imbibed_Seeds_P Parameter: Tissue Value: Aerial vs. Embryo
  misc_feature: MA Experiment ID: 108535 Result: Up-regulated in Transcription
  misc_feature: MA Experiment 108535 PARAMETER Experiment Name: Zm_Meristem_P Parameter: Age (day) Value: 8
  misc_feature: MA Experiment 108535 PARAMETER Experiment Name: Zm_Meristem_P Parameter: Organism Value: Zea mays
  misc_feature: MA Experiment 108535 PARAMETER Experiment Name: Zm_Meristem_P Parameter: Plant Line Value: 35A19
  misc_feature: MA Experiment 108535 PARAMETER Experiment Name: Zm_Meristem_P Parameter: Tissue Value: Root Meristem vs. Above Root Meristem
  misc_feature: MA Experiment ID: 20000108 Result: Up-regulated in Transcription
  misc_feature: MA Experiment 20000108 PARAMETER Experiment Name: Zm_Root-Tips_P Parameter: Age (day) Value: 12
  misc_feature: MA Experiment 20000108 PARAMETER Experiment Name: Zm_Root-Tips_P Parameter: Organism Value: Zea mays
  misc_feature: MA Experiment 20000108 PARAMETER Experiment Name: Zm_Root-Tips_P Parameter: Tissue Value: Root tips vs. Root mid region    35
  misc_feature: MA Experiment 20000108 PARAMETER Experiment Name: Zm_Root-Tips_P Parameter: Tissue Value: Root tips vs. Root mid region   Sequence Listing-Misc Features (4)
  misc_feature: MA Experiment ID: 20000478 Result: Up-regulated in Transcription
  misc_feature: MA Experiment 20000478 PARAMETER Experiment Name: Zm_5mM_SA_P Parameter: Age (day) Value: 11
  misc_feature: MA Experiment 20000478 PARAMETER Experiment Name: Zm_5mM_SA_P Parameter: Organism Value: Zea mays
  misc_feature: MA Experiment 20000478 PARAMETER Experiment Name: Zm_5mM_SA_P Parameter: Plant Line Value: 35A19
  misc_feature: MA Experiment 20000478 PARAMETER Experiment Name: Zm_5mM_SA_P Parameter: Timepoint (hr) Value: 72
  misc_feature: MA Experiment 20000478 PARAMETER Experiment Name: Zm_5mM_SA_P Parameter: Tissue Value: Aerial
  misc_feature: MA Experiment 20000478 PARAMETER Experiment Name: Zm_5mM_SA_P Parameter: Treatment Value: 5mM SA vs. No Treatment
attttttttatatggagattatttctggtttatataaaaggacacaagtggggacgaagtagcagaagacttcccttcgtctgcttcccagagacccagccatggcgatctcccagatctcacgcatattcctggccatccttctcctggccgccgccttcgccgccgccccagctgcgcttgcggacggcgacgacgtggtggcccttaccgaatccacgttcgagaaggaggtcggaaaggaccgcggcgccctcgtcgagttctacgccccctggtgtggtcactgcaagaagcttgctcctgagtatgaaagacttggtgcaagttttaagaaagctaaatctgtcttgattgctaaggttgattgtgatgagcacaagagtttgtgcagcaagtatggagtttccgggtatccaacaatccaatggttcccgaaaggatccttggagcccaaaaagtatgaaggacaacgcactgcagaagcccttgctgaatttctcaatactgaaggaggcacaaatgtaaagctggcaaccattccttcaagtgttgtggttctcaccccagagacctttgactcaattgtccttgatgaaaccaaagatgtccttgttgagttctatgccccatggtgtggtcactgcaagagtcttgcaccgacgtatgagaaggtggcttctgttttcaagttggatgaaggagttgttattgctaaccttgacgctgacaaacacagggatttggctgagaagtatggagttagtggatttcctaccttgaagtttttcccaaagggaaacaaagctggtgaagattatgatggtgatagggacttggttgactttgtcaagttcattaacgagaagagtggtaccagccgtgacacaaagggtcaactaacctcagaggctggccgtatagcaagtctggatgtcctggctaaggagttccttggtgcttccggtgacaagcgaaaggaagtcctctccagtatggaggaggaggcagataagctcagtggttctgctgcaaggcatggaaaggtctatgtaaccatcgcaaagaagattctagagaaaggcaacgagtatactgagaaggaaaccaagaggcttgatcgcatgttggagaagtccatcagcccctccaaggccgacgagtttatcatcaagaagaacgttctttcgactttctcatcctaaggcatctgctagctccattttcacgtttcagatataggcgacaaaaactgcaggattataagtgtgataatgagagttaaatggtgctagaactaattttggggctttccctcgaggatatgtaatactcgtacgtcttgcgaattagttcttttccttgtgcttctggatttattccgtagcaccatagtttattttttggtttgacatggaggacattgtgactacagaactgagttttactatccaataacactgctcacttgatggggcttatgcc

SEQ ID NO: 6606 - protein, 367 aa, Zea mays subsp. mays
  peptide (1)..(367): Ceres Seq. ID no. 13498719
  misc_feature (32)..(139): Pfam Name: Thioredoxin Pfam Description: Thioredoxin
  misc_feature (1)..(367): Homolog of NCBI NO: 34894982 NR Description: putative protein disulfide isomerase [Oryza
  misc_feature (1)..(367): Homolog of NCBI NO: 34897646 NR Description: putative disulfide-isomerase precursor [Oryza
  misc_feature (1)..(366): Homolog of NCBI NO: 729442 NR Description: PROBABLE PROTEIN DISULFIDE ISOMERASE P5 PRECURSOR
  misc_feature (7)..(365): Homolog of NCBI NO: 15226610 NR Description: protein disulfide isomerase family [Arabidopsis >gi|11132051|sp|O22263|PDA6_ARATH Probable protein disulfide A6 precursor (P5) >gi|7488158|pir||T00437 probable thaliana
  misc_feature (7)..(366): Homolog of NCBI NO: 7489183 NR Description: probable protein disulfide-isomerase (EC 5.3.4.1)
  misc_feature (8)..(367): Homolog of NCBI NO: 28829383 NR Description: similar to Dictyostelium discoideum (Slime mold).
  misc_feature (8)..(367): Homolog of NCBI NO: 2627440 NR Description: protein disulfide isomerase; PDI; P5-like
  misc_feature (14)..(365): Homolog of NCBI NO: 19114496 NR Description: putative protein disulfide isomerase (EC 5.3.4.1) pombe] >gi|3287888|sp|O13811|PDI2_SCHPO Putative protein isomerase C17H9.14c precursor >gi|7492860|pir||T37880 probable
  misc_feature (173)..(367): Homolog of NCBI NO: 10180029 NR Description: putative protein disulfide-isomerase [Prunus
  misc_feature (14)..(365): Homolog of NCBI NO: 40746097 NR Description: hypothetical protein AN0075.2 [Aspergillus
MAISQISRIFLAILLLAAAFAAAPAALADGDDVVALTESTFEKEVGKDRGALVEFYAPWCGHCKKLAPEYERLGASFKKAKSVLIAKVDCDEHKSLCSKYGVSGYPTIQWFPKGSLEPKKYEGQRTAEALAEFLNTEGGTNVKLATIPSSVVVLTPETFDSIVLDETKDVLVEFYAPWCGHCKSLAPTYEKVASVFKLDEGVVIANLDADKHRDLAEKYGVSGFPTLKFFPKGNKAGEDYDGDRDLVDFVKFINEKSGTSRDTKGQLTSEAGRIASLDVLAKEFLGASGDKRKEVLSSMEEEADKLSGSAARHGKVYVTIAKKILEKGNEYTEKETKRLDRMLEKSISPSKADEFIIKKNVLSTFSS

SEQ ID NO: 6607 - DNA, 817 bp, Zea mays subsp. mays
  misc_feature (1)..(817): Ceres Seq. ID no. 12402013
  misc_feature: MA Experiment ID: 108535 Result: Up-regulated in Transcription
  misc_feature: MA Experiment 108535 PARAMETER Experiment Name: Zm_Meristem_P Parameter: Age (day) Value: 8
  misc_feature: MA Experiment 108535 PARAMETER Experiment Name: Zm_Meristem_P Parameter: Organism Value: Zea mays
  misc_feature: MA Experiment 108535 PARAMETER Experiment Name: Zm_Meristem_P Parameter: Plant Line Value: 35A19
  misc_feature: MA Experiment 108535 PARAMETER Experiment Name: Zm_Meristem_P Parameter: Tissue Value: Root Meristem vs. Above Root Meristem
  misc_feature: MA Experiment ID: 20000488 Result: Up-regulated in Transcription
  misc_feature: MA Experiment 20000488 PARAMETER Experiment Name: Zm_50mM_NH4NO3_L_to_H_P Parameter: Organism Value: Zea mays
  misc_feature: MA Experiment 20000488 PARAMETER Experiment Name: Zm_50mM_NH4NO3_L_to_H_P Parameter: Timepoint (hr) Value: 8
  misc_feature: MA Experiment 20000488 PARAMETER Experiment Name: Zm_50mM_NH4NO3_L_to_H_P Parameter: Tissue Value: Leaves
  misc_feature: MA Experiment 20000488 PARAMETER Experiment Name: Zm_50mM_NH4NO3_L_to_H_P Parameter: Treatment Value: 50mM NH4NO3 vs. 100mM Mannitol
  misc_feature: MA Experiment ID: 20001605 Result: Up-regulated in Transcription
  misc_feature: MA Experiment 20001605 PARAMETER Experiment Name: Zm_50ppm_KNO3_L-to-H_P Parameter: Age (day) Value: 19
  misc_feature: MA Experiment 20001605 PARAMETER Experiment Name: Zm_50ppm_KNO3_L-to-H_P Parameter: Organism Value: Zea mays
  misc_feature: MA Experiment 20001605 PARAMETER Experiment Name: Zm_50ppm_KNO3_L-to-H_P Parameter: Plant Line Value: 35A19
  misc_feature: MA Experiment 20001605 PARAMETER Experiment Name: Zm_50ppm_KNO3_L-to-H_P Parameter: Timepoint (hr) Value: 4
  misc_feature: MA Experiment 20001605 PARAMETER Experiment Name: Zm_50ppm_KNO3_L-to-H_P Parameter: Tissue Value: Shoots
  misc_feature: MA Experiment 20001605 PARAMETER Experiment Name: Zm_50ppm_KNO3_L-to-H_P Parameter: Treatment Value: 50ppm KNO3 vs. 50ppm KCl
  misc_feature: MA Experiment ID: 20001606 Result: Up-regulated in Transcription
  misc_feature: MA Experiment 20001606 PARAMETER Experiment Name: Zm_50ppm_KNO3_L-to-H_P Parameter: Age (day) Value: 19
  misc_feature: MA Experiment 20001606 PARAMETER Experiment Name: Zm_50ppm_KNO3_L-to-H_P Parameter: Organism Value: Zea mays
  misc_feature: MA Experiment 20001606 PARAMETER Experiment Name: Zm_50ppm_KNO3_L-to-H_P Parameter: Plant Line Value: 35A19
  misc_feature: MA Experiment 20001606 PARAMETER Experiment Name: Zm_50ppm_KNO3_L-to-H_P Parameter: Timepoint (hr) Value: 8
  misc_feature: MA Experiment 20001606 PARAMETER Experiment Name: Zm_50ppm_KNO3_L-to-H_P Parameter: Tissue Value: Shoots
  misc_feature: MA Experiment 20001606 PARAMETER Experiment Name: Zm_50ppm_KNO3_L-to-H_P Parameter: Treatment Value: 50ppm KNO3 vs. 50ppm KCl
atcttaaaccctagaaagctcttaaaaagcccccaggggccagggctagcagcggcggcgtatccctaatcccacctccagtctctgggcaccaaatttccggcggcgatggcggcggctgtggcgaggtcagggttccggcgcatgttctccgtctctgccttcgcgccgccgaaggcgcccgccgcgcgccccaaggccgacccatcccccaacctcttcgtctccggcttaagcaagcgtaccacaagtgaaggacttagagaagcctttgcggagtttggtgaagttttgcatgctcgagttgtgaccgatcgtgtcagtgggttttctaagggatttggctttgtaaggtatgctacgaccgaagaggcagccaagggaatagagggaaaggatggaaagttccttgatggatgggttatttttgcggaatacgctaaacccagaccaccaccggaggaaacagggatgaattcgcagccccagcagtcatggggagctccatcaggttcctggggtgcacagtagatgaagtgatattgtgagagcccctccctgtcccagccctagggctcgtagcggatcgtgagggatgattttgtgtggtgtgtcgcaggtgaaatgcctttgttgtcccaatattcctaccgtgttgggggtggtcgcttgctcgcgtccacgtctttcacatgaattggttactgtggtagttgtagttctggatacggtaccaaaacaaaagtattgctgtcaacaatctgcaacagccgggaaaacagtcgaaaacctttgcaaataatacctgctgccgtgg

SEQ ID NO: 6608 - protein, 140 aa, Zea mays subsp. mays
  peptide (1)..(140): Ceres Seq. ID no. 12402014
  misc_feature (37)..(108): Pfam Name: RNA recognition motif. (a.k.a. RRM, RBD, or RNP domain) Pfam Description: RNA recognition motif. (a.k.a. RRM, RBD, or RNP
  misc_feature (2)..(140): Homolog of NCBI NO: 38636774 NR Description: putative RNA recognition motif (RRM)-containing
  misc_feature (1)..(129): Homolog of NCBI NO: 34898598 NR Description: P0534A03.25 [Oryza sativa (japonica
  misc_feature (1)..(133): Homolog of NCBI NO: 15239676 NR Description: RRM-containing protein; protein id: At5g54580.1, by cDNA: 14044., supported by cDNA: gi_18175761, supported by gi_20465512 [Arabidopsis thaliana] >gi|9758950|dbj|BAB09337.1|
  misc_feature (8)..(116): Homolog of NCBI NO: 15224298 NR Description: RRM-containing protein; protein id: At2g37510.1,
  misc_feature (17)..(114): Homolog of NCBI NO: 15219486 NR Description: RRM-containing RNA-binding protein, putative;
  misc_feature (3)..(114): Homolog of NCBI NO: 15239958 NR Description: RRM-containing protein; protein id: At5g06210.1, by cDNA: 36764., supported by cDNA: gi_17065275, supported by gi_20260001 [Arabidopsis thaliana] >gi|9759319|dbj|BAB09686.1|
  misc_feature (34)..(140): Homolog of NCBI NO: 34906972 NR Description: putative glycine-rich RNA-binding protein 2
  misc_feature (4)..(138): Homolog of NCBI NO: 21388662 NR Description: glycine-rich RNA-binding protein [Physcomitrella
  misc_feature (1)..(114): Homolog of NCBI NO: 38344030 NR Description: OJ991214_12.1 [Oryza sativa (japonica
  misc_feature (34)..(99): Homolog of NCBI NO: 19881711 NR Description: Putative RNA-binding protein [Oryza sativa]
MAAAVARSGFRRMFSVSAFAPPKAPAARPKADPSPNLFVSGLSKRTTSEGLREAFAEFGEVLHARVVTDRVSGFSKGFGFVRYATTEEAAKGIEGKDGKFLDGWVIFAEYAKPRPPPEETGMNSQPQQSWGAPSGSWGAQ

SEQ ID NO: 6609 - protein, 128 aa, Zea mays subsp. mays
  peptide (1)..(128): Ceres Seq. ID no. 12402015
  misc_feature (25)..(96): Pfam Name: RNA recognition motif. (a.k.a. RRM, RBD, or RNP domain) Pfam Description: RNA recognition motif. (a.k.a. RRM, RBD, or RNP
  misc_feature (1)..(128): Homolog of NCBI NO: 38636774 NR Description: putative RNA recognition motif (RRM)-containing
  misc_feature (1)..(117): Homolog of NCBI NO: 34898598 NR Description: P0534A03.25 [Oryza sativa (japonica
  misc_feature (1)..(121): Homolog of NCBI NO: 15239676 NR Description: RRM-containing protein; protein id: At5g54580.1, by cDNA: 14044., supported by cDNA: gi_18175761, supported by gi_20465512 [Arabidopsis thaliana] >gi|9758950|dbj|BAB09337.1|
  misc_feature (1)..(104): Homolog of NCBI NO: 15224298 NR Description: RRM-containing protein; protein id: At2g37510.1,
  misc_feature (5)..(102): Homolog of NCBI NO: 15219486 NR Description: RRM-containing RNA-binding protein, putative;
  misc_feature (1)..(102): Homolog of NCBI NO: 15239958 NR Description: RRM-containing protein; protein id: At5g06210.1, by cDNA: 36764., supported by cDNA: gi_17065275, supported by gi_20260001 [Arabidopsis thaliana] >gi|9759319|dbj|BAB09686.1|
  misc_feature (22)..(128): Homolog of NCBI NO: 34906972 NR Description: putative glycine-rich RNA-binding protein 2
  misc_feature (1)..(126): Homolog of NCBI NO: 21388662 NR Description: glycine-rich RNA-binding protein [Physcomitrella
  misc_feature (1)..(102): Homolog of NCBI NO: 38344030 NR Description: OJ991214_12.1 [Oryza sativa (japonica
  misc_feature (22)..(87): Homolog of NCBI NO: 19881711 NR Description: Putative RNA-binding protein [Oryza sativa]
MFSVSAFAPPKAPAARPKADPSPNLFVSGLSKRTTSEGLREAFAEFGEVLHARVVTDRVSGFSKGFGFVRYATTEEAAKGIEGKDGKFLDGWVIFAEYAKPRPPPEETGMNSQPQQSWGAPSGSWGAQ

SEQ ID NO: 6610 - DNA, 1027 bp, Zea mays subsp. mays
  misc_feature (1)..(1027): Ceres Seq. ID no. 12341742
  misc_feature: MA Experiment ID: 20000535 Result: Down-regulated in Transcription
  misc_feature: MA Experiment 20000535 PARAMETER Experiment Name: Zm_Hybrid_Seed_Dev_P Parameter: DAP Value: 30 vs. 12
  misc_feature: MA Experiment 20000535 PARAMETER Experiment Name: Zm_Hybrid_Seed_Dev_P Parameter: Organism Value: Zea mays
  misc_feature: MA Experiment 20000535 PARAMETER Experiment Name: Zm_Hybrid_Seed_Dev_P Parameter: Plant Line Value: 35A19
  misc_feature: MA Experiment 20000535 PARAMETER Experiment Name: Zm_Hybrid_Seed_Dev_P Parameter: Tissue Value: Embryo vs. Unfert Floret
ctcaataaaatatgtactcggaatcggaagaagctgccttccttttccatccgcggaacgacgcacgcggacgcctccttgttccgggtcctactcccgccgcctagaggcctcgccctcccccctccggcgaaaaccgattctctccggcgtttcctggtcccttagtgcaagcaaggacaccgctcctctagcgagctccgttctgaagcggcaagaaagatgattaatcttttcaaaataaagggtcaaaagaaagaggaggcagcaagtctgctggaaaggcccctgttaagaaacagtctgctggggagctccgtcttcataaagatattagtgagctcaacctgccgaagaccacgtcaatttcttttcccaatggcaaggatgatctgatgaattttgagaccaccatccgacctgatgaaggatattacatgggaggcactttcgttttcacctttcaagtgtccccatcttatcctcatgatcctccgaaggtcaaatgcaagaccaaggtgtaccatccaaatattgatctggaaggcaatgtatgtctgaacattctgcgcgaagattggaagcctgttctcaacatcaacactgttatttatggcctgaatcttctttttacgcaaccaaacgacgaggatcctctgaaccacgaagctgcagttgtccttcgtgacaatccaaagatgtttgaggcaaatgtgagaagagccatggctggaggctacgtcggccaacactatttccaaagatgtgcttgacttgatgtggtggtggcttgaaaacgatcaacagagcccctccccctgtatcagcaccagcgcgcccagctttgtgtgcggaaagtacttctggaagcaaaatccaaaccgttcatggtgtgatactgtgatgcatctgtttgcccgcctttgtgatgtgtggtatagtggtggtgcataatgacatggaaatgcttctctaactgtatcattcattccataaatcctaaacgaggaatgggaagtggattgtt

SEQ ID NO: 6611 - protein, 125 aa, Zea mays subsp. mays
  peptide (1)..(125): Ceres Seq. ID no. 12341743
  misc_feature (1)..(125): Homolog of NCBI NO: 37531910 NR Description: putative ubiquitin-conjugating enzyme [Oryza
  misc_feature (1)..(124): Homolog of NCBI NO: 40253382 NR Description: putative RUB1 conjugating enzyme [Oryza sativa
  misc_feature (1)..(124): Homolog of NCBI NO: 26000688 NR Description: RUB1 conjugating enzyme [Olea europaea]
  misc_feature (1)..(124): Homolog of NCBI NO: 6635457 NR Description: RUB1 conjugating enzyme [Arabidopsis thaliana] AT4g36800/C7A10_560 [Arabidopsis thaliana]
  misc_feature (1)..(124): Homolog of NCBI NO: 10946511 NR Description: RUB1 conjugating enzyme [Lycopersicon esculentum]
  misc_feature (1)..(124): Homolog of NCBI NO: 18398792 NR Description: RUB1-conjugating enzyme, putative; protein id:
  misc_feature (1)..(124): Homolog of NCBI NO: 25407764 NR Description: ubiquitin-protein ligase-like protein [imported] -
  misc_feature (1)..(125): Homolog of NCBI NO: 32400752 NR Description: RUB1-conjugating enzyme [Triticum aestivum]
  misc_feature (1)..(124): Homolog of NCBI NO: 38174699 NR Description: Unknown (protein for MGC:75750) [Silurana
  misc_feature (1)..(124): Homolog of NCBI NO: 4507791 NR Description: ubiquitin-conjugating enzyme E2M (UBC12 homolog,
MNFETTIRPDEGYYMGGTFVFTFQVSPSYPHDPPKVKCKTKVYHPNIDLEGNVCLNILREDWKPVLNINTVIYGLNLLFTQPNDEDPLNHEAAVVLRDNPKMFEANVRRAMAGGYVGQHYFQRCA

SEQ ID NO: 6612 - protein, 111 aa, Zea mays subsp. mays
  peptide (1)..(111): Ceres Seq. ID no. 12341744
  misc_feature (1)..(111): Homolog of NCBI NO: 37531910 NR Description: putative ubiquitin-conjugating enzyme [Oryza
  misc_feature (1)..(110): Homolog of NCBI NO: 40253382 NR Description: putative RUB1 conjugating enzyme [Oryza sativa
  misc_feature (1)..(110): Homolog of NCBI NO: 26000688 NR Description: RUB1 conjugating enzyme [Olea europaea]
  misc_feature (1)..(110): Homolog of NCBI NO: 6635457 NR Description: RUB1 conjugating enzyme [Arabidopsis thaliana] AT4g36800/C7A10_560 [Arabidopsis thaliana]
  misc_feature (1)..(110): Homolog of NCBI NO: 10946511 NR Description: RUB1 conjugating enzyme [Lycopersicon esculentum]
  misc_feature (1)..(110): Homolog of NCBI NO: 18398792 NR Description: RUB1-conjugating enzyme, putative; protein id:
  misc_feature (1)..(110): Homolog of NCBI NO: 25407764 NR Description: ubiquitin-protein ligase-like protein [imported] -
  misc_feature (1)..(111): Homolog of NCBI NO: 32400752 NR Description: RUB1-conjugating enzyme [Triticum aestivum]
  misc_feature (1)..(110): Homolog of NCBI NO: 38174699 NR Description: Unknown (protein for MGC:75750) [Silurana
  misc_feature (1)..(110): Homolog of NCBI NO: 4507791 NR Description: ubiquitin-conjugating enzyme E2M (UBC12 homolog,
MGGTFVFTFQVSPSYPHDPPKVKCKTKVYHPNIDLEGNVCLNILREDWKPVLNINTVIYGLNLLFTQPNDEDPLNHEAAVVLRDNPKMFEANVRRAMAGGYVGQHYFQRCA

SEQ ID NO: 6613 - protein, 74 aa, Zea mays subsp. mays
  peptide (1)..(74): Ceres Seq. ID no. 12341745
SIKYVLGIGRSCLPFPSAERRTRTPPCSGSYSRRLEASPSPLRRKPILSGVSWSLSASKDTAPLASSVLKRQER

SEQ ID NO: 6614 - DNA, 956 bp, Zea mays subsp. mays
  misc_feature (1)..(956): Ceres Seq. ID no. 13498297
  misc_feature: MA Experiment ID: 20000534 Result: Down-regulated in Transcription
  misc_feature: MA Experiment 20000534 PARAMETER Experiment Name: Zm_Hybrid_Pollen_P Parameter: Age (day) Value: 8
  misc_feature: MA Experiment 20000534 PARAMETER Experiment Name: Zm_Hybrid_Pollen_P Parameter: Organism Value: Zea mays
  misc_feature: MA Experiment 20000534 PARAMETER Experiment Name: Zm_Hybrid_Pollen_P Parameter: Plant Line Value: 35A19
  misc_feature: MA Experiment 20000534 PARAMETER Experiment Name: Zm_Hybrid_Pollen_P Parameter: Tissue Value: Pollen vs. Aerial
aaacatactccgtttccgaatccgttccaccattgcctattgccccatcctccccgctagggttttgccagcatggccgccgccgccgcccggaggctcctctcccgccgcgcctcctcgtcctccctctccgcgctcctccgtcgcggcgctgtcccggagcagtcgctggtgttgcgcccggctgttgtcgcggcggcctcccgcctcggcttccagcgcgggatggcgcgggcggcctggcggggacggctacgtctcgacgcggtctggcgcgggcggggaccgcgcgcccatggccacggagatggcgccgctgttccccgggtgcgactacgagcattggctcatcgtgatggacaagcccggcggggagggcgccagcaagcagcagatgattgactgctacatccagaccctcgccaaggtccttggaagcgaggaggaggcgaagaagaagatctacaacgtctcgtgcgagcgctacttcgggtttgggtgcgagatcgatgaggagacatctaacaagctcgaggggctccctggtgttctctttgtgctcccggattcgtatgttgatgctgaatacaaggactacggagctgaactcttcgtcaacggtgagattgttcagaggacccccgagaggcagaggagggtggagcccgtgccacagagggcagcagacaggccgaggtacaatgacagaacccgctacgcacgcaggagggagaaccagcgatgaactttgcgataaaatcataaaaaataccacagcaacaagtcccaggtggtttcagctctggaattcaaggatcaccgagtatcgcctgtattaaattggcaatctcactttacgtgcagtctagagtatcgtttctatgtgctcagcttggacgtattgtattctgtaattacagctacttggagatttggaaggacctggcttgcaacgt

SEQ ID NO: 6615 - protein, 247 aa, Zea mays subsp. mays
  peptide (1)..(247): Ceres Seq. ID no. 13498298
  misc_feature (47)..(247): Homolog of NCBI NO: 34897972 NR Description: putative plastid protein [Oryza sativa (japonica group)] >gi|24413962|dbj|BAC22214.1| putative plastid protein
  misc_feature (36)..(246): Homolog of NCBI NO: 38344141 NR Description: OSJNBa0041A02.8 [Oryza sativa (japonica
  misc_feature (37)..(247): Homolog of NCBI NO: 15226108 NR Description: plastid protein [Arabidopsis thaliana]
  misc_feature (37)..(247): Homolog of NCBI NO: 25370552 NR Description: DAG protein homolog [imported] - Arabidopsis >gi|2246378|emb|CAB06698.1| plastid protein [Arabidopsis
  misc_feature (37)..(247): Homolog of NCBI NO: 21617909 NR Description: plastid protein [Arabidopsis thaliana]
  misc_feature (37)..(247): Homolog of NCBI NO: 2440029 NR Description: DAL1 protein [Arabidopsis thaliana]
  misc_feature (79)..(247): Homolog of NCBI NO: 15223247 NR Description: plastid protein -related [Arabidopsis thaliana]
  misc_feature (79)..(247): Homolog of NCBI NO: 15226934 NR Description: expressed protein [Arabidopsis thaliana]
  misc_feature (42)..(244): Homolog of NCBI NO: 38636775 NR Description: putative DAG protein [Oryza sativa (japonica
  misc_feature (39)..(244): Homolog of NCBI NO: 6014904 NR Description: DAG PROTEIN, CHLOROPLAST PRECURSOR
NILRFRIRSTIAYCPILPARVLPAWPPPPPGGSSPAAPPRPPSPRSSVAALSRSSRWCCARLLSRRPPASASSAGWRGRPGGDGYVSTRSGAGGDRAPMATEMAPLFPGCDYEHWLIVMDKPGGEGASKQQMIDCYIQTLAKVLGSEEEAKKKIYNVSCERYFGFGCEIDEETSNKLEGLPGVLFVLPDSYVDAEYKDYGAELFVNGEIVQRTPERQRRVEPVPQRAADRPRYNDRTRYARRRENQR

SEQ ID NO: 6616 - protein, 149 aa, Zea mays subsp. mays
  peptide (1)..(149): Ceres Seq. ID no. 13498299
  misc_feature (1)..(149): Homolog of NCBI NO: 34897972 NR Description: putative plastid protein [Oryza sativa (japonica group)] >gi|24413962|dbj|BAC22214.1| putative plastid protein
  misc_feature (1)..(148): Homolog of NCBI NO: 38344141 NR Description: OSJNBa0041A02.8 [Oryza sativa (japonica
  misc_feature (1)..(149): Homolog of NCBI NO: 15226108 NR Description: plastid protein [Arabidopsis thaliana]
  misc_feature (1)..(149): Homolog of NCBI NO: 25370552 NR Description: DAG protein homolog [imported] - Arabidopsis >gi|2246378|emb|CAB06698.1| plastid protein [Arabidopsis
  misc_feature (1)..(149): Homolog of NCBI NO: 21617909 NR Description: plastid protein [Arabidopsis thaliana]
  misc_feature (1)..(149): Homolog of NCBI NO: 2440029 NR Description: DAL1 protein [Arabidopsis thaliana]
  misc_feature (1)..(149): Homolog of NCBI NO: 15223247 NR Description: plastid protein -related [Arabidopsis thaliana]
  misc_feature (1)..(149): Homolog of NCBI NO: 15226934 NR Description: expressed protein [Arabidopsis thaliana]
  misc_feature (1)..(146): Homolog of NCBI NO: 38636775 NR Description: putative DAG protein [Oryza sativa (japonica
  misc_feature (1)..(146): Homolog of NCBI NO: 6014904 NR Description: DAG PROTEIN, CHLOROPLAST PRECURSOR
MATEMAPLFPGCDYEHWLIVMDKPGGEGASKQQMIDCYIQTLAKVLGSEEEAKKKIYNVSCERYFGFGCEIDEETSNKLEGLPGVLFVLPDSYVDAEYKDYGAELFVNGEIVQRTPERQRRVEPVPQRAADRPRYNDRTRYARRRENQR

SEQ ID NO: 6617 - protein, 145 aa, Zea mays subsp. mays
  peptide (1)..(145): Ceres Seq. ID no. 13498300
  misc_feature (1)..(145): Homolog of NCBI NO: 25370552 NR Description: DAG protein homolog [imported] - Arabidopsis >gi|2246378|emb|CAB06698.1| plastid protein [Arabidopsis
  misc_feature (1)..(145): Homolog of NCBI NO: 21617909 NR Description: plastid protein [Arabidopsis thaliana]
  misc_feature (1)..(145): Homolog of NCBI NO: 2440029 NR Description: DAL1 protein [Arabidopsis thaliana]
  misc_feature (1)..(145): Homolog of NCBI NO: 15223247 NR Description: plastid protein -related [Arabidopsis thaliana]
  misc_feature (1)..(145): Homolog of NCBI NO: 15226934 NR Description: expressed protein [Arabidopsis thaliana]
  misc_feature (1)..(142): Homolog of NCBI NO: 38636775 NR Description: putative DAG protein [Oryza sativa (japonica
  misc_feature (1)..(142): Homolog of NCBI NO: 6014904 NR Description: DAG PROTEIN, CHLOROPLAST PRECURSOR
  misc_feature (1)..(145): Homolog of NCBI NO: 34897972 NR Description: putative plastid protein [Oryza sativa (japonica group)] >gi|24413962|dbj|BAC22214.1| putative plastid protein
  misc_feature (1)..(144): Homolog of NCBI NO: 38344141 NR Description: OSJNBa0041A02.8 [Oryza sativa (japonica
  misc_feature (1)..(145): Homolog of NCBI NO: 15226108 NR Description: plastid protein [Arabidopsis thaliana]
MAPLFPGCDYEHWLIVMDKPGGEGASKQQMIDCYIQTLAKVLGSEEEAKKKIYNVSCERYFGFGCEIDEETSNKLEGLPGVLFVLPDSYVDAEYKDYGAELFVNGEIVQRTPERQRRVEPVPQRAADRPRYNDRTRYARRRENQR

SEQ ID NO: 6618 - DNA, 1411 bp, Zea mays subsp. mays
  misc_feature (1)..(1411): Ceres Seq. ID no. 12382198
  misc_feature: MA Experiment ID: 20000492 Result: Down-regulated in Transcription
  misc_feature: MA Experiment 20000492 PARAMETER Experiment Name: Zm_Hybrid_Seed_Dev_P Parameter: DAP Value: 12
  misc_feature: MA Experiment 20000492 PARAMETER Experiment Name: Zm_Hybrid_Seed_Dev_P Parameter: Organism Value: Zea mays
  misc_feature: MA Experiment 20000492 PARAMETER Experiment Name: Zm_Hybrid_Seed_Dev_P Parameter: Plant Line Value: 35A19
  misc_feature: MA Experiment 20000492 PARAMETER Experiment Name: Zm_Hybrid_Seed_Dev_P Parameter: Tissue Value: Fert Kernel vs. Unfert Floret
gacgccttgtttctggatcatccagcggggggacgccggtgtattgctcggtcctcctccctggttgcccgaggcagccgtgacggaggcggaggtagcgggggggaccatgtacagatcggcgggggtcgcgatggcgtggaacgtgttctggttctgcacggctctccgtgggctgggttccatcatgatcctactcgtcctcgccatcgtcggcgttacctactacgctgtcgtcctctgcaactacggccccgccctcctcaccggcggcggcaccactctcgccgcgctcgctgtcctgctcctcttccactttctgcttgctatgcttttatggagttatttttctgtggtgctcactgaccctggttctgttccaccaaattggaatcttgattttgatgcggagaggggagaaactgctcctctcactagctcagagttcagtagccagatgaattcacagcaatctgtggctcttggcaatacggcaaatccaagggctaggtactgtaggaaatgcaaccagttgaagccacctcggtgccaccattgctctgtttgtggaagatgtgttcttaagatggatcatcattgtgtgtgggtggttaattgtgttggggcactgaactacaaatactttcttctgttcctgttttacaccttcctcgagacaactcttgtcacactctctttattgcctcacttcatagccttcttcagtgatatcgagatcccaggaagtcctgcagcacttgcaaccacatttctcacctttgtgttgaatctggccttttccttgagcgtttttggtttatgattatgcatatttcacttgtttcggctaatacgacgacaattgaggcatatgagaagaagacaactccacattggatatatgatcttggccggaagaggaattttgctcaggtttttggaaatgacagaaaatattggttcatccctgcatattcagaagaggatctgagaagaattccagctctacagggtcttgattatcctgtcagtgagaccagattttgatggccaggaattgtaatggggcaattctaacagtgtcctcgtcagatacctcagtgttggacatctactcatacaactgtcagcattgctgattgccctatgcaaggcatctagtgaaatgtgcacaagatgattgtagtaatagtaaccatgagttattcatctgttgcacttcatgtatgtgacgaaggggaagtcctcctacctttgccagaggaagtttgttgtgatgtaaattagttttagcgcctggttagatggaccaaatcttggcgatgcgccaggattttggacttaattctttatccatccacgtgaattgggcaggatttcatccatgcaaactgggcattagtgtggtttg

SEQ ID NO: 6619 - protein, 273 aa, Zea mays subsp. mays
  peptide (1)..(273): Ceres Seq. ID no. 12382199
  misc_feature (163)..(225): Pfam Name: DHHC zinc finger domain Pfam Description: DHHC zinc finger domain
  misc_feature (37)..(273): Homolog of NCBI NO: 22331887 NR Description: putative protein; protein id: At3g60800.1, by cDNA: gi_20466004 [Arabidopsis thaliana] unknown protein [Arabidopsis thaliana]
  misc_feature (45)..(172): Homolog of NCBI NO: 11358343 NR Description: hypothetical protein T4C21.210 - Arabidopsis >gi|7329690|emb|CAB82684.1| putative protein [Arabidopsis
  misc_feature (195)..(273): Homolog of NCBI NO: 11358343 NR Description: hypothetical protein T4C21.210 - Arabidopsis >gi|7329690|emb|CAB82684.1| putative protein [Arabidopsis
  misc_feature (45)..(273): Homolog of NCBI NO: 21593364 NR Description: unknown [Arabidopsis thaliana]
  misc_feature (45)..(273): Homolog of NCBI NO: 18416000 NR Description: Expressed protein; protein id: At4g22750.1, by cDNA: 38360., supported by cDNA: gi_14334549, supported by gi_17065617 [Arabidopsis thaliana] >gi|14334550|gb|AAK59683.1|
  misc_feature (45)..(240): Homolog of NCBI NO: 7486880 NR Description: hypothetical protein T12H17.140 - Arabidopsis >gi|2827552|emb|CAA16560.1| predicted protein [Arabidopsis >gi|7269121|emb|CAB79230.1| predicted protein [Arabidopsis
  misc_feature (110)..(273): Homolog of NCBI NO: 18411456 NR Description: hypothetical protein; protein id: At4g00840.1
  misc_feature (13)..(273): Homolog of NCBI NO: 29791459 NR Description: Similar to RIKEN cDNA 5033406L14 gene [Homo
  misc_feature (52)..(273): Homolog of NCBI NO: 19921954 NR Description: CG1407-PB [Drosophila melanogaster]
  misc_feature (47)..(242): Homolog of NCBI NO: 34874230 NR Description: similar to RIKEN cDNA 5033406L14 [Rattus
TPCFWIIQRGDAGVLLGPPPWLPEAAVTEAEVAGGTMYRSAGVAMAWNVFWFCTALRGLGSIMILLVLAIVGVTYYAVVLCNYGPALLTGGGTTLAALAVLLLFHFLLAMLLWSYFSVVLTDPGSVPPNWNLDFDAERGETAPLTSSEFSSQMNSQQSVALGNTANPRARYCRKCNQLKPPRCHHCSVCGRCVLKMDHHCVWVVNCVGALNYKYFLLFLFYTFLETTLVTLSLLPHFIAFFSDIEIPGSPAALATTFLTFVLNLAFSLSVFGL

SEQ ID NO: 6620 - protein, 237 aa, Zea mays subsp. mays
  peptide (1)..(237): Ceres Seq. ID no. 12382200
  misc_feature (127)..(189): Pfam Name: DHHC zinc finger domain Pfam Description: DHHC zinc finger domain
  misc_feature (1)..(237): Homolog of NCBI NO: 22331887 NR Description: putative protein; protein id: At3g60800.1, by cDNA: gi_20466004 [Arabidopsis thaliana] unknown protein [Arabidopsis thaliana]
  misc_feature (9)..(136): Homolog of NCBI NO: 11358343 NR Description: hypothetical protein T4C21.210 - Arabidopsis >gi|7329690|emb|CAB82684.1| putative protein [Arabidopsis
  misc_feature (159)..(237): Homolog of NCBI NO: 11358343 NR Description: hypothetical protein T4C21.210 - Arabidopsis >gi|7329690|emb|CAB82684.1| putative protein [Arabidopsis
  misc_feature (9)..(237): Homolog of NCBI NO: 21593364 NR Description: unknown [Arabidopsis thaliana]
  misc_feature (9)..(237): Homolog of NCBI NO: 18416000 NR Description: Expressed protein; protein id: At4g22750.1, by cDNA: 38360., supported by cDNA: gi_14334549, supported by gi_17065617 [Arabidopsis thaliana] >gi|14334550|gb|AAK59683.1|
  misc_feature (9)..(204): Homolog of NCBI NO: 7486880 NR Description: hypothetical protein T12H17.140 - Arabidopsis >gi|2827552|emb|CAA16560.1| predicted protein [Arabidopsis >gi|7269121|emb|CAB79230.1| predicted protein [Arabidopsis
  misc_feature (74)..(237): Homolog of NCBI NO: 18411456 NR Description: hypothetical protein; protein id: At4g00840.1
  misc_feature (1)..(237): Homolog of NCBI NO: 29791459 NR Description: Similar to RIKEN cDNA 5033406L14 gene [Homo
  misc_feature (16)..(237): Homolog of NCBI NO: 19921954 NR Description: CG1407-PB [Drosophila melanogaster]
  misc_feature (11)..(206): Homolog of NCBI NO: 34874230 NR Description: similar to RIKEN cDNA 5033406L14 [Rattus
MYRSAGVAMAWNVFWFCTALRGLGSIMILLVLAIVGVTYYAVVLCNYGPALLTGGGTTLAALAVLLLFHFLLAMLLWSYFSVVLTDPGSVPPNWNLDFDAERGETAPLTSSEFSSQMNSQQSVALGNTANPRARYCRKCNQLKPPRCHHCSVCGRCVLKMDHHCVWVVNCVGALNYKYFLLFLFYTFLETTLVTLSLLPHFIAFFSDIEIPGSPAALATTFLTFVLNLAFSLSVFGL

SEQ ID NO: 6621 - protein, 229 aa, Zea mays subsp. mays
  peptide (1)..(229): Ceres Seq. ID no. 12382201
  misc_feature (119)..(181): Pfam Name: DHHC zinc finger domain Pfam Description: DHHC zinc finger domain
  misc_feature (1)..(229): Homolog of NCBI NO: 22331887 NR Description: putative protein; protein id: At3g60800.1, by cDNA: gi_20466004 [Arabidopsis thaliana] unknown protein [Arabidopsis thaliana]
  misc_feature (1)..(128): Homolog of NCBI NO: 11358343 NR Description: hypothetical protein T4C21.210 - Arabidopsis >gi|7329690|emb|CAB82684.1| putative protein [Arabidopsis
  misc_feature (151)..(229): Homolog of NCBI NO: 11358343 NR Description: hypothetical protein T4C21.210 - Arabidopsis >gi|7329690|emb|CAB82684.1| putative protein [Arabidopsis
  misc_feature (1)..(229): Homolog of NCBI NO: 21593364 NR Description: unknown [Arabidopsis thaliana]
  misc_feature (1)..(229): Homolog of NCBI NO: 18416000 NR Description: Expressed protein; protein id: At4g22750.1, by cDNA: 38360., supported by cDNA: gi_14334549, supported by gi_17065617 [Arabidopsis thaliana] >gi|14334550|gb|AAK59683.1|
  misc_feature (1)..(196): Homolog of NCBI NO: 7486880 NR Description: hypothetical protein T12H17.140 - Arabidopsis >gi|2827552|emb|CAA16560.1| predicted protein [Arabidopsis >gi|7269121|emb|CAB79230.1| predicted protein [Arabidopsis
  misc_feature (66)..(229): Homolog of NCBI NO: 18411456 NR Description: hypothetical protein; protein id: At4g00840.1
  misc_feature (1)..(229): Homolog of NCBI NO: 29791459 NR Description: Similar to RIKEN cDNA 5033406L14 gene [Homo
  misc_feature (8)..(229): Homolog of NCBI NO: 19921954 NR Description: CG1407-PB [Drosophila melanogaster]
  misc_feature (3)..(198): Homolog of NCBI NO: 34874230 NR Description: similar to RIKEN cDNA 5033406L14 [Rattus
MAWNVFWFCTALRGLGSIMILLVLAIVGVTYYAVVLCNYGPALLTGGGTTLAALAVLLLFHFLLAMLLWSYFSVVLTDPGSVPPNWNLDFDAERGETAPLTSSEFSSQMNSQQSVALGNTANPRARYCRKCNQLKPPRCHHCSVCGRCVLKMDHHCVWVVNCVGALNYKYFLLFLFYTFLETTLVTLSLLPHFIAFFSDIEIPGSPAALATTFLTFVLNLAFSLSVFGL

SEQ ID NO: 6622 - DNA, 1676 bp, Zea mays subsp. mays
  misc_feature (1)..(1676): Ceres Seq. ID no. 12408456
  misc_feature: MA Experiment ID: 108543 Result: Down-regulated in Transcription
  misc_feature: MA Experiment ID: 20000488 Result: Down-regulated in Transcription
  misc_feature: MA Experiment 20000488 PARAMETER Experiment Name: Zm_50mM_NH4NO3_L_to_H_P Parameter: Organism Value: Zea mays
  misc_feature: MA Experiment 20000488 PARAMETER Experiment Name: Zm_50mM_NH4NO3_L_to_H_P Parameter: Timepoint (hr) Value: 8
  misc_feature: MA Experiment 20000488 PARAMETER Experiment Name: Zm_50mM_NH4NO3_L_to_H_P Parameter: Tissue Value: Leaves
  misc_feature: MA Experiment 20000488 PARAMETER Experiment Name: Zm_50mM_NH4NO3_L_to_H_P Parameter: Treatment Value: 50mM NH4NO3 vs. 100mM Mannitol
gcgccagcagactctttttaatagccgacctcaaccaacgtcgagaggaaacccactgttgcagcgcgagtgtagcaggctgcacacacaaggaaggggacaaccacaagcgcctaagatcccgtcctccgcgtcgagatctttgccgaggcggtgaccgtcgagggatcgccatggcgttgagggcgtcccccgtgtcgcatggcaccgcggcagcgccgctgccgcctttcgcgcggaggaggatggcccgtggggtggtggtggccatggcgtccaccatcaacagggtcaaaactgtcaaagaaccctatacccctccacgagaggtacatcgccaaattacccattcactaccacctcaaaagcgggagattttcgattcacttcaaccttgggccaaggataacctactgaacctactgaagccagttgaaaagtcatggcagccacaggacttcctaccagagccttcttctgatgggttttatgatgaagttaaagaactgagggagcgggcaaatgaaatacctgatgaatactttgtttgcttagttggtgatatggttactgaggaagccttacctacataccaaacaatgcttaacactcttgatggagtccgggatgaaactggtgcaagtccaaccacgtgggcggtttggacaagggcatggacagctgaagagaacagacatggtgacctccttaacaagtacatgtaccttactggacgggttgacatgaaacaaattgagaagaccatacaatatctgattggttccggaatggatcctggaactgagaacaacccctacttgggtttcctctacacatcattccaagaaagggcaacatttgtgtcgcatgggaatactgcaaggcatgccaaggagtatggtgatctcaagctggcccagatatgtggcacgatagcagccgatgagaagcgccacgaaacagcctacaccaagatagtcgagaagctcttcgagatggaccctgattacacagtgcttgcgtttgctgacatgatgaggaagaagatcacgatgccagcccatctcatgtacgacggtaaggacgacaacctgttcgagcacttcagcgcggtggcgcagaggctgggcgtctacaccgccaaagactacgccgacatcctcgagttcctggtccagaggtggaaagtcgcggagctcacagggctgtctggagaagggagaagggcgcaggactttgtctgtaccttggcgccgaggatcaggcggctggatgatagagctcaagcgagggcgaagcaagcaccggttattcctttcagttgggtttatgaccgcaaggtgcagctttaatcaagaacgctaggcaatgtgggcatttactacgtatatcattttcagtcctggggttctctataagaaacagtctctaggttatctagcagggtacaattcaactactcgtggatctcactcggtgcaaagtagtgcaaagtacgctatctgttgttaccgtgcaagctgcagagtttggattactatgtgggcctggtgatggagaggaattctgtggggtgcctgcagccagttatgagtggcagctccatcgcaactgagttgttgtattgaatatgttacaggacctatagtaaccgaaagtaataatatggagtttgt

SEQ ID NO: 6623 - protein, 449 aa, Zea mays subsp. mays
  peptide (1)..(449): Ceres Seq. ID no. 12408457
  misc_feature (62)..(449): Homolog of NCBI NO: 3915029 NR Description: Acyl-[acyl-carrier protein] desaturase,
  misc_feature (58)..(449): Homolog of NCBI NO: 7433271 NR Description: acyl-[acyl-carrier-protein] desaturase (EC
  misc_feature (58)..(449): Homolog of NCBI NO: 19386730 NR Description: putative stearoyl-acyl-carrier protein desaturase
  misc_feature (58)..(449): Homolog of NCBI NO: 27804770 NR Description: putative stearoyl-acyl carrier protein desaturase
  misc_feature (75)..(449): Homolog of NCBI NO: 1785862 NR Description: stearoyl-Acyl-carrier protein desaturase [Elaeis
  misc_feature (75)..(449): Homolog of NCBI NO: 3915024 NR Description: Acyl-[acyl-carrier protein] desaturase,
  misc_feature (58)..(449): Homolog of NCBI NO: 575942 NR Description: stearoyl-acyl carrier protein desaturase [Sesamum
  misc_feature (58)..(449): Homolog of NCBI NO: 134945 NR Description: Acyl-[acyl-carrier protein] desaturase,
  misc_feature (58)..(449): Homolog of NCBI NO: 951427 NR Description: stearoyl-acyl-carrier protein desaturase
  misc_feature (58)..(449): Homolog of NCBI NO: 1020096 NR Description: stearoyl-acyl carrier protein desaturase [Sesamum
ASRLFLIADLNQRREETHCCSASVAGCTHKEGDNHKRLRSRPPRRDLCRGGDRRGIAMALRASPVSHGTAAAPLPPFARRRMARGVVVAMASTINRVKTVKEPYTPPREVHRQITHSLPPQKREIFDSLQPWAKDNLLNLLKPVEKSWQPQDFLPEPSSDGFYDEVKELRERANEIPDEYFVCLVGDMVTEEALPTYQTMLNTLDGVRDETGASPTTWAVWTRAWTAEENRHGDLLNKYMYLTGRVDMKQIEKTIQYLIGSGMDPGTENNPYLGFLYTSFQERATFVSHGNTARHAKEYGDLKLAQICGTIAADEKRHETAYTKIVEKLFEMDPDYTVLAFADMMRKKITMPAHLMYDGKDDNLFEHFSAVAQRLGVYTAKDYADILEFLVQRWKVAELTGLSGEGRRAQDFVCTLAPRIRRLDDRAQARAKQAPVIPFSWVYDRKVQL

SEQ ID NO: 6624 - protein, 392 aa, Zea mays subsp. mays
  peptide (1)..(392): Ceres Seq. ID no. 12408458
  misc_feature (5)..(392): Homolog of NCBI NO: 3915029 NR Description: Acyl-[acyl-carrier protein] desaturase,
  misc_feature (1)..(392): Homolog of NCBI NO: 7433271 NR Description: acyl-[acyl-carrier-protein] desaturase (EC
  misc_feature (1)..(392): Homolog of NCBI NO: 19386730 NR Description: putative stearoyl-acyl-carrier protein desaturase
  misc_feature (1)..(392): Homolog of NCBI NO: 27804770 NR Description: putative stearoyl-acyl carrier protein desaturase
  misc_feature (18)..(392): Homolog of NCBI NO: 1785862 NR Description: stearoyl-Acyl-carrier protein desaturase [Elaeis
  misc_feature (18)..(392): Homolog of NCBI NO: 3915024 NR Description: Acyl-[acyl-carrier protein] desaturase,
  misc_feature (1)..(392): Homolog of NCBI NO: 575942 NR Description: stearoyl-acyl carrier protein desaturase [Sesamum
  misc_feature (1)..(392): Homolog of NCBI NO: 134945 NR Description: Acyl-[acyl-carrier protein] desaturase,
  misc_feature (1)..(392): Homolog of NCBI NO: 951427 NR Description: stearoyl-acyl-carrier protein desaturase
  misc_feature (1)..(392): Homolog of NCBI NO: 1020096 NR Description: stearoyl-acyl carrier protein desaturase [Sesamum
MALRASPVSHGTAAAPLPPFARRRMARGVVVAMASTINRVKTVKEPYTPPREVHRQITHSLPPQKREIFDSLQPWAKDNLLNLLKPVEKSWQPQDFLPEPSSDGFYDEVKELRERANEIPDEYFVCLVGDMVTEEALPTYQTMLNTLDGVRDETGASPTTWAVWTRAWTAEENRHGDLLNKYMYLTGRVDMKQIEKTIQYLIGSGMDPGTENNPYLGFLYTSFQERATFVSHGNTARHAKEYGDLKLAQICGTIAADEKRHETAYTKIVEKLFEMDPDYTVLAFADMMRKKITMPAHLMYDGKDDNLFEHFSAVAQRLGVYTAKDYADILEFLVQRWKVAELTGLSGEGRRAQDFVCTLAPRIRRLDDRAQARAKQAPVIPFSWVYDRKVQL

SEQ ID NO: 6625 - protein, 368 aa, Zea mays subsp. mays
  peptide (1)..(368): Ceres Seq. ID no. 12408459
  misc_feature (1)..(368): Homolog of NCBI NO: 3915029 NR Description: Acyl-[acyl-carrier protein] desaturase,
  misc_feature (1)..(368): Homolog of NCBI NO: 7433271 NR Description: acyl-[acyl-carrier-protein] desaturase (EC
  misc_feature (1)..(368): Homolog of NCBI NO: 19386730 NR Description: putative stearoyl-acyl-carrier protein desaturase
  misc_feature (1)..(368): Homolog of NCBI NO: 27804770 NR Description: putative stearoyl-acyl carrier protein desaturase
  misc_feature (1)..(368): Homolog of NCBI NO: 1785862 NR Description: stearoyl-Acyl-carrier protein desaturase [Elaeis
  misc_feature (1)..(368): Homolog of NCBI NO: 3915024 NR Description: Acyl-[acyl-carrier protein] desaturase,
  misc_feature (1)..(368): Homolog of NCBI NO: 575942 NR Description: stearoyl-acyl carrier protein desaturase [Sesamum
  misc_feature (1)..(368): Homolog of NCBI NO: 134945 NR Description: Acyl-[acyl-carrier protein] desaturase,
  misc_feature (1)..(368): Homolog of NCBI NO: 951427 NR Description: stearoyl-acyl-carrier protein desaturase
  misc_feature (1)..(368): Homolog of NCBI NO: 1020096 NR Description: stearoyl-acyl carrier protein desaturase [Sesamum
MARGVVVAMASTINRVKTVKEPYTPPREVHRQITHSLPPQKREIFDSLQPWAKDNLLNLLKPVEKSWQPQDFLPEPSSDGFYDEVKELRERANEIPDEYFVCLVGDMVTEEALPTYQTMLNTLDGVRDETGASPTTWAVWTRAWTAEENRHGDLLNKYMYLTGRVDMKQIEKTIQYLIGSGMDPGTENNPYLGFLYTSFQERATFVSHGNTARHAKEYGDLKLAQICGTIAADEKRHETAYTKIVEKLFEMDPDYTVLAFADMMRKKITMPAHLMYDGKDDNLFEHFSAVAQRLGVYTAKDYADILEFLVQRWKVAELTGLSGEGRRAQDFVCTLAPRIRRLDDRAQARAKQAPVIPFSWVYDRKVQL

SEQ ID NO: 6626 - DNA, 1683 bp, Zea mays subsp. mays
  misc_feature (1)..(1683): Ceres Seq. ID no. 12408452
  misc_feature: MA Experiment ID: 108523 Result: Down-regulated in Transcription
  misc_feature: MA Experiment 108523 PARAMETER Experiment Name: Zm_42deg_Heat_P Parameter: Age (day) Value: 8
  misc_feature: MA Experiment 108523 PARAMETER Experiment Name: Zm_42deg_Heat_P Parameter: Organism Value: Zea mays
  misc_feature: MA Experiment 108523 PARAMETER Experiment Name: Zm_42deg_Heat_P Parameter: Plant Line Value: 35A19
  misc_feature: MA Experiment 108523 PARAMETER Experiment Name: Zm_42deg_Heat_P Parameter: Temperature (deg C) Value: 42 vs. 22
  misc_feature: MA Experiment 108523 PARAMETER Experiment Name: Zm_42deg_Heat_P Parameter: Timepoint (hr) Value: 6
  misc_feature: MA Experiment 108523 PARAMETER Experiment Name: Zm_42deg_Heat_P Parameter: Tissue Value: Aerial
  misc_feature: MA Experiment ID: 108527 Result: Down-regulated in Transcription
  misc_feature: MA Experiment 108527 PARAMETER Experiment Name: Zm_5mM_NO_P Parameter: Age (day) Value: 8
  misc_feature: MA Experiment 108527 PARAMETER Experiment Name: Zm_5mM_NO_P Parameter: Organism Value: Zea mays
  misc_feature: MA Experiment 108527 PARAMETER Experiment Name: Zm_5mM_NO_P Parameter: Plant Line Value: 35A19
  misc_feature: MA Experiment 108527 PARAMETER Experiment Name: Zm_5mM_NO_P Parameter: Timepoint (hr) Value: 6
  misc_feature: MA Experiment 108527 PARAMETER Experiment Name: Zm_5mM_NO_P Parameter: Tissue Value: Aerial
  misc_feature: MA Experiment 108527 PARAMETER Experiment Name: Zm_5mM_NO_P Parameter: Treatment Value: 5mM NO vs. No Treatment
  misc_feature: MA Experiment ID: 108528 Result: Up-regulated in Transcription
  misc_feature: MA Experiment 108528 PARAMETER Experiment Name: Zm_Imbibed_Seeds_P Parameter: Age (day) Value: 5 vs. 2
  misc_feature: MA Experiment 108528 PARAMETER Experiment Name: Zm_Imbibed_Seeds_P Parameter: Organism Value: Zea mays
  misc_feature: MA Experiment 108528 PARAMETER Experiment Name: Zm_Imbibed_Seeds_P Parameter: Plant Line Value: 35A19
  misc_feature: MA Experiment 108528 PARAMETER Experiment Name: Zm_Imbibed_Seeds_P Parameter: Tissue Value: Aerial vs. Embryo
  misc_feature: MA Experiment ID: 108529 Result: Down-regulated in Transcription
  misc_feature: MA Experiment 108529 PARAMETER Experiment Name: Zm_Imbibed_Seeds_P Parameter: Age (day) Value: 5 vs. 2
  misc_feature: MA Experiment 108529 PARAMETER Experiment Name: Zm_Imbibed_Seeds_P Parameter: Organism Value: Zea mays
  misc_feature: MA Experiment 108529 PARAMETER Experiment Name: Zm_Imbibed_Seeds_P Parameter: Plant Line Value: 35A19
  misc_feature: MA Experiment 108529 PARAMETER Experiment Name: Zm_Imbibed_Seeds_P Parameter: Tissue Value: Roots vs. Embryo
  misc_feature: MA Experiment ID: 108530 Result: Up-regulated in Transcription
  misc_feature: MA Experiment 108530 PARAMETER Experiment Name: Zm_Imbibed_Seeds_P Parameter: Age (day) Value: 6 vs. 2
  misc_feature: MA Experiment 108530 PARAMETER Experiment Name: Zm_Imbibed_Seeds_P Parameter: Organism Value: Zea mays
  misc_feature: MA Experiment 108530 PARAMETER Experiment Name: Zm_Imbibed_Seeds_P Parameter: Plant Line Value: 35A19
  misc_feature: MA Experiment 108530 PARAMETER Experiment Name: Zm_Imbibed_Seeds_P Parameter: Tissue Value: Aerial vs. Embryo
  misc_feature: MA Experiment ID: 108536 Result: Down-regulated in Transcription
  misc_feature: MA Experiment 108536 PARAMETER Experiment Name: Zm_Meristem_P Parameter: Age (day) Value: 8
  misc_feature: MA Experiment 108536 PARAMETER Experiment Name: Zm_Meristem_P Parameter: Organism Value: Zea mays
  misc_feature: MA Experiment 108536 PARAMETER Experiment Name: Zm_Meristem_P Parameter: Plant Line Value: 35A19
  misc_feature: MA Experiment 108536 PARAMETER Experiment Name: Zm_Meristem_P Parameter: Tissue Value: Shoot Meristem vs. Above Shoot Meristem
  misc_feature: MA Experiment ID: 108543 Result: Up-regulated in Transcription
  misc_feature: MA Experiment ID: 108545 Result: Up-regulated in Transcription
  misc_feature: MA Experiment 108545 PARAMETER Experiment Name: Zm_Imbibed_Seeds_P Parameter: Age (day) Value: 3 vs. 2
  misc_feature: MA Experiment 108545 PARAMETER Experiment Name: Zm_Imbibed_Seeds_P Parameter: Organism Value: Zea mays
  misc_feature: MA Experiment 108545 PARAMETER Experiment Name: Zm_Imbibed_Seeds_P Parameter: Plant Line Value: 35A19
  misc_feature: MA Experiment 108545 PARAMETER Experiment Name: Zm_Imbibed_Seeds_P Parameter: Tissue Value: Aerial vs. Embryo
  misc_feature: MA Experiment ID: 108547 Result: Up-regulated in Transcription
  misc_feature: MA Experiment 108547 PARAMETER Experiment Name: Zm_Imbibed_Seeds_P Parameter: Age (day) Value: 4 vs. 2
  misc_feature: MA Experiment 108547 PARAMETER Experiment Name: Zm_Imbibed_Seeds_P Parameter: Organism Value: Zea mays
  misc_feature: MA Experiment 108547 PARAMETER Experiment Name: Zm_Imbibed_Seeds_P Parameter: Plant Line Value: 35A19
  misc_feature: MA Experiment 108547 PARAMETER Experiment Name: Zm_Imbibed_Seeds_P Parameter: Tissue Value: Aerial vs. Embryo
  misc_feature: MA Experiment ID: 108556 Result: Down-regulated in Transcription
  misc_feature: MA Experiment 108556 PARAMETER Experiment Name: Zm_Drought_P Parameter: Age (day) Value: 9
  misc_feature: MA Experiment 108556 PARAMETER Experiment Name: Zm_Drought_P Parameter: Organism Value: Zea mays
  misc_feature: MA Experiment 108556 PARAMETER Experiment Name: Zm_Drought_P Parameter: Plant Line Value: 35A19
  misc_feature: MA Experiment 108556 PARAMETER Experiment Name: Zm_Drought_P Parameter: Timepoint (hr) Value: 24
  misc_feature: MA Experiment 108556 PARAMETER Experiment Name: Zm_Drought_P Parameter: Tissue Value: Aerial
  misc_feature: MA Experiment 108556 PARAMETER Experiment Name: Zm_Drought_P Parameter: Treatment Value: Drought vs. No Drought
  misc_feature: MA Experiment ID: 108559 Result: Down-regulated in Transcription
  misc_feature: MA Experiment 108559 PARAMETER Experiment Name: Zm_5mM_NO_P Parameter: Age (day) Value: 8
  misc_feature: MA Experiment 108559 PARAMETER Experiment Name: Zm_5mM_NO_P Parameter: Organism Value: Zea mays
  misc_feature: MA Experiment 108559 PARAMETER Experiment Name: Zm_5mM_NO_P Parameter: Plant Line Value: 35A19
  misc_feature: MA Experiment 108559 PARAMETER Experiment Name: Zm_5mM_NO_P Parameter: Timepoint (hr) Value: 12
  misc_feature: MA Experiment 108559 PARAMETER Experiment Name: Zm_5mM_NO_P Parameter: Tissue Value: Aerial
  misc_feature: MA Experiment 108559 PARAMETER Experiment Name: Zm_5mM_NO_P Parameter: Treatment Value: 5mM NO vs. No Treatment
  misc_feature: MA Experiment ID: 20000480 Result: Down-regulated in Transcription
  misc_feature: MA Experiment 20000480 PARAMETER Experiment Name: Zm_Drought_P Parameter: Age (day) Value: 11
  misc_feature: MA Experiment 20000480 PARAMETER Experiment Name: Zm_Drought_P Parameter: Organism Value: Zea mays
  misc_feature: MA Experiment 20000480 PARAMETER Experiment Name: Zm_Drought_P Parameter: Plant Line Value: 35A19
  misc_feature: MA Experiment 20000480 PARAMETER Experiment Name: Zm_Drought_P Parameter: Timepoint (hr) Value: 72
  misc_feature: MA Experiment 20000480 PARAMETER Experiment Name: Zm_Drought_P Parameter: Tissue Value: Aerial
  misc_feature: MA Experiment 20000480 PARAMETER Experiment Name: Zm_Drought_P Parameter: Treatment Value: Drought vs. No Drought
  misc_feature: MA Experiment ID: 20000535 Result: Down-regulated in Transcription
  misc_feature: MA Experiment 20000535 PARAMETER Experiment Name: Zm_Hybrid_Seed_Dev_P Parameter: DAP Value: 30 vs. 12
  misc_feature: MA Experiment 20000535 PARAMETER Experiment Name: Zm_Hybrid_Seed_Dev_P Parameter: Organism Value: Zea mays
  misc_feature: MA Experiment 20000535 PARAMETER Experiment Name: Zm_Hybrid_Seed_Dev_P Parameter: Plant Line Value: 35A19
  misc_feature: MA Experiment 20000535 PARAMETER Experiment Name: Zm_Hybrid_Seed_Dev_P Parameter: Tissue Value: Embryo vs. Unfert Floret
accatctttaggataagatagcaaatatatggccatcatactcgtacgagcagcgtcgccggggctctccgccgccgacagcatcagccaccaggggactctccagtgctccaccctgctcaagacgaagaggccggcggcgcgccggtggatgccctgctcgctccttggcctccacccgtgggaggctggccgtccctcccccgccgtctactccagcctcgccgtcaacccggcgggagaggccgtcgtctcgtccgagcagaaggtctacgacgtcgtgctcaagcaggccgcattgctcaaacgccagctgcgcacgccggtcctacgccaggccccaggacatggacatgccacgcaacgggctcaaggaagcctacgaccgctgcggcgagatctgtgaggagtatgccaagacgttttacctcggaactatgttgatgacagaggagcggcgccgcgccatatgggccatctatgtgtggtgtaggaggacagatgagcttgtagatgggccaaacgccaactacattacaccaacagctttggaccggtgggagaagagacttgaggatctgttcacgggacgtccttacgacatgcttgatgccgctctctctgataccatctcaaggttccccatagacattcagccattcagggacatgattgaagggatgaggagtgatcttaggaagacaaggtataacaacttcgacgagctctacatgtactgctactatgttgctggaactgtcgggttaatgagcgtacctgtgatgggcatcgcaaccgagtctaaagcaacaactgaaagcgtatacagtgctgccttggctctgggaattgcgaaccaactcacgaacatactccgggatgttggagaggatgctagaagaggaaggatatatttaccacaagatgagcttgcacaggcagggctctctgatgaggacatcttcaaaggggtcgtcacgaaccggtggagaaacttcatgaagaggcagatcaagagggccaggatgttttttgaggaggcagagagaggggtaaatgagctctcacaggctagcagatggccagtatgggcttccctgttgttgtacaggcagatcctggatgagatcgaagccaacgactacaacaacttcacgaagagggcgtatgttggtaaagggaagaagttgctagcacttcctgtggcatatggaaaatcgctactgctcccatgttcattgagaaatggccagacctagccatcagagaagctgcaatgcaaggttcaggttaggctagatagaaagttaaatggggcaacatcaggaggccttgatgaaaaacagacaacctggtgaattgttgttgggatcaggcacagaacagataagagccgcgcagccaacctagatggatacggaacattcgcctcttattcggagcaatatatgtctctcaaggaaagagcccaacatgtatactgccttctttttctcatcccagatttgggggaaaaacaatgtaaatgccaatggtatcgtaggaagattactagaagtaaatgccaatgtaaaaacagatgagttggcatttacatgataggatggtggggtcatcagactgaaaatgataggggattgtgctcccctgcgactccaactattaaacaaggaatccgtcagc

SEQ ID NO: 6627 - protein, 303 aa, Zea mays subsp. mays
  peptide (1)..(303): Ceres Seq. ID no. 12408453
  misc_feature (19)..(293): Pfam Name: Squalene/phytoene synthase Pfam Description: Squalene/phytoene synthase
  misc_feature (1)..(303): Homolog of NCBI NO: 39842609 NR Description: chloroplast phytoene synthase [Zea mays]
  misc_feature (1)..(303): Homolog of NCBI NO: 1346883 NR Description: Phytoene synthase, chloroplast precursor
  misc_feature (8)..(299): Homolog of NCBI NO: 1709885 NR Description: Phytoene synthase, chloroplast precursor
  misc_feature (8)..(295): Homolog of NCBI NO: 40557193 NR Description: phytoene synthase [Oncidium cv. 'Gower Ramsey']
  misc_feature (8)..(295): Homolog of NCBI NO: 40456029 NR Description: phytoene synthase [Momordica charantia var.
  misc_feature (1)..(299): Homolog of NCBI NO: 15237933 NR Description: phytoene synthase (geranylgeranyl-diphosphate transferase)(PSY); protein id: At5g17230.1, supported by cDNA: supported by cDNA: gi_15810496, supported by cDNA: phytoene
  misc_feature (1)..(299): Homolog of NCBI NO: 21553694 NR Description: phytoene synthase [Arabidopsis thaliana]
  misc_feature (1)..(293): Homolog of NCBI NO: 585749 NR Description: Phytoene synthase, chloroplast precursor
  misc_feature (8)..(295): Homolog of NCBI NO: 1346882 NR Description: Phytoene synthase, chloroplast precursor (MEL5)
  misc_feature (8)..(295): Homolog of NCBI NO: 6959860 NR Description: phytoene synthase [Citrus unshiu]
MDMPRNGLKEAYDRCGEICEEYAKTFYLGTMLMTEERRRAIWAIYVWCRRTDELVDGPNANYITPTALDRWEKRLEDLFTGRPYDMLDAALSDTISRFPIDIQPFRDMIEGMRSDLRKTRYNNFDELYMYCYYVAGTVGLMSVPVMGIATESKATTESVYSAALALGIANQLTNILRDVGEDARRGRIYLPQDELAQAGLSDEDIFKGVVTNRWRNFMKRQIKRARMFFEEAERGVNELSQASRWPVWASLLLYRQILDEIEANDYNNFTKRAYVGKGKKLLALPVAYGKSLLLPCSLRNGQT

SEQ ID NO: 6628 - protein, 301 aa, Zea mays subsp. mays
  peptide (1)..(301): Ceres Seq. ID no. 12408454
  misc_feature (17)..(291): Pfam Name: Squalene/phytoene synthase Pfam Description: Squalene/phytoene synthase
  misc_feature (1)..(301): Homolog of NCBI NO: 39842609 NR Description: chloroplast phytoene synthase [Zea mays]
  misc_feature (1)..(301): Homolog of NCBI NO: 1346883 NR Description: Phytoene synthase, chloroplast precursor
  misc_feature (6)..(297): Homolog of NCBI NO: 1709885 NR Description: Phytoene synthase, chloroplast precursor
  misc_feature (6)..(293): Homolog of NCBI NO: 40557193 NR Description: phytoene synthase [Oncidium cv. 'Gower Ramsey']
  misc_feature (6)..(293): Homolog of NCBI NO: 40456029 NR Description: phytoene synthase [Momordica charantia var.
  misc_feature (1)..(297): Homolog of NCBI NO: 15237933 NR Description: phytoene synthase (geranylgeranyl-diphosphate transferase)(PSY); protein id: At5g17230.1, supported by cDNA: supported by cDNA: gi_15810496, supported by cDNA: phytoene
  misc_feature (1)..(297): Homolog of NCBI NO: 21553694 NR Description: phytoene synthase [Arabidopsis thaliana]
  misc_feature (1)..(291): Homolog of NCBI NO: 585749 NR Description: Phytoene synthase, chloroplast precursor
  misc_feature (6)..(293): Homolog of NCBI NO: 1346882 NR Description: Phytoene synthase, chloroplast precursor (MEL5)
  misc_feature (6)..(293): Homolog of NCBI NO: 6959860 NR Description: phytoene synthase [Citrus unshiu]
MPRNGLKEAYDRCGEICEEYAKTFYLGTMLMTEERRRAIWAIYVWCRRTDELVDGPNANYITPTALDRWEKRLEDLFTGRPYDMLDAALSDTISRFPIDIQPFRDMIEGMRSDLRKTRYNNFDELYMYCYYVAGTVGLMSVPVMGIATESKATTESVYSAALALGIANQLTNILRDVGEDARRGRIYLPQDELAQAGLSDEDIFKGVVTNRWRNFMKRQIKRARMFFEEAERGVNELSQASRWPVWASLLLYRQILDEIEANDYNNFTKRAYVGKGKKLLALPVAYGKSLLLPCSLRNGQT

SEQ ID NO: 6629 - protein, 273 aa, Zea mays subsp. mays
  peptide (1)..(273): Ceres Seq. ID no. 12408455
  misc_feature (1)..(263): Pfam Name: Squalene/phytoene synthase Pfam Description: Squalene/phytoene synthase
  misc_feature (1)..(273): Homolog of NCBI NO: 39842609 NR Description: chloroplast phytoene synthase [Zea mays]
  misc_feature (1)..(273): Homolog of NCBI NO: 1346883 NR Description: Phytoene synthase, chloroplast precursor
  misc_feature (1)..(269): Homolog of NCBI NO: 1709885 NR Description: Phytoene synthase, chloroplast precursor
  misc_feature (1)..(265): Homolog of NCBI NO: 40557193 NR Description: phytoene synthase [Oncidium cv. 'Gower Ramsey']
  misc_feature (1)..(265): Homolog of NCBI NO: 40456029 NR Description: phytoene synthase [Momordica charantia var.
  misc_feature (1)..(269): Homolog of NCBI NO: 15237933 NR Description: phytoene synthase (geranylgeranyl-diphosphate transferase)(PSY); protein id: At5g17230.1, supported by cDNA: supported by cDNA: gi_15810496, supported by cDNA: phytoene
  misc_feature (1)..(269): Homolog of NCBI NO: 21553694 NR Description: phytoene synthase [Arabidopsis thaliana]
  misc_feature (1)..(263): Homolog of NCBI NO: 585749 NR Description: Phytoene synthase, chloroplast precursor
  misc_feature (1)..(265): Homolog of NCBI NO: 1346882 NR Description: Phytoene synthase, chloroplast precursor (MEL5)
  misc_feature (1)..(265): Homolog of NCBI NO: 6959860 NR Description: phytoene synthase [Citrus unshiu]
MLMTEERRRAIWAIYVWCRRTDELVDGPNANYITPTALDRWEKRLEDLFTGRPYDMLDAALSDTISRFPIDIQPFRDMIEGMRSDLRKTRYNNFDELYMYCYYVAGTVGLMSVPVMGIATESKATTESVYSAALALGIANQLTNILRDVGEDARRGRIYLPQDELAQAGLSDEDIFKGVVTNRWRNFMKRQIKRARMFFEEAERGVNELSQASRWPVWASLLLYRQILDEIEANDYNNFTKRAYVGKGKKLLALPVAYGKSLLLPCSLRNGQT

SEQ ID NO: 6630 - DNA, 1225 bp, Zea mays subsp. mays
  misc_feature (1)..(1225): Ceres Seq. ID no. 12344366
  misc_feature: MA Experiment ID: 108522 Result: Up-regulated in Transcription
  misc_feature: MA Experiment 108522 PARAMETER Experiment Name: Zm_42deg_Heat_P Parameter: Age (day) Value: 8
  misc_feature: MA Experiment 108522 PARAMETER Experiment Name: Zm_42deg_Heat_P Parameter: Organism Value: Zea mays
  misc_feature: MA Experiment 108522 PARAMETER Experiment Name: Zm_42deg_Heat_P Parameter: Plant Line Value: 35A19
  misc_feature: MA Experiment 108522 PARAMETER Experiment Name: Zm_42deg_Heat_P Parameter: Temperature (deg C) Value: 42 vs. 22
  misc_feature: MA Experiment 108522 PARAMETER Experiment Name: Zm_42deg_Heat_P Parameter: Timepoint (hr) Value: 1
  misc_feature: MA Experiment 108522 PARAMETER Experiment Name: Zm_42deg_Heat_P Parameter: Tissue Value: Aerial
  misc_feature: MA Experiment ID: 108523 Result: Up-regulated in Transcription
  misc_feature: MA Experiment 108523 PARAMETER Experiment Name: Zm_42deg_Heat_P Parameter: Age (day) Value: 8
  misc_feature: MA Experiment 108523 PARAMETER Experiment Name: Zm_42deg_Heat_P Parameter: Organism Value: Zea mays
  misc_feature: MA Experiment 108523 PARAMETER Experiment Name: Zm_42deg_Heat_P Parameter: Plant Line Value: 35A19
  misc_feature: MA Experiment 108523 PARAMETER Experiment Name: Zm_42deg_Heat_P Parameter: Temperature (deg C) Value: 42 vs. 22
  misc_feature: MA Experiment 108523 PARAMETER Experiment Name: Zm_42deg_Heat_P Parameter: Timepoint (hr) Value: 6
  misc_feature: MA Experiment 108523 PARAMETER Experiment Name: Zm_42deg_Heat_P Parameter: Tissue Value: Aerial
  misc_feature: MA Experiment ID: 108527 Result: Up-regulated in Transcription
  misc_feature: MA Experiment 108527 PARAMETER Experiment Name: Zm_5mM_NO_P Parameter: Age (day) Value: 8
  misc_feature: MA Experiment 108527 PARAMETER Experiment Name: Zm_5mM_NO_P Parameter: Organism Value: Zea mays
  misc_feature: MA Experiment 108527 PARAMETER Experiment Name: Zm_5mM_NO_P Parameter: Plant Line Value: 35A19
  misc_feature: MA Experiment 108527 PARAMETER Experiment Name: Zm_5mM_NO_P Parameter: Timepoint (hr) Value: 6
  misc_feature: MA Experiment 108527 PARAMETER Experiment Name: Zm_5mM_NO_P Parameter: Tissue Value: Aerial
  misc_feature: MA Experiment 108527 PARAMETER Experiment Name: Zm_5mM_NO_P Parameter: Treatment Value: 5mM NO vs. No Treatment
  misc_feature: MA Experiment ID: 20000488 Result: Up-regulated in Transcription
  misc_feature: MA Experiment 20000488 PARAMETER Experiment Name: Zm_50mM_NH4NO3_L_to_H_P Parameter: Organism Value: Zea mays
  misc_feature: MA Experiment 20000488 PARAMETER Experiment Name: Zm_50mM_NH4NO3_L_to_H_P Parameter: Timepoint (hr) Value: 8
  misc_feature: MA Experiment 20000488 PARAMETER Experiment Name: Zm_50mM_NH4NO3_L_to_H_P Parameter: Tissue Value: Leaves
  misc_feature: MA Experiment 20000488 PARAMETER Experiment Name: Zm_50mM_NH4NO3_L_to_H_P Parameter: Treatment Value: 50mM NH4NO3 vs. 100mM Mannitol
gtgacagaggcatagagcaaaagccaaactggcagccagcacagcagagcgccactcgactcatcctttcggttcccctcccccctccgcgttccacaaccctcgagaagcttccaccctcccctcctgcgacgccgccagagccgcggaaaccctacccaccccggccgctcacgcaccgggcgcccgcagccgccggtcgcgtgcctgccgccgacaccgcccaaagcgattggatctcgagatcgtcgaagccacgatggaggactgggattctgaagaattccagccagttgtgcctgttgtgaaagccgagccacttaaaaatcagtgggctgatgaagatgttgaagaagatgatgtaaaagaatcatgggaagaagaggaggaggaggagaaacctaagccagcgccagtggaaaaggtcgctgcaaaacctagcactaaggctcctgctaaaaagggaaaacaacaagcattgacaagtgctgaagaaccagatgagcctcctcttagtcccacttcacagaaaattcgccaacaaagacttgtggaagaagctgacttcaagtcgaccaccgagctttttgcaaagaagggcagtgagcaaaagtcactagatacttttattccaaagtccaagagtgactttgcggaatacgcggagcttattgcaaacaaactacgcccctatgagaaaagctttcactacatggctctgcttaagaatgtcatgagactttccatgacatcgttgaaaggtgcggacgccaaagatatatcttcttccgtgacggcaattgctaacgagaagatcaaggctgagaaggaggctgcagcaggcaaaaagaaacaaggagcgaaaaagaagcaactccacatcgagaaaggagacgacgacttcatccccggccggggtggtggctacgatgaccccgatgagtacgacttcatgtgatctggctgggagggatagtaggtttctgttatgtatacctttggcgggcagagaatatatcacaagagtttgcggcatactattgcatggaacatgcgttatctattcgagaatgatttttgactctgcaggataagaagagcacttgtgatctggatgcatgggtgttttcttatttatccttgaatctttgtgttatttttttttcaacattgcattttttgccaaatgtactatctggttactccgtgagtcatgaaagcaatt

SEQ ID NO: 6631 - protein, 232 aa, Zea mays subsp. mays
  peptide (1)..(232): Ceres Seq. ID no. 12344367
  misc_feature (1)..(232): Homolog of NCBI NO: 18408426 NR Description: expressed protein; protein id: At1g66070.1, by cDNA: 20812., supported by cDNA: gi_17380827, supported by gi_20259026 [Arabidopsis thaliana] >gi|25404579|pir||C96685
  misc_feature (1)..(232): Homolog of NCBI NO: 30693092 NR Description: expressed protein [Arabidopsis thaliana] Unknown protein [Arabidopsis thaliana] Unknown protein [Arabidopsis thaliana]
  misc_feature (1)..(232): Homolog of NCBI NO: 32766433 NR Description: Unknown (protein for MGC:63801) [Danio rerio]
  misc_feature (2)..(232): Homolog of NCBI NO: 4503511 NR Description: eukaryotic translation initiation factor 3,
  misc_feature (2)..(232): Homolog of NCBI NO: 10435304 NR Description: unnamed protein product [Homo sapiens]
  misc_feature (2)..(232): Homolog of NCBI NO: 23503065 NR Description: Eukaryotic translation initiation factor 3 eukaryotic translation initiation factor 3, subunit 1 (alpha,
  misc_feature (2)..(232): Homolog of NCBI NO: 27374365 NR Description: Adam-PA [Drosophila willistoni]
  misc_feature (2)..(232): Homolog of NCBI NO: 34856798 NR Description: similar to Eukaryotic translation initiation
  misc_feature (2)..(232): Homolog of NCBI NO: 19921950 NR Description: CG12131-PA [Drosophila melanogaster]
  misc_feature (2)..(232): Homolog of NCBI NO: 27374242 NR Description: CG12131-PA [Drosophila erecta]
MEDWDSEEFQPVVPVVKAEPLKNQWADEDVEEDDVKESWEEEEEEEKPKPAPVEKVAAKPSTKAPAKKGKQQALTSAEEPDEPPLSPTSQKIRQQRLVEEADFKSTTELFAKKGSEQKSLDTFIPKSKSDFAEYAELIANKLRPYEKSFHYMALLKNVMRLSMTSLKGADAKDISSSVTAIANEKIKAEKEAAAGKKKQGAKKKQLHIEKGDDDFIPGRGGGYDDPDEYDFM

SEQ ID NO: 6632 - DNA, 1233 bp, Zea mays subsp. mays
  misc_feature (1)..(1233): Ceres Seq. ID no. 12367623
  misc_feature: MA Experiment ID: 108529 Result: Up-regulated in Transcription
  misc_feature: MA Experiment 108529 PARAMETER Experiment Name: Zm_Imbibed_Seeds_P Parameter: Age (day) Value: 5 vs. 2
  misc_feature: MA Experiment 108529 PARAMETER Experiment Name: Zm_Imbibed_Seeds_P Parameter: Organism Value: Zea mays
  misc_feature: MA Experiment 108529 PARAMETER Experiment Name: Zm_Imbibed_Seeds_P Parameter: Plant Line Value: 35A19
  misc_feature: MA Experiment 108529 PARAMETER Experiment Name: Zm_Imbibed_Seeds_P Parameter: Tissue Value: Roots vs. Embryo
  misc_feature: MA Experiment ID: 108535 Result: Down-regulated in Transcription
  misc_feature: MA Experiment 108535 PARAMETER Experiment Name: Zm_Meristem_P Parameter: Age (day) Value: 8
  misc_feature: MA Experiment 108535 PARAMETER Experiment Name: Zm_Meristem_P Parameter: Organism Value: Zea mays
  misc_feature: MA Experiment 108535 PARAMETER Experiment Name: Zm_Meristem_P Parameter: Plant Line Value: 35A19
  misc_feature: MA Experiment 108535 PARAMETER Experiment Name: Zm_Meristem_P Parameter: Tissue Value: Root Meristem vs. Above Root Meristem
  misc_feature: MA Experiment ID: 108543 Result: Up-regulated in Transcription
  misc_feature: MA Experiment ID: 108545 Result: Down-regulated in Transcription
  misc_feature: MA Experiment 108545 PARAMETER Experiment Name: Zm_Imbibed_Seeds_P Parameter: Age (day) Value: 3 vs. 2
  misc_feature: MA Experiment 108545 PARAMETER Experiment Name: Zm_Imbibed_Seeds_P Parameter: Organism Value: Zea mays
  misc_feature: MA Experiment 108545 PARAMETER Experiment Name: Zm_Imbibed_Seeds_P Parameter: Plant Line Value: 35A19
  misc_feature: MA Experiment 108545 PARAMETER Experiment Name: Zm_Imbibed_Seeds_P Parameter: Tissue Value: Aerial vs. Embryo
  misc_feature: MA Experiment ID: 108546 Result: Up-regulated in Transcription
  misc_feature: MA Experiment 108546 PARAMETER Experiment Name: Zm_Imbibed_Seeds_P Parameter: Age (day) Value: 3 vs. 2
  misc_feature: MA Experiment 108546 PARAMETER Experiment Name: Zm_Imbibed_Seeds_P Parameter: Organism Value: Zea mays
  misc_feature: MA Experiment 108546 PARAMETER Experiment Name: Zm_Imbibed_Seeds_P Parameter: Plant Line Value: 35A19
  misc_feature: MA Experiment 108546 PARAMETER Experiment Name: Zm_Imbibed_Seeds_P Parameter: Tissue Value: Roots vs. Embryo
  misc_feature: MA Experiment ID: 108559 Result: Down-regulated in Transcription
  misc_feature: MA Experiment 108559 PARAMETER Experiment Name: Zm_5mM_NO_P Parameter: Age (day) Value: 8
  misc_feature: MA Experiment 108559 PARAMETER Experiment Name: Zm_5mM_NO_P Parameter: Organism Value: Zea mays
  misc_feature: MA Experiment 108559 PARAMETER Experiment Name: Zm_5mM_NO_P Parameter: Plant Line Value: 35A19
  misc_feature: MA Experiment 108559 PARAMETER Experiment Name: Zm_5mM_NO_P Parameter: Timepoint (hr) Value: 12
  misc_feature: MA Experiment 108559 PARAMETER Experiment Name: Zm_5mM_NO_P Parameter: Tissue Value: Aerial
  misc_feature: MA Experiment 108559 PARAMETER Experiment Name: Zm_5mM_NO_P Parameter: Treatment Value: 5mM NO vs. No Treatment
  misc_feature: MA Experiment ID: 108687 Result: Down-regulated in Transcription
  misc_feature: MA Experiment 108687 PARAMETER Experiment Name: Zm_Embryos-Flowers__P Parameter: Tissue Value: Embryo vs. Aerial+
  misc_feature: MA Experiment ID: 20000477 Result: Down-regulated in Transcription
  misc_feature: MA Experiment 20000477 PARAMETER Experiment Name: Zm_5mM_SA_P Parameter: Age (day) Value: 10
  misc_feature: MA Experiment 20000477 PARAMETER Experiment Name: Zm_5mM_SA_P Parameter: Organism Value: Zea mays
  misc_feature: MA Experiment 20000477 PARAMETER Experiment Name: Zm_5mM_SA_P Parameter: Plant Line Value: 35A19
  misc_feature: MA Experiment 20000477 PARAMETER Experiment Name: Zm_5mM_SA_P Parameter: Timepoint (hr) Value: 48
  misc_feature: MA Experiment 20000477 PARAMETER Experiment Name: Zm_5mM_SA_P Parameter: Tissue Value: Aerial
  misc_feature: MA Experiment 20000477 PARAMETER Experiment Name: Zm_5mM_SA_P Parameter: Treatment Value: 5mM SA vs. No Treatment
  misc_feature: MA Experiment ID: 20000478 Result: Down-regulated in Transcription
  misc_feature: MA Experiment 20000478 PARAMETER Experiment Name: Zm_5mM_SA_P Parameter: Age (day) Value: 11
  misc_feature: MA Experiment 20000478 PARAMETER Experiment Name: Zm_5mM_SA_P Parameter: Organism Value: Zea mays
  misc_feature: MA Experiment 20000478 PARAMETER Experiment Name: Zm_5mM_SA_P Parameter: Plant Line Value: 35A19
  misc_feature: MA Experiment 20000478 PARAMETER Experiment Name: Zm_5mM_SA_P Parameter: Timepoint (hr) Value: 72
  misc_feature: MA Experiment 20000478 PARAMETER Experiment Name: Zm_5mM_SA_P Parameter: Tissue Value: Aerial
  misc_feature: MA Experiment 20000478 PARAMETER Experiment Name: Zm_5mM_SA_P Parameter: Treatment Value: 5mM SA vs. No Treatment
  misc_feature: MA Experiment ID: 20000480 Result: Down-regulated in Transcription
  misc_feature: MA Experiment 20000480 PARAMETER Experiment Name: Zm_Drought_P Parameter: Age (day) Value: 11
  misc_feature: MA Experiment 20000480 PARAMETER Experiment Name: Zm_Drought_P Parameter: Organism Value: Zea mays
  misc_feature: MA Experiment 20000480 PARAMETER Experiment Name: Zm_Drought_P Parameter: Plant Line Value: 35A19
  misc_feature: MA Experiment 20000480 PARAMETER Experiment Name: Zm_Drought_P Parameter: Timepoint (hr) Value: 72
  misc_feature: MA Experiment 20000480 PARAMETER Experiment Name: Zm_Drought_P Parameter: Tissue Value: Aerial
  misc_feature: MA Experiment 20000480 PARAMETER Experiment Name: Zm_Drought_P Parameter: Treatment Value: Drought vs. No Drought
  misc_feature: MA Experiment ID: 20000492 Result: Down-regulated in Transcription
  misc_feature: MA Experiment 20000492 PARAMETER Experiment Name: Zm_Hybrid_Seed_Dev_P Parameter: DAP Value: 12
  misc_feature: MA Experiment 20000492 PARAMETER Experiment Name: Zm_Hybrid_Seed_Dev_P Parameter: Organism Value: Zea mays
  misc_feature: MA Experiment 20000492 PARAMETER Experiment Name: Zm_Hybrid_Seed_Dev_P Parameter: Plant Line Value: 35A19
  misc_feature: MA Experiment 20000492 PARAMETER Experiment Name: Zm_Hybrid_Seed_Dev_P Parameter: Tissue Value: Fert Kernel vs. Unfert Floret
  misc_feature: MA Experiment ID: 20000534 Result: Down-regulated in Transcription
  misc_feature: MA Experiment 20000534 PARAMETER Experiment Name: Zm_Hybrid_Pollen_P Parameter: Age (day) Value: 8
  misc_feature: MA Experiment 20000534 PARAMETER Experiment Name: Zm_Hybrid_Pollen_P Parameter: Organism Value: Zea mays
  misc_feature: MA Experiment 20000534 PARAMETER Experiment Name: Zm_Hybrid_Pollen_P Parameter: Plant Line Value: 35A19
  misc_feature: MA Experiment 20000534 PARAMETER Experiment Name: Zm_Hybrid_Pollen_P Parameter: Tissue Value: Pollen vs. Aerial
  misc_feature: MA Experiment ID: 20000535 Result: Down-regulated in Transcription
  misc_feature: MA Experiment 20000535 PARAMETER Experiment Name: Zm_Hybrid_Seed_Dev_P Parameter: DAP Value: 30 vs. 12
  misc_feature: MA Experiment 20000535 PARAMETER Experiment Name: Zm_Hybrid_Seed_Dev_P Parameter: Organism Value: Zea mays
  misc_feature: MA Experiment 20000535 PARAMETER Experiment Name: Zm_Hybrid_Seed_Dev_P Parameter: Plant Line Value: 35A19
  misc_feature: MA Experiment 20000535 PARAMETER Experiment Name: Zm_Hybrid_Seed_Dev_P Parameter: Tissue Value: Embryo vs. Unfert Floret
aacatcatcaccacacgctaaatttacagctagctagctgaattcgatcgatatccgggaactaataatccaccgaccccctcatggcggcttcgtcgcgaatgggcgtatctgtctacctcgccatcatggcggcggtgctcgcctcggcgctcggagcggagctcaccgcggactactatagcgagacgtgcccgcaagcgctgaccaccatcaagctcctcgtcggcgccgccatcctgagggagcccaggatgggggcgtcgctggtccgcctccactttcacgattgcttcgtcaatggctgcgacggctccatcctgctggacgacaccgacgacatggtcggagagaagacggcgaagcccaacaacaactccgtgagaggctacgacgtcatcgacaccatcaagtcggcggtgaacacgatatgcttgggcaacgtcgtctcctgcgccgatatcttggccgtggccgctcgcgattccattgtcgctctgggaggaacctcgtacgacgtgctcctggggcggcgcgacgcgacgacggcgagcatggacgacgcgaacaacgacatcccgacgccgttcatggacctgccggcgctacaggacagcttcgagtcccacggcctgtccctgcacgacctggtggtgctctccggcggccacacgctgggctactcccgctgcctcttcttccgcggccgcctgtacaacgagaccggcacgctggacccggcgtacgccgggtcgctggacgagcgctgcccgctggcgggcgacgacgacgcgctgtcggcgctggacgacacccccaccaccgtcgacgctgactactaccagggcctcatgcagggacgcgcgctgctgcactcggatcagcagctttaccaggcaggcggcgccgctggcgacctggtggagtactacgccgacaacccgaccaagttctgggaggacttcggcgcggcaatggtcaagctgggcagcctgagcccgctcaccggcgacgaaggggatgtcagggagaactgccgggtcgtcaaccaggtgtgagtgtgacttcgccgccatcgtcgaatcaacgaggcatcagcttcgttccgtacgtacactctggctgctagctgcaccggcaagctatgcaccaagattctgtagcgtgtgtctgatcattatttgtattcgcgtgcctacttaattttgtgagaaattggtcttatgtttggtt

SEQ ID NO: 6633 - protein, 324 aa, Zea mays subsp. mays
  peptide (1)..(324): Ceres Seq. ID no. 12367624
  misc_feature (44)..(286): Pfam Name: Peroxidase Pfam Description: Peroxidase
  misc_feature (11)..(323): Homolog of NCBI NO: 33146424 NR Description: putative peroxidase precursor [Oryza sativa
  misc_feature (1)..(321): Homolog of NCBI NO: 571484 NR Description: peroxidase precursor
  misc_feature (24)..(322): Homolog of NCBI NO: 6093671 NR Description: Cationic peroxidase 1 precursor (PNPC1)
  misc_feature (24)..(322): Homolog of NCBI NO: 99872 NR Description: peroxidase (EC 1.11.1.7) precursor, cationic
  misc_feature (28)..(322): Homolog of NCBI NO: 1633130 NR Description: Chain A, Peanut Peroxidase >gi|1633131|pdb|1SCH|B
  misc_feature (9)..(322): Homolog of NCBI NO: 577503 NR Description: cationic peroxidase
  misc_feature (16)..(322): Homolog of NCBI NO: 38345909 NR Description: OSJNBb0059K02.17 [Oryza sativa (japonica
  misc_feature (7)..(322): Homolog of NCBI NO: 5453379 NR Description: bacterial-induced peroxidase precursor [Gossypium
  misc_feature (2)..(318): Homolog of NCBI NO: 1854581 NR Description: peroxidase precursor [Linum usitatissimum]
  misc_feature (10)..(322): Homolog of NCBI NO: 5381253 NR Description: peroxidase [Nicotiana tabacum]
MAASSRMGVSVYLAIMAAVLASALGAELTADYYSETCPQALTTIKLLVGAAILREPRMGASLVRLHFHDCFVNGCDGSILLDDTDDMVGEKTAKPNNNSVRGYDVIDTIKSAVNTICLGNVVSCADILAVAARDSIVALGGTSYDVLLGRRDATTASMDDANNDIPTPFMDLPALQDSFESHGLSLHDLVVLSGGHTLGYSRCLFFRGRLYNETGTLDPAYAGSLDERCPLAGDDDALSALDDTPTTVDADYYQGLMQGRALLHSDQQLYQAGGAAGDLVEYYADNPTKFWEDFGAAMVKLGSLSPLTGDEGDVRENCRVVNQV

SEQ ID NO: 6634 - protein, 318 aa, Zea mays subsp. mays
  peptide (1)..(318): Ceres Seq. ID no. 12367625
  misc_feature (38)..(280): Pfam Name: Peroxidase Pfam Description: Peroxidase
  misc_feature (18)..(316): Homolog of NCBI NO: 6093671 NR Description: Cationic peroxidase 1 precursor (PNPC1)
  misc_feature (18)..(316): Homolog of NCBI NO: 99872 NR Description: peroxidase (EC 1.11.1.7) precursor, cationic
  misc_feature (22)..(316): Homolog of NCBI NO: 1633130 NR Description: Chain A, Peanut Peroxidase >gi|1633131|pdb|1SCH|B
  misc_feature (3)..(316): Homolog of NCBI NO: 577503 NR Description: cationic peroxidase
  misc_feature (5)..(317): Homolog of NCBI NO: 33146424 NR Description: putative peroxidase precursor [Oryza sativa
  misc_feature (1)..(315): Homolog of NCBI NO: 571484 NR Description: peroxidase precursor
  misc_feature (10)..(316): Homolog of NCBI NO: 38345909 NR Description: OSJNBb0059K02.17 [Oryza sativa (japonica
  misc_feature (1)..(316): Homolog of NCBI NO: 5453379 NR Description: bacterial-induced peroxidase precursor [Gossypium
  misc_feature (1)..(312): Homolog of NCBI NO: 1854581 NR Description: peroxidase precursor [Linum usitatissimum]
  misc_feature (4)..(316): Homolog of NCBI NO: 5381253 NR Description: peroxidase [Nicotiana tabacum]
MGVSVYLAIMAAVLASALGAELTADYYSETCPQALTTIKLLVGAAILREPRMGASLVRLHFHDCFVNGCDGSILLDDTDDMVGEKTAKPNNNSVRGYDVIDTIKSAVNTICLGNVVSCADILAVAARDSIVALGGTSYDVLLGRRDATTASMDDANNDIPTPFMDLPALQDSFESHGLSLHDLVVLSGGHTLGYSRCLFFRGRLYNETGTLDPAYAGSLDERCPLAGDDDALSALDDTPTTVDADYYQGLMQGRALLHSDQQLYQAGGAAGDLVEYYADNPTKFWEDFGAAMVKLGSLSPLTGDEGDVRENCRVVNQV

SEQ ID NO: 6635 - protein, 309 aa, Zea mays subsp. mays
  peptide (1)..(309): Ceres Seq. ID no. 12367626
  misc_feature (29)..(271): Pfam Name: Peroxidase Pfam Description: Peroxidase
  misc_feature (1)..(308): Homolog of NCBI NO: 33146424 NR Description: putative peroxidase precursor [Oryza sativa
  misc_feature (1)..(306): Homolog of NCBI NO: 571484 NR Description: peroxidase precursor
  misc_feature (9)..(307): Homolog of NCBI NO: 6093671 NR Description: Cationic peroxidase 1 precursor (PNPC1)
  misc_feature (9)..(307): Homolog of NCBI NO: 99872 NR Description: peroxidase (EC 1.11.1.7) precursor, cationic
  misc_feature (13)..(307): Homolog of NCBI NO: 1633130 NR Description: Chain A, Peanut Peroxidase >gi|1633131|pdb|1SCH|B
  misc_feature (1)..(307): Homolog of NCBI NO: 577503 NR Description: cationic peroxidase
  misc_feature (1)..(307): Homolog of NCBI NO: 38345909 NR Description: OSJNBb0059K02.17 [Oryza sativa (japonica
  misc_feature (1)..(307): Homolog of NCBI NO: 5453379 NR Description: bacterial-induced peroxidase precursor [Gossypium
  misc_feature (1)..(303): Homolog of NCBI NO: 1854581 NR Description: peroxidase precursor [Linum usitatissimum]
  misc_feature (1)..(307): Homolog of NCBI NO: 5381253 NR Description: peroxidase [Nicotiana tabacum]
MAAVLASALGAELTADYYSETCPQALTTIKLLVGAAILREPRMGASLVRLHFHDCFVNGCDGSILLDDTDDMVGEKTAKPNNNSVRGYDVIDTIKSAVNTICLGNVVSCADILAVAARDSIVALGGTSYDVLLGRRDATTASMDDANNDIPTPFMDLPALQDSFESHGLSLHDLVVLSGGHTLGYSRCLFFRGRLYNETGTLDPAYAGSLDERCPLAGDDDALSALDDTPTTVDADYYQGLMQGRALLHSDQQLYQAGGAAGDLVEYYADNPTKFWEDFGAAMVKLGSLSPLTGDEGDVRENCRVVNQV

SEQ ID NO: 6636 - DNA, 1879 bp, Zea mays subsp. mays
  misc_feature (1)..(1879): Ceres Seq. ID no. 12357342
  misc_feature: MA Experiment ID: 108527 Result: Up-regulated in Transcription
  misc_feature: MA Experiment 108527 PARAMETER Experiment Name: Zm_5mM_NO_P Parameter: Age (day) Value: 8
  misc_feature: MA Experiment 108527 PARAMETER Experiment Name: Zm_5mM_NO_P Parameter: Organism Value: Zea mays
  misc_feature: MA Experiment 108527 PARAMETER Experiment Name: Zm_5mM_NO_P Parameter: Plant Line Value: 35A19
  misc_feature: MA Experiment 108527 PARAMETER Experiment Name: Zm_5mM_NO_P Parameter: Timepoint (hr) Value: 6
  misc_feature: MA Experiment 108527 PARAMETER Experiment Name: Zm_5mM_NO_P Parameter: Tissue Value: Aerial
  misc_feature: MA Experiment 108527 PARAMETER Experiment Name: Zm_5mM_NO_P Parameter: Treatment Value: 5mM NO vs. No Treatment
  misc_feature: MA Experiment ID: 108529 Result: Up-regulated in Transcription
  misc_feature: MA Experiment 108529 PARAMETER Experiment Name: Zm_Imbibed_Seeds_P Parameter: Age (day) Value: 5 vs. 2
  misc_feature: MA Experiment 108529 PARAMETER Experiment Name: Zm_Imbibed_Seeds_P Parameter: Organism Value: Zea mays
  misc_feature: MA Experiment 108529 PARAMETER Experiment Name: Zm_Imbibed_Seeds_P Parameter: Plant Line Value: 35A19
  misc_feature: MA Experiment 108529 PARAMETER Experiment Name: Zm_Imbibed_Seeds_P Parameter: Tissue Value: Roots vs. Embryo
  misc_feature: MA Experiment ID: 108535 Result: Down-regulated in Transcription
  misc_feature: MA Experiment 108535 PARAMETER Experiment Name: Zm_Meristem_P Parameter: Age (day) Value: 8
  misc_feature: MA Experiment 108535 PARAMETER Experiment Name: Zm_Meristem_P Parameter: Organism Value: Zea mays
  misc_feature: MA Experiment 108535 PARAMETER Experiment Name: Zm_Meristem_P Parameter: Plant Line Value: 35A19
  misc_feature: MA Experiment 108535 PARAMETER Experiment Name: Zm_Meristem_P Parameter: Tissue Value: Root Meristem vs. Above Root Meristem
  misc_feature: MA Experiment ID: 108545 Result: Down-regulated in Transcription
  misc_feature: MA Experiment 108545 PARAMETER Experiment Name: Zm_Imbibed_Seeds_P Parameter: Age (day) Value: 3 vs. 2
  misc_feature: MA Experiment 108545 PARAMETER Experiment Name: Zm_Imbibed_Seeds_P Parameter: Organism Value: Zea mays
  misc_feature: MA Experiment 108545 PARAMETER Experiment Name: Zm_Imbibed_Seeds_P Parameter: Plant Line Value: 35A19
  misc_feature: MA Experiment 108545 PARAMETER Experiment Name: Zm_Imbibed_Seeds_P Parameter: Tissue Value: Aerial vs. Embryo
  misc_feature: MA Experiment ID: 108546 Result: Up-regulated in Transcription
  misc_feature: MA Experiment 108546 PARAMETER Experiment Name: Zm_Imbibed_Seeds_P Parameter: Age (day) Value: 3 vs. 2
  misc_feature: MA Experiment 108546 PARAMETER Experiment Name: Zm_Imbibed_Seeds_P Parameter: Organism Value: Zea mays
  misc_feature: MA Experiment 108546 PARAMETER Experiment Name: Zm_Imbibed_Seeds_P Parameter: Plant Line Value: 35A19
  misc_feature: MA Experiment 108546 PARAMETER Experiment Name: Zm_Imbibed_Seeds_P Parameter: Tissue Value: Roots vs. Embryo
  misc_feature: MA Experiment ID: 108556 Result: Up-regulated in Transcription
  misc_feature: MA Experiment 108556 PARAMETER Experiment Name: Zm_Drought_P Parameter: Age (day) Value: 9
  misc_feature: MA Experiment 108556 PARAMETER Experiment Name: Zm_Drought_P Parameter: Organism Value: Zea mays
  misc_feature: MA Experiment 108556 PARAMETER Experiment Name: Zm_Drought_P Parameter: Plant Line Value: 35A19
  misc_feature: MA Experiment 108556 PARAMETER Experiment Name: Zm_Drought_P Parameter: Timepoint (hr) Value: 24
  misc_feature: MA Experiment 108556 PARAMETER Experiment Name: Zm_Drought_P Parameter: Tissue Value: Aerial
  misc_feature: MA Experiment 108556 PARAMETER Experiment Name: Zm_Drought_P Parameter: Treatment Value: Drought vs. No Drought
  misc_feature: MA Experiment ID: 108559 Result: Up-regulated in Transcription
  misc_feature: MA Experiment 108559 PARAMETER Experiment Name: Zm_5mM_NO_P Parameter: Age (day) Value: 8
  misc_feature: MA Experiment 108559 PARAMETER Experiment Name: Zm_5mM_NO_P Parameter: Organism Value: Zea mays
  misc_feature: MA Experiment 108559 PARAMETER Experiment Name: Zm_5mM_NO_P Parameter: Plant Line Value: 35A19
  misc_feature: MA Experiment 108559 PARAMETER Experiment Name: Zm_5mM_NO_P Parameter: Timepoint (hr) Value: 12
  misc_feature: MA Experiment 108559 PARAMETER Experiment Name: Zm_5mM_NO_P Parameter: Tissue Value: Aerial
  misc_feature: MA Experiment 108559 PARAMETER Experiment Name: Zm_5mM_NO_P Parameter: Treatment Value: 5mM NO vs. No Treatment
  misc_feature: MA Experiment ID: 108688 Result: Down-regulated in Transcription
  misc_feature: MA Experiment 108688 PARAMETER Experiment Name: Zm_Embryos-Flowers__P Parameter: Tissue Value: Immature Flowers vs. Aerial+
  misc_feature: MA Experiment ID: 20000108 Result: Down-regulated in Transcription
  misc_feature: MA Experiment 20000108 PARAMETER Experiment Name: Zm_Root-Tips_P Parameter: Age (day) Value: 12
  misc_feature: MA Experiment 20000108 PARAMETER Experiment Name: Zm_Root-Tips_P Parameter: Organism Value: Zea mays
  misc_feature: MA Experiment 20000108 PARAMETER Experiment Name: Zm_Root-Tips_P Parameter: Tissue Value: Root tips vs. Root mid region    35
  misc_feature: MA Experiment 20000108 PARAMETER Experiment Name: Zm_Root-Tips_P Parameter: Tissue Value: Root tips vs. Root mid region   Sequence Listing-Misc Features (4)
  misc_feature: MA Experiment ID: 20000479 Result: Up-regulated in Transcription
  misc_feature: MA Experiment 20000479 PARAMETER Experiment Name: Zm_Drought_P Parameter: Age (day) Value: 10
  misc_feature: MA Experiment 20000479 PARAMETER Experiment Name: Zm_Drought_P Parameter: Organism Value: Zea mays
  misc_feature: MA Experiment 20000479 PARAMETER Experiment Name: Zm_Drought_P Parameter: Plant Line Value: 35A19
  misc_feature: MA Experiment 20000479 PARAMETER Experiment Name: Zm_Drought_P Parameter: Timepoint (hr) Value: 48
  misc_feature: MA Experiment 20000479 PARAMETER Experiment Name: Zm_Drought_P Parameter: Tissue Value: Aerial
  misc_feature: MA Experiment 20000479 PARAMETER Experiment Name: Zm_Drought_P Parameter: Treatment Value: Drought vs. No Drought
  misc_feature: MA Experiment ID: 20000480 Result: Up-regulated in Transcription
  misc_feature: MA Experiment 20000480 PARAMETER Experiment Name: Zm_Drought_P Parameter: Age (day) Value: 11
  misc_feature: MA Experiment 20000480 PARAMETER Experiment Name: Zm_Drought_P Parameter: Organism Value: Zea mays
  misc_feature: MA Experiment 20000480 PARAMETER Experiment Name: Zm_Drought_P Parameter: Plant Line Value: 35A19
  misc_feature: MA Experiment 20000480 PARAMETER Experiment Name: Zm_Drought_P Parameter: Timepoint (hr) Value: 72
  misc_feature: MA Experiment 20000480 PARAMETER Experiment Name: Zm_Drought_P Parameter: Tissue Value: Aerial
  misc_feature: MA Experiment 20000480 PARAMETER Experiment Name: Zm_Drought_P Parameter: Treatment Value: Drought vs. No Drought
  misc_feature: MA Experiment ID: 20000492 Result: Up-regulated in Transcription
  misc_feature: MA Experiment 20000492 PARAMETER Experiment Name: Zm_Hybrid_Seed_Dev_P Parameter: DAP Value: 12
  misc_feature: MA Experiment 20000492 PARAMETER Experiment Name: Zm_Hybrid_Seed_Dev_P Parameter: Organism Value: Zea mays
  misc_feature: MA Experiment 20000492 PARAMETER Experiment Name: Zm_Hybrid_Seed_Dev_P Parameter: Plant Line Value: 35A19
  misc_feature: MA Experiment 20000492 PARAMETER Experiment Name: Zm_Hybrid_Seed_Dev_P Parameter: Tissue Value: Fert Kernel vs. Unfert Floret
accagcccgacccaccaccaccatcgccaccattaccctctcgcccctgcctctccggccgccagcccatcccgtccccgtcccatgccgcagcgcgcagcggccgcactgacacaccagtgagcgagcagagcgagagcgaggcctgatgcggcagcggcagcaaggcgaggagcaccgggagatattcgtccagtggagaccctgcgacaagaagaggtcttaggccctccgccgccacgcgcaccggcagacaaatccgcgcaggccttcttccgatccgcaaaggcgccgcctttttcgccgattccacaggccggagcccggggagaaaggcagacagacagaccggaagatgagcgcgtccgtgggccggacccgtgtggggcggtacgagctcggccggaccctcggcgaaggcaccttcgccaaggtcaagttcgcccggaacgtcgagaccggagagaatgtcgccatcaagatcctcgacaaggagaaggtcctcaagcacaagatgatcgcccagatcaagcgggagatctcgaccatgaagctcatcaggcaccccaacgtcatccggatgtatgaggtgatggccagcaagacaaagatatacatcgtcatggagctcgtcaccggtggcgaactcttcgacaaaatcgcctcgcgtggaaggctgaaagaggatgacgcaaggaagtacttccagcagctgatcaactctgtcgattactgccatagccgaggcgtctaccaccgcgatctcaagcctgaaaatctcctgcttgatgctagcggcacgctcaaggtttcggattttggactgagcgcactatctcaacaagtccgagaggatggtctgctgcacacaacctgtggaactcccaactatgttgctcccgaggttataaacaataagggctatgatggagctaaggctgatctgtggtcatgtggagtgattctctttgtcctcatggcggggtacctcccatttgaagattcgaacctgatgtcgctctacaagaagattttcaaagcggatttcagttgcccgtcctggttctccacaagcgcaaagaagctcatcaagaagatacttgaacctaatgctaacaatagaataactattgcagagctcattaacaacgagtggttcaagaaggggtatcagcctcccagatttgaaacagcagatgttaatctggatgacgtgaactccatcttcgatgaatccggggagccagcacagcttgttgttgagaggagagaagaaaggccatcagtgatgaacgctttcgagttaatctctacgtctcagggcctcaatctcgggacgctcttcgagaagcaaacgggttctgttaagcgagaaacaaggtttgcgtcaaggcttcctgcaaatgagatactgtcgaagatcgaagcagcagcgggacccatgggcttcaacgttcagaagcgcaactataagctgaagctgcaaggggagaaccctggaaggaaaggtcagctggccatcgcaacagaggttttcgaggtcacgccttccctgtacatggttgagctgcgcaagtccaacggcgacacccttgaattccacaagttctaccacaacatctcaaatggactgaaggacgtgatgtggaagccggagagcggcatcgtggaaggcgacgaggcgcggcaaaggaggtccccgtgatggggtctgcaaccaagttttagaagtagcgctgcagataactagtcatcagggagcctggcgggaactgagcctgtgactgcttcctgtttgtttggatgttttgtttttgtctaaggtgctttctgactaaagtatgctggataatgtgaatgaagaatgtgcagagttttc

SEQ ID NO: 6637 - protein, 449 aa, Zea mays subsp. mays
  peptide (1)..(449): Ceres Seq. ID no. 12357343
  misc_feature (13)..(268): Pfam Name: Protein kinase domain Pfam Description: Protein kinase domain
  misc_feature (2)..(432): Homolog of NCBI NO: 18397430 NR Description: serine/threonine kinase, putative; protein id: supported by cDNA: gi_14486385, supported by cDNA: gi_15912282,
  misc_feature (2)..(432): Homolog of NCBI NO: 25387051 NR Description: probable serine/threonine kinase [imported] - thaliana >gi|12320856|gb|AAG50566.1|AC073506_8 serine/threonine
  misc_feature (1)..(439): Homolog of NCBI NO: 15223317 NR Description: serine threonine kinase, putative; protein id: supported by cDNA: gi_14423523, supported by cDNA: gi_20259787
  misc_feature (1)..(439): Homolog of NCBI NO: 14423524 NR Description: similar to wpk4 protein kinase [Arabidopsis >gi|20259788|gb|AAM13241.1| similar to wpk4 protein kinase
  misc_feature (1)..(439): Homolog of NCBI NO: 25387057 NR Description: protein T25K16.13 [imported] - Arabidopsis >gi|6715641|gb|AAF26468.1|AC007323_9 T25K16.13 [Arabidopsis
  misc_feature (1)..(434): Homolog of NCBI NO: 7446372 NR Description: probable serine/threonine kinase (EC 2.7.1.-) - sorghum >gi|2632254|emb|CAA73068.1| serine/threonine kinase
  misc_feature (1)..(434): Homolog of NCBI NO: 7446371 NR Description: probable serine/threonine kinase (EC 2.7.1.-) - sorghum >gi|2632252|emb|CAA73067.1| serine/threonine kinase
  misc_feature (8)..(435): Homolog of NCBI NO: 34902248 NR Description: Putative serine/threonine kinase [Oryza sativa
  misc_feature (9)..(444): Homolog of NCBI NO: 15238499 NR Description: serine/threonine protein kinase SOS2 protein id: At5g35410.1, supported by cDNA: gi_14701909, by cDNA: gi_20466309 [Arabidopsis thaliana]
  misc_feature (10)..(435): Homolog of NCBI NO: 34903780 NR Description: unnamed protein product [Oryza sativa (japonica group)] >gi|7340882|dbj|BAA92972.1| unnamed protein product
MSASVGRTRVGRYELGRTLGEGTFAKVKFARNVETGENVAIKILDKEKVLKHKMIAQIKREISTMKLIRHPNVIRMYEVMASKTKIYIVMELVTGGELFDKIASRGRLKEDDARKYFQQLINSVDYCHSRGVYHRDLKPENLLLDASGTLKVSDFGLSALSQQVREDGLLHTTCGTPNYVAPEVINNKGYDGAKADLWSCGVILFVLMAGYLPFEDSNLMSLYKKIFKADFSCPSWFSTSAKKLIKKILEPNANNRITIAELINNEWFKKGYQPPRFETADVNLDDVNSIFDESGEPAQLVVERREERPSVMNAFELISTSQGLNLGTLFEKQTGSVKRETRFASRLPANEILSKIEAAAGPMGFNVQKRNYKLKLQGENPGRKGQLAIATEVFEVTPSLYMVELRKSNGDTLEFHKFYHNISNGLKDVMWKPESGIVEGDEARQRRSP

SEQ ID NO: 6638 - protein, 396 aa, Zea mays subsp. mays
  peptide (1)..(396): Ceres Seq. ID no. 12357344
  misc_feature (1)..(215): Pfam Name: Protein kinase domain Pfam Description: Protein kinase domain
  misc_feature (1)..(379): Homolog of NCBI NO: 18397430 NR Description: serine/threonine kinase, putative; protein id: supported by cDNA: gi_14486385, supported by cDNA: gi_15912282,
  misc_feature (1)..(379): Homolog of NCBI NO: 25387051 NR Description: probable serine/threonine kinase [imported] - thaliana >gi|12320856|gb|AAG50566.1|AC073506_8 serine/threonine
  misc_feature (1)..(386): Homolog of NCBI NO: 15223317 NR Description: serine threonine kinase, putative; protein id: supported by cDNA: gi_14423523, supported by cDNA: gi_20259787
  misc_feature (1)..(386): Homolog of NCBI NO: 14423524 NR Description: similar to wpk4 protein kinase [Arabidopsis >gi|20259788|gb|AAM13241.1| similar to wpk4 protein kinase
  misc_feature (1)..(386): Homolog of NCBI NO: 25387057 NR Description: protein T25K16.13 [imported] - Arabidopsis >gi|6715641|gb|AAF26468.1|AC007323_9 T25K16.13 [Arabidopsis
  misc_feature (1)..(381): Homolog of NCBI NO: 7446372 NR Description: probable serine/threonine kinase (EC 2.7.1.-) - sorghum >gi|2632254|emb|CAA73068.1| serine/threonine kinase
  misc_feature (1)..(381): Homolog of NCBI NO: 7446371 NR Description: probable serine/threonine kinase (EC 2.7.1.-) - sorghum >gi|2632252|emb|CAA73067.1| serine/threonine kinase
  misc_feature (1)..(382): Homolog of NCBI NO: 34902248 NR Description: Putative serine/threonine kinase [Oryza sativa
  misc_feature (1)..(391): Homolog of NCBI NO: 15238499 NR Description: serine/threonine protein kinase SOS2 protein id: At5g35410.1, supported by cDNA: gi_14701909, by cDNA: gi_20466309 [Arabidopsis thaliana]
  misc_feature (1)..(382): Homolog of NCBI NO: 34903780 NR Description: unnamed protein product [Oryza sativa (japonica group)] >gi|7340882|dbj|BAA92972.1| unnamed protein product
MIAQIKREISTMKLIRHPNVIRMYEVMASKTKIYIVMELVTGGELFDKIASRGRLKEDDARKYFQQLINSVDYCHSRGVYHRDLKPENLLLDASGTLKVSDFGLSALSQQVREDGLLHTTCGTPNYVAPEVINNKGYDGAKADLWSCGVILFVLMAGYLPFEDSNLMSLYKKIFKADFSCPSWFSTSAKKLIKKILEPNANNRITIAELINNEWFKKGYQPPRFETADVNLDDVNSIFDESGEPAQLVVERREERPSVMNAFELISTSQGLNLGTLFEKQTGSVKRETRFASRLPANEILSKIEAAAGPMGFNVQKRNYKLKLQGENPGRKGQLAIATEVFEVTPSLYMVELRKSNGDTLEFHKFYHNISNGLKDVMWKPESGIVEGDEARQRRSP

SEQ ID NO: 6639 - protein, 385 aa, Zea mays subsp. mays
  peptide (1)..(385): Ceres Seq. ID no. 12357345
  misc_feature (1)..(204): Pfam Name: Protein kinase domain Pfam Description: Protein kinase domain
  misc_feature (1)..(368): Homolog of NCBI NO: 18397430 NR Description: serine/threonine kinase, putative; protein id: supported by cDNA: gi_14486385, supported by cDNA: gi_15912282,
  misc_feature (1)..(368): Homolog of NCBI NO: 25387051 NR Description: probable serine/threonine kinase [imported] - thaliana >gi|12320856|gb|AAG50566.1|AC073506_8 serine/threonine
  misc_feature (1)..(375): Homolog of NCBI NO: 15223317 NR Description: serine threonine kinase, putative; protein id: supported by cDNA: gi_14423523, supported by cDNA: gi_20259787
  misc_feature (1)..(375): Homolog of NCBI NO: 14423524 NR Description: similar to wpk4 protein kinase [Arabidopsis >gi|20259788|gb|AAM13241.1| similar to wpk4 protein kinase
  misc_feature (1)..(375): Homolog of NCBI NO: 25387057 NR Description: protein T25K16.13 [imported] - Arabidopsis >gi|6715641|gb|AAF26468.1|AC007323_9 T25K16.13 [Arabidopsis
  misc_feature (1)..(370): Homolog of NCBI NO: 7446372 NR Description: probable serine/threonine kinase (EC 2.7.1.-) - sorghum >gi|2632254|emb|CAA73068.1| serine/threonine kinase
  misc_feature (1)..(370): Homolog of NCBI NO: 7446371 NR Description: probable serine/threonine kinase (EC 2.7.1.-) - sorghum >gi|2632252|emb|CAA73067.1| serine/threonine kinase
  misc_feature (1)..(371): Homolog of NCBI NO: 34902248 NR Description: Putative serine/threonine kinase [Oryza sativa
  misc_feature (1)..(380): Homolog of NCBI NO: 15238499 NR Description: serine/threonine protein kinase SOS2 protein id: At5g35410.1, supported by cDNA: gi_14701909, by cDNA: gi_20466309 [Arabidopsis thaliana]
  misc_feature (1)..(371): Homolog of NCBI NO: 34903780 NR Description: unnamed protein product [Oryza sativa (japonica group)] >gi|7340882|dbj|BAA92972.1| unnamed protein product
MKLIRHPNVIRMYEVMASKTKIYIVMELVTGGELFDKIASRGRLKEDDARKYFQQLINSVDYCHSRGVYHRDLKPENLLLDASGTLKVSDFGLSALSQQVREDGLLHTTCGTPNYVAPEVINNKGYDGAKADLWSCGVILFVLMAGYLPFEDSNLMSLYKKIFKADFSCPSWFSTSAKKLIKKILEPNANNRITIAELINNEWFKKGYQPPRFETADVNLDDVNSIFDESGEPAQLVVERREERPSVMNAFELISTSQGLNLGTLFEKQTGSVKRETRFASRLPANEILSKIEAAAGPMGFNVQKRNYKLKLQGENPGRKGQLAIATEVFEVTPSLYMVELRKSNGDTLEFHKFYHNISNGLKDVMWKPESGIVEGDEARQRRSP

SEQ ID NO: 6640 - DNA, 1297 bp, Zea mays subsp. mays
  misc_feature (1)..(1297): Ceres Seq. ID no. 13492533
  misc_feature: MA Experiment ID: 20000535 Result: Down-regulated in Transcription
  misc_feature: MA Experiment 20000535 PARAMETER Experiment Name: Zm_Hybrid_Seed_Dev_P Parameter: DAP Value: 30 vs. 12
  misc_feature: MA Experiment 20000535 PARAMETER Experiment Name: Zm_Hybrid_Seed_Dev_P Parameter: Organism Value: Zea mays
  misc_feature: MA Experiment 20000535 PARAMETER Experiment Name: Zm_Hybrid_Seed_Dev_P Parameter: Plant Line Value: 35A19
  misc_feature: MA Experiment 20000535 PARAMETER Experiment Name: Zm_Hybrid_Seed_Dev_P Parameter: Tissue Value: Embryo vs. Unfert Floret
acgcatcgatcaccctcctcgctcccggtcaacagcagcggcgcagagcacgacgccgacacgcgccatggcggcggtgaggcaccggcagctggaggccaacggcatcacgatgcacgtcgcggaggccggccccgtgaacgcctccgcgccggcggtgctgttcgtgcacggcttcccggagctctggtactcgtggcgccaccagatgggctacctcgccgcgcgcggctaccgctgcgtggcacccgacctccgaggctacggcggcaccaccgcgccgccggaaccgacctcctacaccgtcttccatatcgtcggcgacatcgtcgcgctcctcgacgccctccacctcccgcaggtgttcgttgtcggccacgactggggcgccatcgtgtcgtggaacctctgcctgctgcggccggatcgggtgcgcgcgctcgtcaacctcagcgttgccttcatgccccggaggcccggcgtcaagcctcttgagtacttccgcgccgcatacggggatgagtactacgtctgccgattccaggaaccaggactcgaagcagaatttgctacgtttgacttgaagagtttcttcacattagcattgactcttcgggcaacaggttcttcagctatggaccttcgaaaaatgcaaacttatagtaagcaaatggtgctaccttcttggctatctgaggaagatgtcagttaccttgcaagtgtgtactcaaaaactggatttgctggtggagtaaattactatcgctgcttggacctgaactgggaactgatggcgccatggacaggagcaaaggtgcaagttccaaccaagttcatcgttggggacggtgacctggcgtaccatcaccctggagtgaagaggtacatccacaagggcgggttcaagagggacgtgcccatgcttgaggaggtggtggtcatcaagggcgctggggcacttcatccagcaggaaagagcgcaggaaatcagtgagcacatccatgactacatcaagaagttcgaagcttgtggtctgccgccactgagagtttcaaagctatgagagacctgatggcttctgtacataactcaaatggtctgggagctattgtagttgtttgtagtgctgcagatctatatattatgaatggtatggagtactgacgatctattcaatggacccacgttgcgttgtgctgtgtggggggcacgggtccccacttaattttcttgtttcagtggacatcttattttatttgatgtagctacaaaggttcattagggcatgtacaatcc

SEQ ID NO: 6641 - protein, 330 aa, Zea mays subsp. mays
  peptide (1)..(330): Ceres Seq. ID no. 13492534
  misc_feature (78)..(318): Pfam Name: alpha/beta hydrolase fold Pfam Description: alpha/beta hydrolase fold
  misc_feature (22)..(318): Homolog of NCBI NO: 34897302 NR Description: putative hydrolase [Oryza sativa (japonica
  misc_feature (23)..(318): Homolog of NCBI NO: 25044843 NR Description: epoxide hydrolase [Ananas comosus]
  misc_feature (22)..(318): Homolog of NCBI NO: 34897298 NR Description: putative hydrolase [Oryza sativa (japonica
  misc_feature (23)..(321): Homolog of NCBI NO: 18411917 NR Description: epoxide hydrolase, putative [Arabidopsis thaliana]
  misc_feature (23)..(317): Homolog of NCBI NO: 7489256 NR Description: probable epoxide hydrolase (EC 3.3.2.3) (clone
  misc_feature (23)..(317): Homolog of NCBI NO: 7489254 NR Description: probable epoxide hydrolase (EC 3.3.2.3) (clone
  misc_feature (23)..(317): Homolog of NCBI NO: 27960680 NR Description: soluble epoxide hydrolase [Euphorbia lagascae]
  misc_feature (23)..(317): Homolog of NCBI NO: 407942 NR Description: epoxide hydrolase
  misc_feature (23)..(317): Homolog of NCBI NO: 7489255 NR Description: probable epoxide hydrolase (EC 3.3.2.3) (clone
  misc_feature (22)..(316): Homolog of NCBI NO: 34902880 NR Description: unnamed protein product [Oryza sativa (japonica group)] >gi|5922625|dbj|BAA84626.1| unnamed protein product
RIDHPPRSRSTAAAQSTTPTRAMAAVRHRQLEANGITMHVAEAGPVNASAPAVLFVHGFPELWYSWRHQMGYLAARGYRCVAPDLRGYGGTTAPPEPTSYTVFHIVGDIVALLDALHLPQVFVVGHDWGAIVSWNLCLLRPDRVRALVNLSVAFMPRRPGVKPLEYFRAAYGDEYYVCRFQEPGLEAEFATFDLKSFFTLALTLRATGSSAMDLRKMQTYSKQMVLPSWLSEEDVSYLASVYSKTGFAGGVNYYRCLDLNWELMAPWTGAKVQVPTKFIVGDGDLAYHHPGVKRYIHKGGFKRDVPMLEEVVVIKGAGALHPAGKSAGNQ

SEQ ID NO: 6642 - protein, 308 aa, Zea mays subsp. mays
  peptide (1)..(308): Ceres Seq. ID no. 13492535
  misc_feature (56)..(296): Pfam Name: alpha/beta hydrolase fold Pfam Description: alpha/beta hydrolase fold
  misc_feature (1)..(296): Homolog of NCBI NO: 34897302 NR Description: putative hydrolase [Oryza sativa (japonica
  misc_feature (1)..(296): Homolog of NCBI NO: 25044843 NR Description: epoxide hydrolase [Ananas comosus]
  misc_feature (1)..(296): Homolog of NCBI NO: 34897298 NR Description: putative hydrolase [Oryza sativa (japonica
  misc_feature (1)..(299): Homolog of NCBI NO: 18411917 NR Description: epoxide hydrolase, putative [Arabidopsis thaliana]
  misc_feature (1)..(295): Homolog of NCBI NO: 7489256 NR Description: probable epoxide hydrolase (EC 3.3.2.3) (clone
  misc_feature (1)..(295): Homolog of NCBI NO: 7489254 NR Description: probable epoxide hydrolase (EC 3.3.2.3) (clone
  misc_feature (1)..(295): Homolog of NCBI NO: 27960680 NR Description: soluble epoxide hydrolase [Euphorbia lagascae]
  misc_feature (1)..(295): Homolog of NCBI NO: 407942 NR Description: epoxide hydrolase
  misc_feature (1)..(295): Homolog of NCBI NO: 7489255 NR Description: probable epoxide hydrolase (EC 3.3.2.3) (clone
  misc_feature (1)..(294): Homolog of NCBI NO: 34902880 NR Description: unnamed protein product [Oryza sativa (japonica group)] >gi|5922625|dbj|BAA84626.1| unnamed protein product
MAAVRHRQLEANGITMHVAEAGPVNASAPAVLFVHGFPELWYSWRHQMGYLAARGYRCVAPDLRGYGGTTAPPEPTSYTVFHIVGDIVALLDALHLPQVFVVGHDWGAIVSWNLCLLRPDRVRALVNLSVAFMPRRPGVKPLEYFRAAYGDEYYVCRFQEPGLEAEFATFDLKSFFTLALTLRATGSSAMDLRKMQTYSKQMVLPSWLSEEDVSYLASVYSKTGFAGGVNYYRCLDLNWELMAPWTGAKVQVPTKFIVGDGDLAYHHPGVKRYIHKGGFKRDVPMLEEVVVIKGAGALHPAGKSAGNQ

SEQ ID NO: 6643 - protein, 293 aa, Zea mays subsp. mays
  peptide (1)..(293): Ceres Seq. ID no. 13492536
  misc_feature (41)..(281): Pfam Name: alpha/beta hydrolase fold Pfam Description: alpha/beta hydrolase fold
  misc_feature (1)..(281): Homolog of NCBI NO: 34897302 NR Description: putative hydrolase [Oryza sativa (japonica
  misc_feature (1)..(281): Homolog of NCBI NO: 25044843 NR Description: epoxide hydrolase [Ananas comosus]
  misc_feature (1)..(281): Homolog of NCBI NO: 34897298 NR Description: putative hydrolase [Oryza sativa (japonica
  misc_feature (1)..(284): Homolog of NCBI NO: 18411917 NR Description: epoxide hydrolase, putative [Arabidopsis thaliana]
  misc_feature (1)..(280): Homolog of NCBI NO: 7489256 NR Description: probable epoxide hydrolase (EC 3.3.2.3) (clone
  misc_feature (1)..(280): Homolog of NCBI NO: 7489254 NR Description: probable epoxide hydrolase (EC 3.3.2.3) (clone
  misc_feature (1)..(280): Homolog of NCBI NO: 27960680 NR Description: soluble epoxide hydrolase [Euphorbia lagascae]
  misc_feature (1)..(280): Homolog of NCBI NO: 407942 NR Description: epoxide hydrolase
  misc_feature (1)..(280): Homolog of NCBI NO: 7489255 NR Description: probable epoxide hydrolase (EC 3.3.2.3) (clone
  misc_feature (1)..(279): Homolog of NCBI NO: 34902880 NR Description: unnamed protein product [Oryza sativa (japonica group)] >gi|5922625|dbj|BAA84626.1| unnamed protein product
MHVAEAGPVNASAPAVLFVHGFPELWYSWRHQMGYLAARGYRCVAPDLRGYGGTTAPPEPTSYTVFHIVGDIVALLDALHLPQVFVVGHDWGAIVSWNLCLLRPDRVRALVNLSVAFMPRRPGVKPLEYFRAAYGDEYYVCRFQEPGLEAEFATFDLKSFFTLALTLRATGSSAMDLRKMQTYSKQMVLPSWLSEEDVSYLASVYSKTGFAGGVNYYRCLDLNWELMAPWTGAKVQVPTKFIVGDGDLAYHHPGVKRYIHKGGFKRDVPMLEEVVVIKGAGALHPAGKSAGNQ

SEQ ID NO: 6644 - DNA, 1121 bp, Zea mays subsp. mays
  misc_feature (1)..(1121): Ceres Seq. ID no. 12355468
  misc_feature: MA Experiment ID: 108504 Result: Up-regulated in Transcription
  misc_feature: MA Experiment 108504 PARAMETER Experiment Name: Zm_Drought_P Parameter: Age (day) Value: 8
  misc_feature: MA Experiment 108504 PARAMETER Experiment Name: Zm_Drought_P Parameter: Organism Value: Zea mays
  misc_feature: MA Experiment 108504 PARAMETER Experiment Name: Zm_Drought_P Parameter: Plant Line Value: 35A19
  misc_feature: MA Experiment 108504 PARAMETER Experiment Name: Zm_Drought_P Parameter: Timepoint (hr) Value: 12
  misc_feature: MA Experiment 108504 PARAMETER Experiment Name: Zm_Drought_P Parameter: Tissue Value: Aerial
  misc_feature: MA Experiment 108504 PARAMETER Experiment Name: Zm_Drought_P Parameter: Treatment Value: Drought vs. No Drought
  misc_feature: MA Experiment ID: 108527 Result: Down-regulated in Transcription
  misc_feature: MA Experiment 108527 PARAMETER Experiment Name: Zm_5mM_NO_P Parameter: Age (day) Value: 8
  misc_feature: MA Experiment 108527 PARAMETER Experiment Name: Zm_5mM_NO_P Parameter: Organism Value: Zea mays
  misc_feature: MA Experiment 108527 PARAMETER Experiment Name: Zm_5mM_NO_P Parameter: Plant Line Value: 35A19
  misc_feature: MA Experiment 108527 PARAMETER Experiment Name: Zm_5mM_NO_P Parameter: Timepoint (hr) Value: 6
  misc_feature: MA Experiment 108527 PARAMETER Experiment Name: Zm_5mM_NO_P Parameter: Tissue Value: Aerial
  misc_feature: MA Experiment 108527 PARAMETER Experiment Name: Zm_5mM_NO_P Parameter: Treatment Value: 5mM NO vs. No Treatment
  misc_feature: MA Experiment ID: 108535 Result: Down-regulated in Transcription
  misc_feature: MA Experiment 108535 PARAMETER Experiment Name: Zm_Meristem_P Parameter: Age (day) Value: 8
  misc_feature: MA Experiment 108535 PARAMETER Experiment Name: Zm_Meristem_P Parameter: Organism Value: Zea mays
  misc_feature: MA Experiment 108535 PARAMETER Experiment Name: Zm_Meristem_P Parameter: Plant Line Value: 35A19
  misc_feature: MA Experiment 108535 PARAMETER Experiment Name: Zm_Meristem_P Parameter: Tissue Value: Root Meristem vs. Above Root Meristem
  misc_feature: MA Experiment ID: 108540 Result: Up-regulated in Transcription
  misc_feature: MA Experiment 108540 PARAMETER Experiment Name: Zm_20percent_PEG_P Parameter: Age (day) Value: 8
  misc_feature: MA Experiment 108540 PARAMETER Experiment Name: Zm_20percent_PEG_P Parameter: Organism Value: Zea mays
  misc_feature: MA Experiment 108540 PARAMETER Experiment Name: Zm_20percent_PEG_P Parameter: Plant Line Value: 35A19
  misc_feature: MA Experiment 108540 PARAMETER Experiment Name: Zm_20percent_PEG_P Parameter: Timepoint (hr) Value: 6
  misc_feature: MA Experiment 108540 PARAMETER Experiment Name: Zm_20percent_PEG_P Parameter: Tissue Value: Aerial
  misc_feature: MA Experiment 108540 PARAMETER Experiment Name: Zm_20percent_PEG_P Parameter: Treatment Value: 20percent PEG vs. No Treatment
  misc_feature: MA Experiment ID: 108543 Result: Up-regulated in Transcription
  misc_feature: MA Experiment ID: 108544 Result: Up-regulated in Transcription
  misc_feature: MA Experiment ID: 108556 Result: Up-regulated in Transcription
  misc_feature: MA Experiment 108556 PARAMETER Experiment Name: Zm_Drought_P Parameter: Age (day) Value: 9
  misc_feature: MA Experiment 108556 PARAMETER Experiment Name: Zm_Drought_P Parameter: Organism Value: Zea mays
  misc_feature: MA Experiment 108556 PARAMETER Experiment Name: Zm_Drought_P Parameter: Plant Line Value: 35A19
  misc_feature: MA Experiment 108556 PARAMETER Experiment Name: Zm_Drought_P Parameter: Timepoint (hr) Value: 24
  misc_feature: MA Experiment 108556 PARAMETER Experiment Name: Zm_Drought_P Parameter: Tissue Value: Aerial
  misc_feature: MA Experiment 108556 PARAMETER Experiment Name: Zm_Drought_P Parameter: Treatment Value: Drought vs. No Drought
  misc_feature: MA Experiment ID: 108597 Result: Up-regulated in Transcription
  misc_feature: MA Experiment 108597 PARAMETER Experiment Name: Zm_100uM_ABA_P Parameter: Age (day) Value: 9
  misc_feature: MA Experiment 108597 PARAMETER Experiment Name: Zm_100uM_ABA_P Parameter: Organism Value: Zea mays
  misc_feature: MA Experiment 108597 PARAMETER Experiment Name: Zm_100uM_ABA_P Parameter: Plant Line Value: 35A19
  misc_feature: MA Experiment 108597 PARAMETER Experiment Name: Zm_100uM_ABA_P Parameter: Timepoint (hr) Value: 24
  misc_feature: MA Experiment 108597 PARAMETER Experiment Name: Zm_100uM_ABA_P Parameter: Tissue Value: Aerial
  misc_feature: MA Experiment 108597 PARAMETER Experiment Name: Zm_100uM_ABA_P Parameter: Treatment Value: 100uM ABA vs. No Treatment
  misc_feature: MA Experiment ID: 20000108 Result: Down-regulated in Transcription
  misc_feature: MA Experiment 20000108 PARAMETER Experiment Name: Zm_Root-Tips_P Parameter: Age (day) Value: 12
  misc_feature: MA Experiment 20000108 PARAMETER Experiment Name: Zm_Root-Tips_P Parameter: Organism Value: Zea mays
  misc_feature: MA Experiment 20000108 PARAMETER Experiment Name: Zm_Root-Tips_P Parameter: Tissue Value: Root tips vs. Root mid region    35
  misc_feature: MA Experiment 20000108 PARAMETER Experiment Name: Zm_Root-Tips_P Parameter: Tissue Value: Root tips vs. Root mid region   Sequence Listing-Misc Features (4)
  misc_feature: MA Experiment ID: 20000477 Result: Up-regulated in Transcription
  misc_feature: MA Experiment 20000477 PARAMETER Experiment Name: Zm_5mM_SA_P Parameter: Age (day) Value: 10
  misc_feature: MA Experiment 20000477 PARAMETER Experiment Name: Zm_5mM_SA_P Parameter: Organism Value: Zea mays
  misc_feature: MA Experiment 20000477 PARAMETER Experiment Name: Zm_5mM_SA_P Parameter: Plant Line Value: 35A19
  misc_feature: MA Experiment 20000477 PARAMETER Experiment Name: Zm_5mM_SA_P Parameter: Timepoint (hr) Value: 48
  misc_feature: MA Experiment 20000477 PARAMETER Experiment Name: Zm_5mM_SA_P Parameter: Tissue Value: Aerial
  misc_feature: MA Experiment 20000477 PARAMETER Experiment Name: Zm_5mM_SA_P Parameter: Treatment Value: 5mM SA vs. No Treatment
  misc_feature: MA Experiment ID: 20000478 Result: Up-regulated in Transcription
  misc_feature: MA Experiment 20000478 PARAMETER Experiment Name: Zm_5mM_SA_P Parameter: Age (day) Value: 11
  misc_feature: MA Experiment 20000478 PARAMETER Experiment Name: Zm_5mM_SA_P Parameter: Organism Value: Zea mays
  misc_feature: MA Experiment 20000478 PARAMETER Experiment Name: Zm_5mM_SA_P Parameter: Plant Line Value: 35A19
  misc_feature: MA Experiment 20000478 PARAMETER Experiment Name: Zm_5mM_SA_P Parameter: Timepoint (hr) Value: 72
  misc_feature: MA Experiment 20000478 PARAMETER Experiment Name: Zm_5mM_SA_P Parameter: Tissue Value: Aerial
  misc_feature: MA Experiment 20000478 PARAMETER Experiment Name: Zm_5mM_SA_P Parameter: Treatment Value: 5mM SA vs. No Treatment
  misc_feature: MA Experiment ID: 20000479 Result: Up-regulated in Transcription
  misc_feature: MA Experiment 20000479 PARAMETER Experiment Name: Zm_Drought_P Parameter: Age (day) Value: 10
  misc_feature: MA Experiment 20000479 PARAMETER Experiment Name: Zm_Drought_P Parameter: Organism Value: Zea mays
  misc_feature: MA Experiment 20000479 PARAMETER Experiment Name: Zm_Drought_P Parameter: Plant Line Value: 35A19
  misc_feature: MA Experiment 20000479 PARAMETER Experiment Name: Zm_Drought_P Parameter: Timepoint (hr) Value: 48
  misc_feature: MA Experiment 20000479 PARAMETER Experiment Name: Zm_Drought_P Parameter: Tissue Value: Aerial
  misc_feature: MA Experiment 20000479 PARAMETER Experiment Name: Zm_Drought_P Parameter: Treatment Value: Drought vs. No Drought
  misc_feature: MA Experiment ID: 20000480 Result: Up-regulated in Transcription
  misc_feature: MA Experiment 20000480 PARAMETER Experiment Name: Zm_Drought_P Parameter: Age (day) Value: 11
  misc_feature: MA Experiment 20000480 PARAMETER Experiment Name: Zm_Drought_P Parameter: Organism Value: Zea mays
  misc_feature: MA Experiment 20000480 PARAMETER Experiment Name: Zm_Drought_P Parameter: Plant Line Value: 35A19
  misc_feature: MA Experiment 20000480 PARAMETER Experiment Name: Zm_Drought_P Parameter: Timepoint (hr) Value: 72
  misc_feature: MA Experiment 20000480 PARAMETER Experiment Name: Zm_Drought_P Parameter: Tissue Value: Aerial
  misc_feature: MA Experiment 20000480 PARAMETER Experiment Name: Zm_Drought_P Parameter: Treatment Value: Drought vs. No Drought
  misc_feature: MA Experiment ID: 20000492 Result: Down-regulated in Transcription
  misc_feature: MA Experiment 20000492 PARAMETER Experiment Name: Zm_Hybrid_Seed_Dev_P Parameter: DAP Value: 12
  misc_feature: MA Experiment 20000492 PARAMETER Experiment Name: Zm_Hybrid_Seed_Dev_P Parameter: Organism Value: Zea mays
  misc_feature: MA Experiment 20000492 PARAMETER Experiment Name: Zm_Hybrid_Seed_Dev_P Parameter: Plant Line Value: 35A19
  misc_feature: MA Experiment 20000492 PARAMETER Experiment Name: Zm_Hybrid_Seed_Dev_P Parameter: Tissue Value: Fert Kernel vs. Unfert Floret
  misc_feature: MA Experiment ID: 20000534 Result: Down-regulated in Transcription
  misc_feature: MA Experiment 20000534 PARAMETER Experiment Name: Zm_Hybrid_Pollen_P Parameter: Age (day) Value: 8
  misc_feature: MA Experiment 20000534 PARAMETER Experiment Name: Zm_Hybrid_Pollen_P Parameter: Organism Value: Zea mays
  misc_feature: MA Experiment 20000534 PARAMETER Experiment Name: Zm_Hybrid_Pollen_P Parameter: Plant Line Value: 35A19
  misc_feature: MA Experiment 20000534 PARAMETER Experiment Name: Zm_Hybrid_Pollen_P Parameter: Tissue Value: Pollen vs. Aerial
  misc_feature: MA Experiment ID: 20000535 Result: Down-regulated in Transcription
  misc_feature: MA Experiment 20000535 PARAMETER Experiment Name: Zm_Hybrid_Seed_Dev_P Parameter: DAP Value: 30 vs. 12
  misc_feature: MA Experiment 20000535 PARAMETER Experiment Name: Zm_Hybrid_Seed_Dev_P Parameter: Organism Value: Zea mays
  misc_feature: MA Experiment 20000535 PARAMETER Experiment Name: Zm_Hybrid_Seed_Dev_P Parameter: Plant Line Value: 35A19
  misc_feature: MA Experiment 20000535 PARAMETER Experiment Name: Zm_Hybrid_Seed_Dev_P Parameter: Tissue Value: Embryo vs. Unfert Floret
acacgcagaggctcgtcgcttttattaaatcagcgctcgtcgccacgcaccctcgcctccccagcgtaacaagtgtccttcctccatcttcctcctccactccactcccaagtccccaccacccccaaccccgtctctccactgcggcgcaggcttcgcttcggctccgctcggctcgagcagaagaaaatgcaacggggcagtgcaggccgtcaggtcacacggcaatgttcttaaatatgctgttctacaacacatcagcgctcccaagccagcaatgcttcctgctgccttttctcgtttcatgtcagtttcatctgctcgcctagaggatcgtggatttgaaactgccactgtagcagatgtcttgaagtctaaagggaagagtgctgatggatcttggctctggtgcaccacagaggatagcgtctatgacgctgtcaaatctatgactcagcacaacgtgggagctttggtggttgtcaaacctggacagaataaatcaatcgctggcattgtcactgagagagattatctccggaaaatcatagtgcagggaaggtcttccaagtcaactaaggttggcgacatcatgactgaagagaacaaactgatcacagtgaatcccgacaccaaggtcctgcaggcaatgcagctcatgacagaaaaccgcgtcagacacatcccggtgatcgacggcacggggatgctggggatggtctccatcggcgacgtcgtgcgcgcggtggtggccgagcacagggaggagctgaaccggctcaatgactacatccagggaggctactaggacggcgtgtgcagcgacgaccccctccgatcccgccagtcagtgaagtccgcctttgaaatccaataactcggaacaatgatgatgacgaaataggccgtgttttcttggacaatgatgttaagttcggcaaggttttcctttctctttttttattctactgcgtggtctatgtgtatattgccaaaggcatgcgtgagccatgcgcccggtgctggggcgcagagaccatctgatggtggaaacaccggaaataagagcgtgccgctgtgtgtttcctttgaaggaataaaaatggtgttcgtgttgtgcc

SEQ ID NO: 6645 - protein, 176 aa, Zea mays subsp. mays
  peptide (1)..(176): Ceres Seq. ID no. 12355469
  misc_feature (36)..(91): Pfam Name: CBS domain Pfam Description: CBS domain
  misc_feature (1)..(176): Homolog of NCBI NO: 29788876 NR Description: unknown protein [Oryza sativa (japonica
  misc_feature (1)..(176): Homolog of NCBI NO: 15238284 NR Description: putative protein; protein id: At5g10860.1, by cDNA: gi_13605727, supported by cDNA: gi_17978886 [Arabidopsis >gi|20455364|sp|Q9LEV3|UMP3_ARATH Protein At5g10860,
  misc_feature (1)..(176): Homolog of NCBI NO: 34913008 NR Description: P0663E10.18 [Oryza sativa (japonica
  misc_feature (1)..(80): Homolog of NCBI NO: 18266206 NR Description: senescence-associated putative protein [Narcissus
  misc_feature (20)..(174): Homolog of NCBI NO: 22984734 NR Description: hypothetical protein [Burkholderia fungorum]
  misc_feature (25)..(174): Homolog of NCBI NO: 22988916 NR Description: hypothetical protein [Burkholderia fungorum]
  misc_feature (26)..(173): Homolog of NCBI NO: 34499375 NR Description: conserved hypothetical protein [Chromobacterium ATCC 12472] >gi|34105225|gb|AAQ61581.1| conserved hypothetical
  misc_feature (22)..(172): Homolog of NCBI NO: 28850322 NR Description: similar to putative protein; protein id: supported by cDNA: gi_13605727, supported by cDNA: gi_17978886
  misc_feature (26)..(174): Homolog of NCBI NO: 26986946 NR Description: CBS domain protein [Pseudomonas putida KT2440]
  misc_feature (26)..(174): Homolog of NCBI NO: 23472673 NR Description: hypothetical protein [Pseudomonas syringae pv.
MLPAAFSRFMSVSSARLEDRGFETATVADVLKSKGKSADGSWLWCTTEDSVYDAVKSMTQHNVGALVVVKPGQNKSIAGIVTERDYLRKIIVQGRSSKSTKVGDIMTEENKLITVNPDTKVLQAMQLMTENRVRHIPVIDGTGMLGMVSIGDVVRAVVAEHREELNRLNDYIQGGY

SEQ ID NO: 6646 - protein, 167 aa, Zea mays subsp. mays
  peptide (1)..(167): Ceres Seq. ID no. 12355470
  misc_feature (27)..(82): Pfam Name: CBS domain Pfam Description: CBS domain
  misc_feature (1)..(167): Homolog of NCBI NO: 29788876 NR Description: unknown protein [Oryza sativa (japonica
  misc_feature (1)..(167): Homolog of NCBI NO: 15238284 NR Description: putative protein; protein id: At5g10860.1, by cDNA: gi_13605727, supported by cDNA: gi_17978886 [Arabidopsis >gi|20455364|sp|Q9LEV3|UMP3_ARATH Protein At5g10860,
  misc_feature (1)..(167): Homolog of NCBI NO: 34913008 NR Description: P0663E10.18 [Oryza sativa (japonica
  misc_feature (1)..(71): Homolog of NCBI NO: 18266206 NR Description: senescence-associated putative protein [Narcissus
  misc_feature (11)..(165): Homolog of NCBI NO: 22984734 NR Description: hypothetical protein [Burkholderia fungorum]
  misc_feature (16)..(165): Homolog of NCBI NO: 22988916 NR Description: hypothetical protein [Burkholderia fungorum]
  misc_feature (17)..(164): Homolog of NCBI NO: 34499375 NR Description: conserved hypothetical protein [Chromobacterium ATCC 12472] >gi|34105225|gb|AAQ61581.1| conserved hypothetical
  misc_feature (13)..(163): Homolog of NCBI NO: 28850322 NR Description: similar to putative protein; protein id: supported by cDNA: gi_13605727, supported by cDNA: gi_17978886
  misc_feature (17)..(165): Homolog of NCBI NO: 26986946 NR Description: CBS domain protein [Pseudomonas putida KT2440]
  misc_feature (17)..(165): Homolog of NCBI NO: 23472673 NR Description: hypothetical protein [Pseudomonas syringae pv.
MSVSSARLEDRGFETATVADVLKSKGKSADGSWLWCTTEDSVYDAVKSMTQHNVGALVVVKPGQNKSIAGIVTERDYLRKIIVQGRSSKSTKVGDIMTEENKLITVNPDTKVLQAMQLMTENRVRHIPVIDGTGMLGMVSIGDVVRAVVAEHREELNRLNDYIQGGY

SEQ ID NO: 6647 - protein, 119 aa, Zea mays subsp. mays
  peptide (1)..(119): Ceres Seq. ID no. 12355471
  misc_feature (1)..(117): Homolog of NCBI NO: 22988916 NR Description: hypothetical protein [Burkholderia fungorum]
  misc_feature (1)..(116): Homolog of NCBI NO: 34499375 NR Description: conserved hypothetical protein [Chromobacterium ATCC 12472] >gi|34105225|gb|AAQ61581.1| conserved hypothetical
  misc_feature (1)..(115): Homolog of NCBI NO: 28850322 NR Description: similar to putative protein; protein id: supported by cDNA: gi_13605727, supported by cDNA: gi_17978886
  misc_feature (1)..(117): Homolog of NCBI NO: 26986946 NR Description: CBS domain protein [Pseudomonas putida KT2440]
  misc_feature (1)..(117): Homolog of NCBI NO: 23472673 NR Description: hypothetical protein [Pseudomonas syringae pv.
  misc_feature (1)..(119): Homolog of NCBI NO: 29788876 NR Description: unknown protein [Oryza sativa (japonica
  misc_feature (1)..(119): Homolog of NCBI NO: 15238284 NR Description: putative protein; protein id: At5g10860.1, by cDNA: gi_13605727, supported by cDNA: gi_17978886 [Arabidopsis >gi|20455364|sp|Q9LEV3|UMP3_ARATH Protein At5g10860,
  misc_feature (1)..(119): Homolog of NCBI NO: 34913008 NR Description: P0663E10.18 [Oryza sativa (japonica
  misc_feature (1)..(23): Homolog of NCBI NO: 18266206 NR Description: senescence-associated putative protein [Narcissus
  misc_feature (1)..(117): Homolog of NCBI NO: 22984734 NR Description: hypothetical protein [Burkholderia fungorum]
MTQHNVGALVVVKPGQNKSIAGIVTERDYLRKIIVQGRSSKSTKVGDIMTEENKLITVNPDTKVLQAMQLMTENRVRHIPVIDGTGMLGMVSIGDVVRAVVAEHREELNRLNDYIQGGY

SEQ ID NO: 6648 - DNA, 887 bp, Zea mays subsp. mays
  misc_feature (1)..(887): Ceres Seq. ID no. 12372498
  misc_feature: MA Experiment ID: 108528 Result: Down-regulated in Transcription
  misc_feature: MA Experiment 108528 PARAMETER Experiment Name: Zm_Imbibed_Seeds_P Parameter: Age (day) Value: 5 vs. 2
  misc_feature: MA Experiment 108528 PARAMETER Experiment Name: Zm_Imbibed_Seeds_P Parameter: Organism Value: Zea mays
  misc_feature: MA Experiment 108528 PARAMETER Experiment Name: Zm_Imbibed_Seeds_P Parameter: Plant Line Value: 35A19
  misc_feature: MA Experiment 108528 PARAMETER Experiment Name: Zm_Imbibed_Seeds_P Parameter: Tissue Value: Aerial vs. Embryo
  misc_feature: MA Experiment ID: 108530 Result: Down-regulated in Transcription
  misc_feature: MA Experiment 108530 PARAMETER Experiment Name: Zm_Imbibed_Seeds_P Parameter: Age (day) Value: 6 vs. 2
  misc_feature: MA Experiment 108530 PARAMETER Experiment Name: Zm_Imbibed_Seeds_P Parameter: Organism Value: Zea mays
  misc_feature: MA Experiment 108530 PARAMETER Experiment Name: Zm_Imbibed_Seeds_P Parameter: Plant Line Value: 35A19
  misc_feature: MA Experiment 108530 PARAMETER Experiment Name: Zm_Imbibed_Seeds_P Parameter: Tissue Value: Aerial vs. Embryo
  misc_feature: MA Experiment ID: 108535 Result: Up-regulated in Transcription
  misc_feature: MA Experiment 108535 PARAMETER Experiment Name: Zm_Meristem_P Parameter: Age (day) Value: 8
  misc_feature: MA Experiment 108535 PARAMETER Experiment Name: Zm_Meristem_P Parameter: Organism Value: Zea mays
  misc_feature: MA Experiment 108535 PARAMETER Experiment Name: Zm_Meristem_P Parameter: Plant Line Value: 35A19
  misc_feature: MA Experiment 108535 PARAMETER Experiment Name: Zm_Meristem_P Parameter: Tissue Value: Root Meristem vs. Above Root Meristem
  misc_feature: MA Experiment ID: 108544 Result: Down-regulated in Transcription
  misc_feature: MA Experiment ID: 20000108 Result: Up-regulated in Transcription
  misc_feature: MA Experiment 20000108 PARAMETER Experiment Name: Zm_Root-Tips_P Parameter: Age (day) Value: 12
  misc_feature: MA Experiment 20000108 PARAMETER Experiment Name: Zm_Root-Tips_P Parameter: Organism Value: Zea mays
  misc_feature: MA Experiment 20000108 PARAMETER Experiment Name: Zm_Root-Tips_P Parameter: Tissue Value: Root tips vs. Root mid region    35
  misc_feature: MA Experiment 20000108 PARAMETER Experiment Name: Zm_Root-Tips_P Parameter: Tissue Value: Root tips vs. Root mid region   Sequence Listing-Misc Features (4)
cattttcatgaagcccagtaagggaagggagagccgattcatttgcatttttctgagcagatgcagatcgatcccgagttccgctgactgcagaggagagagatctagagcgagggagggagggaaatgggccacgaggctgcggcgccggggtcgtcggtgctcggccgcgcggtggaggaggtgcgctcggccctcaacgagcacgccgacgtggttgccgacctcttcggtcgcgtctcctccgaagtgcgcaccggcttcgcgcccgccgtcgactccttcgttggcttcttccacgccgtcgactggaaggagccttggctgatcagcatactatctttccatgccattctgctactggttaccatcatctcgaggaggaatatcaatttccagctcatcttgtcagctctaacattttctggtgtattccttgctgagagattaaatacgttcctggcgcaaaactggaagagcttctctacccaaaactattttgatccccagggccttttcatttcggtcatctggtctggccctctcctcctgataacgatccttattctggtgaacactctcgtgacgctctgcacgctaatggtaaggtggaaaagggcaaagctcaggcatcgcgctcggcaagctcgtgacaagcaggactgatctgaaacctgcgtctatgtatcattcggtggcaagtagaaagtcgtgttcttgctacggttggtctaaccaagaatcacatccctggaaacggtgcccatttcattaggtagcagaatataacgttaagatggtcagattttgctcttgtggacccttttggtgcccgggtagccatttactacgctgcaatattatcacgtcacacgatttctttgggc

SEQ ID NO: 6649 - protein, 179 aa, Zea mays subsp. mays
  peptide (1)..(179): Ceres Seq. ID no. 12372499
  misc_feature (1)..(179): Homolog of NCBI NO: 38637052 NR Description: unknown protein [Oryza sativa (japonica
  misc_feature (17)..(179): Homolog of NCBI NO: 18399227 NR Description: Expressed protein; protein id: At1g34350.1,
  misc_feature (17)..(179): Homolog of NCBI NO: 21554376 NR Description: unknown [Arabidopsis thaliana]
  misc_feature (50)..(179): Homolog of NCBI NO: 24653051 NR Description: CG30051-PB [Drosophila melanogaster]
  misc_feature (61)..(179): Homolog of NCBI NO: 11359939 NR Description: hypothetical protein DKFZp434C1714.1 - human
  misc_feature (61)..(179): Homolog of NCBI NO: 16359094 NR Description: Unknown (protein for IMAGE:4686355) [Homo sapiens]
  misc_feature (61)..(179): Homolog of NCBI NO: 21595411 NR Description: Hypothetical protein DKFZp434C1714 [Homo sapiens]
  misc_feature (61)..(179): Homolog of NCBI NO: 40548391 NR Description: hypothetical protein DKFZp434C1714 [Homo sapiens]
  misc_feature (61)..(179): Homolog of NCBI NO: 34864175 NR Description: similar to cDNA sequence BC024093 [Rattus
  misc_feature (61)..(179): Homolog of NCBI NO: 25286705 NR Description: cDNA sequence BC024093 [Mus musculus]
MGHEAAAPGSSVLGRAVEEVRSALNEHADVVADLFGRVSSEVRTGFAPAVDSFVGFFHAVDWKEPWLISILSFHAILLLVTIISRRNINFQLILSALTFSGVFLAERLNTFLAQNWKSFSTQNYFDPQGLFISVIWSGPLLLITILILVNTLVTLCTLMVRWKRAKLRHRARQARDKQD

SEQ ID NO: 6650 - protein, 108 aa, Zea mays subsp. mays
  peptide (1)..(108): Ceres Seq. ID no. 12372500
IFMKPSKGRESRFICIFLSRCRSIPSSADCRGERSRAREGGKWATRLRRRGRRCSAARWRRCARPSTSTPTWLPTSSVASPPKCAPASRPPSTPSLASSTPSTGRSLG

SEQ ID NO: 6651 - protein, 106 aa, Zea mays subsp. mays
  peptide (1)..(106): Ceres Seq. ID no. 12372501
MKPSKGRESRFICIFLSRCRSIPSSADCRGERSRAREGGKWATRLRRRGRRCSAARWRRCARPSTSTPTWLPTSSVASPPKCAPASRPPSTPSLASSTPSTGRSLG

SEQ ID NO: 6652 - DNA, 1978 bp, Zea mays subsp. mays
  misc_feature (1)..(1978): Ceres Seq. ID no. 12387049
  misc_feature: MA Experiment ID: 108533 Result: Up-regulated in Transcription
  misc_feature: MA Experiment 108533 PARAMETER Experiment Name: Zm_4deg_Cold_P Parameter: Age (hr) Value: 8
  misc_feature: MA Experiment 108533 PARAMETER Experiment Name: Zm_4deg_Cold_P Parameter: Organism Value: Zea mays
  misc_feature: MA Experiment 108533 PARAMETER Experiment Name: Zm_4deg_Cold_P Parameter: Plant Line Value: 35A19
  misc_feature: MA Experiment 108533 PARAMETER Experiment Name: Zm_4deg_Cold_P Parameter: Temperature (deg C) Value: 4 vs. 22
  misc_feature: MA Experiment 108533 PARAMETER Experiment Name: Zm_4deg_Cold_P Parameter: Timepoint (hr) Value: 1
  misc_feature: MA Experiment 108533 PARAMETER Experiment Name: Zm_4deg_Cold_P Parameter: Tissue Value: Aerial
  misc_feature: MA Experiment ID: 108534 Result: Up-regulated in Transcription
  misc_feature: MA Experiment 108534 PARAMETER Experiment Name: Zm_4deg_Cold_P Parameter: Age (hr) Value: 8
  misc_feature: MA Experiment 108534 PARAMETER Experiment Name: Zm_4deg_Cold_P Parameter: Organism Value: Zea mays
  misc_feature: MA Experiment 108534 PARAMETER Experiment Name: Zm_4deg_Cold_P Parameter: Plant Line Value: 35A19
  misc_feature: MA Experiment 108534 PARAMETER Experiment Name: Zm_4deg_Cold_P Parameter: Temperature (deg C) Value: 4 vs. 22
  misc_feature: MA Experiment 108534 PARAMETER Experiment Name: Zm_4deg_Cold_P Parameter: Timepoint (hr) Value: 6
  misc_feature: MA Experiment 108534 PARAMETER Experiment Name: Zm_4deg_Cold_P Parameter: Tissue Value: Aerial
  misc_feature: MA Experiment ID: 108535 Result: Down-regulated in Transcription
  misc_feature: MA Experiment 108535 PARAMETER Experiment Name: Zm_Meristem_P Parameter: Age (day) Value: 8
  misc_feature: MA Experiment 108535 PARAMETER Experiment Name: Zm_Meristem_P Parameter: Organism Value: Zea mays
  misc_feature: MA Experiment 108535 PARAMETER Experiment Name: Zm_Meristem_P Parameter: Plant Line Value: 35A19
  misc_feature: MA Experiment 108535 PARAMETER Experiment Name: Zm_Meristem_P Parameter: Tissue Value: Root Meristem vs. Above Root Meristem
  misc_feature: MA Experiment ID: 108559 Result: Down-regulated in Transcription
  misc_feature: MA Experiment 108559 PARAMETER Experiment Name: Zm_5mM_NO_P Parameter: Age (day) Value: 8
  misc_feature: MA Experiment 108559 PARAMETER Experiment Name: Zm_5mM_NO_P Parameter: Organism Value: Zea mays
  misc_feature: MA Experiment 108559 PARAMETER Experiment Name: Zm_5mM_NO_P Parameter: Plant Line Value: 35A19
  misc_feature: MA Experiment 108559 PARAMETER Experiment Name: Zm_5mM_NO_P Parameter: Timepoint (hr) Value: 12
  misc_feature: MA Experiment 108559 PARAMETER Experiment Name: Zm_5mM_NO_P Parameter: Tissue Value: Aerial
  misc_feature: MA Experiment 108559 PARAMETER Experiment Name: Zm_5mM_NO_P Parameter: Treatment Value: 5mM NO vs. No Treatment
  misc_feature: MA Experiment ID: 108688 Result: Down-regulated in Transcription
  misc_feature: MA Experiment 108688 PARAMETER Experiment Name: Zm_Embryos-Flowers__P Parameter: Tissue Value: Immature Flowers vs. Aerial+
  misc_feature: MA Experiment ID: 108689 Result: Up-regulated in Transcription
  misc_feature: MA Experiment 108689 PARAMETER Experiment Name: Zm_Drought_Roots_P Parameter: Age (day) Value: 9
  misc_feature: MA Experiment 108689 PARAMETER Experiment Name: Zm_Drought_Roots_P Parameter: Organism Value: Zea mays
  misc_feature: MA Experiment 108689 PARAMETER Experiment Name: Zm_Drought_Roots_P Parameter: Plant Line Value: 35A19
  misc_feature: MA Experiment 108689 PARAMETER Experiment Name: Zm_Drought_Roots_P Parameter: Timepoint (hr) Value: 24
  misc_feature: MA Experiment 108689 PARAMETER Experiment Name: Zm_Drought_Roots_P Parameter: Tissue Value: Roots
  misc_feature: MA Experiment 108689 PARAMETER Experiment Name: Zm_Drought_Roots_P Parameter: Treatment Value: Drought vs. No Drought
aaaccaaacccagctcaggcacaaccccaacgcaccgccgccgctcgcctggcctcacctcgccggagaagagttataagacaggagaaccccgtccccggggcgcaggcctcggcagcttccgtgaccaccgcccaatcctgccacagctgccctccctcctcccctctgggcgtggccgagttgtaggcatcacggctagcgttgcagccccccggcgcggccccgcagctgcgcaggtggagcccacgggcaccatcgcctccgctgtcgcgtccagccccgctccgcacggcggccgcgggggcgctgccctcggccggaggaagcccgtccgatctcctcttcctcgccggcggcggtcgcctctgagccgttcctgtctctcaccttcttcctttcctagcaattagtcccttctgctaacccccccggaccccgacgagttctcaccccgagagtaactgaccgacctaccggcatggagatgaagctgaccatcaggagggtgcccaccgtcgtctccaactaccaggaggacgccgacaagccgcgcgcgggctgcgggaggaactgcctcggcgactgctgcctgcctgcttccaagcttcccctctacgcgttcaagttgactccggcaaagggctcgcaggaggatgctgcttcaaccaagttacttgttgatattctccttagtgagtgggaggacaggatgactcgaggcttattccgctacgatgtcactgcctgtgagaccaaggtcattcctggcaaccttgggtttgttgcacaactcaatgaagggcgccatcttaagaagcgccctactgagtttcgtgtggaccgtgtgctccagccgtttgaccctgccaaattcaatttcacaaaagttggccaggaagaggttctcttccaatttgagaatagtggtggtgatgacagctatttcctgaacaacgctccaatcattgctgttgatcgggctccaaatgttattgctatcaatgtaagcccaattgaatatggacatgtgcttctcattcctcgtgttctggaccgcctgcctcagaggattgatccagagagcttcttgcttgcactgcaaatggcagccgagggaggtagcccatacttcaggcttggttacaatagcttgggtgcgtttgccaccatcaatcacctccactttcaggcgtactacttgtcagtgcctttccctgttgagaaggcagctacccacaagatcccactctctgaggacacgaagaagaatggggtgaccgtgtccaagctgataaattatcctgtgagaggcctggtatttgagggagggaacaccctggacgacctggccactgtggtttctaatgcttgcatttggctgcaagacaacaatgtgccttacaatgtgctcatttctgactgtggcaagagggttttcctgttcccccagtgctacgcagagaagcaggctctgggtgaagtgagccaggagctgctggacactcaggtgaacccagctgtgtgggagatcagtggacacatggtgctgaaacggaggatggactatgaggaggcatctgaaacctccgcgtggaaactcctcgccgaggtctctctctccgaggagcgcttcgaggaagtgaaggcgtacatcttcagcgctgctggcctggttcagtatgatgaggaagaggaggaagccagcgacggtgagggccctacggcctatgttcctgtcaaggttacccctctgcccatcgctgaagggtgcctcgtcctcccgtgagtccgtggtcggttaaataaagggccgtatatgattgcgagccctgtgctctgccgctattttcttctcgtttgtgtcttgctgctctcgtggtgaactcgctactccagtactctgcaatattaagcagaagctattgtattgtttgggtcgtttgtcagctaaattgaaatgcgatggacatttact

SEQ ID NO: 6653 - protein, 435 aa, Zea mays subsp. mays
  peptide (1)..(435): Ceres Seq. ID no. 12387050
  misc_feature (3)..(407): Homolog of NCBI NO: 15240467 NR Description: putative protein; protein id: At5g55120.1, by cDNA: gi_17380815, supported by cDNA: gi_20259016 [Arabidopsis
  misc_feature (5)..(406): Homolog of NCBI NO: 18416877 NR Description: putative protein; protein id: At4g26850.1, by cDNA: gi_15810138, supported by cDNA: gi_20260477 [Arabidopsis >gi|20260478|gb|AAM13137.1| putative protein [Arabidopsis
  misc_feature (5)..(406): Homolog of NCBI NO: 15810139 NR Description: unknown protein [Arabidopsis thaliana]
  misc_feature (43)..(406): Homolog of NCBI NO: 7452423 NR Description: hypothetical protein F10M23.190 - Arabidopsis >gi|4455208|emb|CAB36531.1| putative protein [Arabidopsis >gi|7269537|emb|CAB79540.1| putative protein [Arabidopsis
  misc_feature (43)..(406): Homolog of NCBI NO: 21070346 NR Description: VTC2 [Arabidopsis thaliana]
  misc_feature (93)..(392): Homolog of NCBI NO: 34907712 NR Description: P0035F12.16 [Oryza sativa (japonica
  misc_feature (5)..(179): Homolog of NCBI NO: 7452423 NR Description: hypothetical protein F10M23.190 - Arabidopsis >gi|4455208|emb|CAB36531.1| putative protein [Arabidopsis >gi|7269537|emb|CAB79540.1| putative protein [Arabidopsis
  misc_feature (5)..(179): Homolog of NCBI NO: 21070346 NR Description: VTC2 [Arabidopsis thaliana]
  misc_feature (70)..(390): Homolog of NCBI NO: 27677438 NR Description: similar to CG3552-PC [Drosophila melanogaster]
  misc_feature (70)..(390): Homolog of NCBI NO: 22766878 NR Description: Unknown (protein for MGC:47349) [Mus musculus]
MEMKLTIRRVPTVVSNYQEDADKPRAGCGRNCLGDCCLPASKLPLYAFKLTPAKGSQEDAASTKLLVDILLSEWEDRMTRGLFRYDVTACETKVIPGNLGFVAQLNEGRHLKKRPTEFRVDRVLQPFDPAKFNFTKVGQEEVLFQFENSGGDDSYFLNNAPIIAVDRAPNVIAINVSPIEYGHVLLIPRVLDRLPQRIDPESFLLALQMAAEGGSPYFRLGYNSLGAFATINHLHFQAYYLSVPFPVEKAATHKIPLSEDTKKNGVTVSKLINYPVRGLVFEGGNTLDDLATVVSNACIWLQDNNVPYNVLISDCGKRVFLFPQCYAEKQALGEVSQELLDTQVNPAVWEISGHMVLKRRMDYEEASETSAWKLLAEVSLSEERFEEVKAYIFSAAGLVQYDEEEEEASDGEGPTAYVPVKVTPLPIAEGCLVLP

SEQ ID NO: 6654 - protein, 433 aa, Zea mays subsp. mays
  peptide (1)..(433): Ceres Seq. ID no. 12387051
  misc_feature (1)..(405): Homolog of NCBI NO: 15240467 NR Description: putative protein; protein id: At5g55120.1, by cDNA: gi_17380815, supported by cDNA: gi_20259016 [Arabidopsis
  misc_feature (3)..(404): Homolog of NCBI NO: 18416877 NR Description: putative protein; protein id: At4g26850.1, by cDNA: gi_15810138, supported by cDNA: gi_20260477 [Arabidopsis >gi|20260478|gb|AAM13137.1| putative protein [Arabidopsis
  misc_feature (3)..(404): Homolog of NCBI NO: 15810139 NR Description: unknown protein [Arabidopsis thaliana]
  misc_feature (41)..(404): Homolog of NCBI NO: 7452423 NR Description: hypothetical protein F10M23.190 - Arabidopsis >gi|4455208|emb|CAB36531.1| putative protein [Arabidopsis >gi|7269537|emb|CAB79540.1| putative protein [Arabidopsis
  misc_feature (41)..(404): Homolog of NCBI NO: 21070346 NR Description: VTC2 [Arabidopsis thaliana]
  misc_feature (91)..(390): Homolog of NCBI NO: 34907712 NR Description: P0035F12.16 [Oryza sativa (japonica
  misc_feature (3)..(177): Homolog of NCBI NO: 7452423 NR Description: hypothetical protein F10M23.190 - Arabidopsis >gi|4455208|emb|CAB36531.1| putative protein [Arabidopsis >gi|7269537|emb|CAB79540.1| putative protein [Arabidopsis
  misc_feature (3)..(177): Homolog of NCBI NO: 21070346 NR Description: VTC2 [Arabidopsis thaliana]
  misc_feature (68)..(388): Homolog of NCBI NO: 27677438 NR Description: similar to CG3552-PC [Drosophila melanogaster]
  misc_feature (68)..(388): Homolog of NCBI NO: 22766878 NR Description: Unknown (protein for MGC:47349) [Mus musculus]
MKLTIRRVPTVVSNYQEDADKPRAGCGRNCLGDCCLPASKLPLYAFKLTPAKGSQEDAASTKLLVDILLSEWEDRMTRGLFRYDVTACETKVIPGNLGFVAQLNEGRHLKKRPTEFRVDRVLQPFDPAKFNFTKVGQEEVLFQFENSGGDDSYFLNNAPIIAVDRAPNVIAINVSPIEYGHVLLIPRVLDRLPQRIDPESFLLALQMAAEGGSPYFRLGYNSLGAFATINHLHFQAYYLSVPFPVEKAATHKIPLSEDTKKNGVTVSKLINYPVRGLVFEGGNTLDDLATVVSNACIWLQDNNVPYNVLISDCGKRVFLFPQCYAEKQALGEVSQELLDTQVNPAVWEISGHMVLKRRMDYEEASETSAWKLLAEVSLSEERFEEVKAYIFSAAGLVQYDEEEEEASDGEGPTAYVPVKVTPLPIAEGCLVLP

SEQ ID NO: 6655 - protein, 358 aa, Zea mays subsp. mays
  peptide (1)..(358): Ceres Seq. ID no. 12387052
  misc_feature (1)..(330): Homolog of NCBI NO: 15240467 NR Description: putative protein; protein id: At5g55120.1, by cDNA: gi_17380815, supported by cDNA: gi_20259016 [Arabidopsis
  misc_feature (1)..(329): Homolog of NCBI NO: 18416877 NR Description: putative protein; protein id: At4g26850.1, by cDNA: gi_15810138, supported by cDNA: gi_20260477 [Arabidopsis >gi|20260478|gb|AAM13137.1| putative protein [Arabidopsis
  misc_feature (1)..(329): Homolog of NCBI NO: 15810139 NR Description: unknown protein [Arabidopsis thaliana]
  misc_feature (1)..(329): Homolog of NCBI NO: 7452423 NR Description: hypothetical protein F10M23.190 - Arabidopsis >gi|4455208|emb|CAB36531.1| putative protein [Arabidopsis >gi|7269537|emb|CAB79540.1| putative protein [Arabidopsis
  misc_feature (1)..(329): Homolog of NCBI NO: 21070346 NR Description: VTC2 [Arabidopsis thaliana]
  misc_feature (16)..(315): Homolog of NCBI NO: 34907712 NR Description: P0035F12.16 [Oryza sativa (japonica
  misc_feature (1)..(102): Homolog of NCBI NO: 7452423 NR Description: hypothetical protein F10M23.190 - Arabidopsis >gi|4455208|emb|CAB36531.1| putative protein [Arabidopsis >gi|7269537|emb|CAB79540.1| putative protein [Arabidopsis
  misc_feature (1)..(102): Homolog of NCBI NO: 21070346 NR Description: VTC2 [Arabidopsis thaliana]
  misc_feature (1)..(313): Homolog of NCBI NO: 27677438 NR Description: similar to CG3552-PC [Drosophila melanogaster]
  misc_feature (1)..(313): Homolog of NCBI NO: 22766878 NR Description: Unknown (protein for MGC:47349) [Mus musculus]
MTRGLFRYDVTACETKVIPGNLGFVAQLNEGRHLKKRPTEFRVDRVLQPFDPAKFNFTKVGQEEVLFQFENSGGDDSYFLNNAPIIAVDRAPNVIAINVSPIEYGHVLLIPRVLDRLPQRIDPESFLLALQMAAEGGSPYFRLGYNSLGAFATINHLHFQAYYLSVPFPVEKAATHKIPLSEDTKKNGVTVSKLINYPVRGLVFEGGNTLDDLATVVSNACIWLQDNNVPYNVLISDCGKRVFLFPQCYAEKQALGEVSQELLDTQVNPAVWEISGHMVLKRRMDYEEASETSAWKLLAEVSLSEERFEEVKAYIFSAAGLVQYDEEEEEASDGEGPTAYVPVKVTPLPIAEGCLVLP

SEQ ID NO: 6656 - DNA, 1410 bp, Zea mays subsp. mays
  misc_feature (1)..(1410): Ceres Seq. ID no. 12405518
  misc_feature: MA Experiment ID: 108534 Result: Down-regulated in Transcription
  misc_feature: MA Experiment 108534 PARAMETER Experiment Name: Zm_4deg_Cold_P Parameter: Age (hr) Value: 8
  misc_feature: MA Experiment 108534 PARAMETER Experiment Name: Zm_4deg_Cold_P Parameter: Organism Value: Zea mays
  misc_feature: MA Experiment 108534 PARAMETER Experiment Name: Zm_4deg_Cold_P Parameter: Plant Line Value: 35A19
  misc_feature: MA Experiment 108534 PARAMETER Experiment Name: Zm_4deg_Cold_P Parameter: Temperature (deg C) Value: 4 vs. 22
  misc_feature: MA Experiment 108534 PARAMETER Experiment Name: Zm_4deg_Cold_P Parameter: Timepoint (hr) Value: 6
  misc_feature: MA Experiment 108534 PARAMETER Experiment Name: Zm_4deg_Cold_P Parameter: Tissue Value: Aerial
  misc_feature: MA Experiment ID: 108535 Result: Up-regulated in Transcription
  misc_feature: MA Experiment 108535 PARAMETER Experiment Name: Zm_Meristem_P Parameter: Age (day) Value: 8
  misc_feature: MA Experiment 108535 PARAMETER Experiment Name: Zm_Meristem_P Parameter: Organism Value: Zea mays
  misc_feature: MA Experiment 108535 PARAMETER Experiment Name: Zm_Meristem_P Parameter: Plant Line Value: 35A19
  misc_feature: MA Experiment 108535 PARAMETER Experiment Name: Zm_Meristem_P Parameter: Tissue Value: Root Meristem vs. Above Root Meristem
  misc_feature: MA Experiment ID: 108536 Result: Up-regulated in Transcription
  misc_feature: MA Experiment 108536 PARAMETER Experiment Name: Zm_Meristem_P Parameter: Age (day) Value: 8
  misc_feature: MA Experiment 108536 PARAMETER Experiment Name: Zm_Meristem_P Parameter: Organism Value: Zea mays
  misc_feature: MA Experiment 108536 PARAMETER Experiment Name: Zm_Meristem_P Parameter: Plant Line Value: 35A19
  misc_feature: MA Experiment 108536 PARAMETER Experiment Name: Zm_Meristem_P Parameter: Tissue Value: Shoot Meristem vs. Above Shoot Meristem
  misc_feature: MA Experiment ID: 108544 Result: Down-regulated in Transcription
  misc_feature: MA Experiment ID: 20000478 Result: Down-regulated in Transcription
  misc_feature: MA Experiment 20000478 PARAMETER Experiment Name: Zm_5mM_SA_P Parameter: Age (day) Value: 11
  misc_feature: MA Experiment 20000478 PARAMETER Experiment Name: Zm_5mM_SA_P Parameter: Organism Value: Zea mays
  misc_feature: MA Experiment 20000478 PARAMETER Experiment Name: Zm_5mM_SA_P Parameter: Plant Line Value: 35A19
  misc_feature: MA Experiment 20000478 PARAMETER Experiment Name: Zm_5mM_SA_P Parameter: Timepoint (hr) Value: 72
  misc_feature: MA Experiment 20000478 PARAMETER Experiment Name: Zm_5mM_SA_P Parameter: Tissue Value: Aerial
  misc_feature: MA Experiment 20000478 PARAMETER Experiment Name: Zm_5mM_SA_P Parameter: Treatment Value: 5mM SA vs. No Treatment
  misc_feature: MA Experiment ID: 20000479 Result: Down-regulated in Transcription
  misc_feature: MA Experiment 20000479 PARAMETER Experiment Name: Zm_Drought_P Parameter: Age (day) Value: 10
  misc_feature: MA Experiment 20000479 PARAMETER Experiment Name: Zm_Drought_P Parameter: Organism Value: Zea mays
  misc_feature: MA Experiment 20000479 PARAMETER Experiment Name: Zm_Drought_P Parameter: Plant Line Value: 35A19
  misc_feature: MA Experiment 20000479 PARAMETER Experiment Name: Zm_Drought_P Parameter: Timepoint (hr) Value: 48
  misc_feature: MA Experiment 20000479 PARAMETER Experiment Name: Zm_Drought_P Parameter: Tissue Value: Aerial
  misc_feature: MA Experiment 20000479 PARAMETER Experiment Name: Zm_Drought_P Parameter: Treatment Value: Drought vs. No Drought
  misc_feature: MA Experiment ID: 20000632 Result: Down-regulated in Transcription
  misc_feature: MA Experiment 20000632 PARAMETER Experiment Name: Zm_Herbicide-Treatments_P Parameter: Timepoint (hr) Value: 4
  misc_feature: MA Experiment 20000632 PARAMETER Experiment Name: Zm_Herbicide-Treatments_P Parameter: Tissue Value: Aerial
  misc_feature: MA Experiment 20000632 PARAMETER Experiment Name: Zm_Herbicide-Treatments_P Parameter: Treatment Value: Glean vs. No Treatment
gtaatctcaatcgtatcgtccacctcaacaaaccttcgtccacgcttcgactcctgcaggagtgagggagagagtgatggagaggtgcgggagctgggactgcgacgcggcggcagcgcagaaggcggtaccggcgccgttcctgaccaagacgtaccagctggtggacgacccggccacggaccacatcgtctcctggggggacgaccgggtctccaccttcgtggtctggcgcccgccggagttcgcgcgcgacatcctccccaactacttcaagcacaacaacttctcctccttcgttcgacagctaaacacctacgggttccggaaggtcgtcccggagcggtgggagttcgggaacgagttcttccggaagggggagaagcagctgctgtgcgagatccaccggcggaagacgtcgacgtccgcggctccgccgtcgcctccgccattcttcggcggcgcctcacttcccgctcttccacccggacgccccgcaccaccaccaccaccaccagttcgtggggggaggagacgacggggctgtggcggccgcgcacgtcggcggcgtcggcgtcgccctcgcgttcccgcacccgcattgttggagggagccgccgcantccgccgcgccggtagccacgcggctgctagccctgggcgcggctcctccggcgccgtcgtccccgctgccggccgccgatgccggcggaggcgggcgcgcggccgtgctggtggaggagaacgagcggctgcggcgcagcaacgcggcgctgctgcaggagctggcgcacatgcgcaagctgtacaacgacatcatctacttcgtgcagaaccacgtgcgccccgcggcgcccagccctgccgcggccgcgttcctgcagggcctcggcctgcaggcgcgcaagaagcccgccgcggggccgctcaaccactccggtgggagcaccacgtccagcagctcgctcaccatcgcggaggaggagccctcgcccccgcccccgccgcagcaggccgacaagagcgccggaagcagcggcactgcgcggtctgccgccgaccgcgcgccgcccaccatgctcttcggagtgcacctcagcgccgcgcgaggcagcaagaggccggcttccccggaggaagaagacgaccagtcgcccacgtcgcctgctgggaagccacggctggcgctggagtgcgccggcttgagcctggccgtcgcggtgccctccgccggcgcctcgtcccctgctagcactagctagctaagcctcactcaccttgcgcgcaacctgacgcgcgtttgcatgctgctgcatgcaaacgcaacggcgggcgtggccgttttgttgttctagctctagtttgatcgacgtgttccatttgaaccggtagatccagatgggttctctc

SEQ ID NO: 6657 - protein, 391 aa, Zea mays subsp. mays
  peptide (1)..(391): Ceres Seq. ID no. 12405519
  misc_feature (19)..(143): Pfam Name: HSF-type DNA-binding Pfam Description: HSF-type DNA-binding
  misc_feature (16)..(143): Homolog of NCBI NO: 15220101 NR Description: heat shock transcription factor, putative; id: At1g46264.1 [Arabidopsis thaliana] >gi|25296103|pir||C96511
  misc_feature (12)..(141): Homolog of NCBI NO: 33146640 NR Description: putative heat shock transcription factor HSF5
  misc_feature (183)..(183): Xaa is any aa, unknown or other
MERCGSWDCDAAAAQKAVPAPFLTKTYQLVDDPATDHIVSWGDDRVSTFVVWRPPEFARDILPNYFKHNNFSSFVRQLNTYGFRKVVPERWEFGNEFFRKGEKQLLCEIHRRKTSTSAAPPSPPPFFGGASLPALPPGRPAPPPPPPVRGGRRRRGCGGRARRRRRRRPRVPAPALLEGAAAXRRAGSHAAASPGRGSSGAVVPAAGRRCRRRRARGRAGGGERAAAAQQRGAAAGAGAHAQAVQRHHLLRAEPRAPRGAQPCRGRVPAGPRPAGAQEARRGAAQPLRWEHHVQQLAHHRGGGALAPAPAAAGRQERRKQRHCAVCRRPRAAHHALRSAPQRRARQQEAGFPGGRRRPVAHVACWEATAGAGVRRLEPGRRGALRRRLVPC

SEQ ID NO: 6658 - protein, 212 aa, Zea mays subsp. mays
  peptide (1)..(212): Ceres Seq. ID no. 12405520
  misc_feature (67)..(212): Homolog of NCBI NO: 25143299 NR Description: pre-mRNA splicing SR protein related RSR-1 (68.2
  misc_feature (36)..(212): Homolog of NCBI NO: 25143299 NR Description: pre-mRNA splicing SR protein related RSR-1 (68.2
  misc_feature (208)..(208): Xaa is any aa, unknown or other
VISIVSSTSTNLRPRFDSCRSEGESDGEVRELGLRRGGSAEGGTGAVPDQDVPAGGRPGHGPHRLLGGRPGLHLRGLAPAGVRARHPPQLLQAQQLLLLRSTAKHLRVPEGRPGAVGVRERVLPEGGEAAAVRDPPAEDVDVRGSAVASAILRRRLTSRSSTRTPRTTTTTTSSWGEETTGLWRPRTSAASASPSRSRTRIVGGSRRXPPRR

SEQ ID NO: 6659 - DNA, 2035 bp, Zea mays subsp. mays
  misc_feature (1)..(2035): Ceres Seq. ID no. 12405514
  misc_feature: MA Experiment ID: 108523 Result: Up-regulated in Transcription
  misc_feature: MA Experiment 108523 PARAMETER Experiment Name: Zm_42deg_Heat_P Parameter: Age (day) Value: 8
  misc_feature: MA Experiment 108523 PARAMETER Experiment Name: Zm_42deg_Heat_P Parameter: Organism Value: Zea mays
  misc_feature: MA Experiment 108523 PARAMETER Experiment Name: Zm_42deg_Heat_P Parameter: Plant Line Value: 35A19
  misc_feature: MA Experiment 108523 PARAMETER Experiment Name: Zm_42deg_Heat_P Parameter: Temperature (deg C) Value: 42 vs. 22
  misc_feature: MA Experiment 108523 PARAMETER Experiment Name: Zm_42deg_Heat_P Parameter: Timepoint (hr) Value: 6
  misc_feature: MA Experiment 108523 PARAMETER Experiment Name: Zm_42deg_Heat_P Parameter: Tissue Value: Aerial
  misc_feature: MA Experiment ID: 108535 Result: Up-regulated in Transcription
  misc_feature: MA Experiment 108535 PARAMETER Experiment Name: Zm_Meristem_P Parameter: Age (day) Value: 8
  misc_feature: MA Experiment 108535 PARAMETER Experiment Name: Zm_Meristem_P Parameter: Organism Value: Zea mays
  misc_feature: MA Experiment 108535 PARAMETER Experiment Name: Zm_Meristem_P Parameter: Plant Line Value: 35A19
  misc_feature: MA Experiment 108535 PARAMETER Experiment Name: Zm_Meristem_P Parameter: Tissue Value: Root Meristem vs. Above Root Meristem
  misc_feature: MA Experiment ID: 108544 Result: Down-regulated in Transcription
  misc_feature: MA Experiment ID: 20000480 Result: Up-regulated in Transcription
  misc_feature: MA Experiment 20000480 PARAMETER Experiment Name: Zm_Drought_P Parameter: Age (day) Value: 11
  misc_feature: MA Experiment 20000480 PARAMETER Experiment Name: Zm_Drought_P Parameter: Organism Value: Zea mays
  misc_feature: MA Experiment 20000480 PARAMETER Experiment Name: Zm_Drought_P Parameter: Plant Line Value: 35A19
  misc_feature: MA Experiment 20000480 PARAMETER Experiment Name: Zm_Drought_P Parameter: Timepoint (hr) Value: 72
  misc_feature: MA Experiment 20000480 PARAMETER Experiment Name: Zm_Drought_P Parameter: Tissue Value: Aerial
  misc_feature: MA Experiment 20000480 PARAMETER Experiment Name: Zm_Drought_P Parameter: Treatment Value: Drought vs. No Drought
  misc_feature: MA Experiment ID: 20000492 Result: Up-regulated in Transcription
  misc_feature: MA Experiment 20000492 PARAMETER Experiment Name: Zm_Hybrid_Seed_Dev_P Parameter: DAP Value: 12
  misc_feature: MA Experiment 20000492 PARAMETER Experiment Name: Zm_Hybrid_Seed_Dev_P Parameter: Organism Value: Zea mays
  misc_feature: MA Experiment 20000492 PARAMETER Experiment Name: Zm_Hybrid_Seed_Dev_P Parameter: Plant Line Value: 35A19
  misc_feature: MA Experiment 20000492 PARAMETER Experiment Name: Zm_Hybrid_Seed_Dev_P Parameter: Tissue Value: Fert Kernel vs. Unfert Floret
  misc_feature: MA Experiment ID: 20000535 Result: Up-regulated in Transcription
  misc_feature: MA Experiment 20000535 PARAMETER Experiment Name: Zm_Hybrid_Seed_Dev_P Parameter: DAP Value: 30 vs. 12
  misc_feature: MA Experiment 20000535 PARAMETER Experiment Name: Zm_Hybrid_Seed_Dev_P Parameter: Organism Value: Zea mays
  misc_feature: MA Experiment 20000535 PARAMETER Experiment Name: Zm_Hybrid_Seed_Dev_P Parameter: Plant Line Value: 35A19
  misc_feature: MA Experiment 20000535 PARAMETER Experiment Name: Zm_Hybrid_Seed_Dev_P Parameter: Tissue Value: Embryo vs. Unfert Floret
  misc_feature: MA Experiment ID: 20000626 Result: Up-regulated in Transcription
  misc_feature: MA Experiment 20000626 PARAMETER Experiment Name: Zm_Herbicide-Treatments_P Parameter: Timepoint (hr) Value: 12
  misc_feature: MA Experiment 20000626 PARAMETER Experiment Name: Zm_Herbicide-Treatments_P Parameter: Tissue Value: Aerial
  misc_feature: MA Experiment 20000626 PARAMETER Experiment Name: Zm_Herbicide-Treatments_P Parameter: Treatment Value: Roundup vs. No Treatment
actctctttcccaccgccttcttccactactcttcaccctcccctcctccccatcgcgaactcacaagagaaccaagtagacgagggagaaggagatggcgaagaagaaggagaaggcggtgaacgtgtcgggcaagccgcggcactcgaacgacgtcaaccgccccaatgacaagaagggcgcgggcggcggcgccggtggcgggagccggtccgcggctaccgtgcggcggctcaagatgtacaagacgcggcccaagagggaccgctcctggaaggtgctcaggaacgattttcagtctaaagagctccccaacacccgcatcgagcccgaccgccggtggttcggcaatactcgcgttgtgggccagccacagcttgaaatgttccgggaggaactccagagtcggctttccgacaacttcagtgtcatcctgaaagaacggaagctgccactatcgctcctgcaagatcatcaaaagcaagcgaaggcacatctgcttgaagttgaaccttttgagcatgcttttgggccaaagggcaagaggaaacgtccgaaactaactgctcttgactacgaatctttgctgaagagagctgatgattcccaagatgtgtttgagcaaaagtatgcttcatcaaagttgccaagggaggaagaagaagatggcttacgtgatctagtgaggcatacaatgtttgagaagggacagagcaaaagaatctggggtgaactatacaaagttattgactcttcggacgttgttgtgcaggtgttggacgccagggatccaatgggcactcgatgctaccatctagagagacatctaaaagagaactgcaagcacaaacacttggttttcttgctaaataagtgtgatctaatccctgcttgggctacaaaaggatggttaaggaccctttcgaaggactatcccaccctagcattccatgcaagcatcaacaagtcatttggcaaaggatctcttctgtcagtattgaggcaatttgctcgtttgaagaatgacaaacaagctatttctgtcgggtttgttgggtaccccaatgttgggaagtcatcaattattaacacactacggtcgaagagtgtctgcaaggttgctccaatacctggagagacaaaagtgtggcagtacatcactctcactaaaaagatatttttgattcattgtcccggtgttgtatatcaaaacaatgattcagaaactgatatagttctgaagggtgtggtccgggtgacaaatttggcggatgctgctgagcacattggtgaagttcttaggcgtgttaaaaaggagcatctccaaagagcgtacaaaattcaagattggtctgatgataacgattttcttgtccagctgtgcaggaccactggaaaacttctcaagggcggggagcctgatctgacaacagcagccaagatggtacttcatgactggcagaggggtaaaatccccttctttgtaccccctccgcagcaaagcgacggcggtgcatctgaaagtgctgaacaacctattgggattaccaaagaggacggagtaagcagcgacaggactgccgcagccatgaaagccattgcaggaataatctcgtcacagcagaacatgaatgtgccctgccataaggaaaacaatgcagacaatgaagacactgaaaatgcagataacgaagacattgagagttcagataacgaagacaatgatgacatcgagcctgcaggagcgatctgagtgatctttgggtacagatgtggattattagagttgatatgtcaaggctaatgaatttgtcagccccaggtgttgtgtagctacttgaccatatcactggcgtgccaggaaaaaaaggatcatgttgagttgcactttttgtaactatcgtacctgaatctttgtaatagggcaagaagagagttttgctaggtacctggttgtatcgggatgcttatctgtgctgtctactacagatacagttacatctattttacttaaatcaagtggaagttatctcc

SEQ ID NO: 6660 - protein, 552 aa, Zea mays subsp. mays
  peptide (1)..(552): Ceres Seq. ID no. 12405515
  misc_feature (210)..(466): Pfam Name: GTPase of unknown function Pfam Description: GTPase of unknown function
  misc_feature (4)..(547): Homolog of NCBI NO: 15219138 NR Description: putative GTP-binding protein; protein id:
  misc_feature (22)..(547): Homolog of NCBI NO: 27503448 NR Description: Similar to nucleolar GTPase [Xenopus laevis]
  misc_feature (1)..(467): Homolog of NCBI NO: 21704088 NR Description: similar to Autoantigen NGP-1 [Mus musculus]
  misc_feature (1)..(516): Homolog of NCBI NO: 7019419 NR Description: nucleolar GTPase [Homo sapiens]
  misc_feature (1)..(467): Homolog of NCBI NO: 26346398 NR Description: unnamed protein product [Mus musculus]
  misc_feature (1)..(350): Homolog of NCBI NO: 34870998 NR Description: similar to Autoantigen NGP-1 [Rattus norvegicus]
  misc_feature (350)..(487): Homolog of NCBI NO: 34870998 NR Description: similar to Autoantigen NGP-1 [Rattus norvegicus]
  misc_feature (1)..(516): Homolog of NCBI NO: 12652715 NR Description: nucleolar GTPase [Homo sapiens]
  misc_feature (18)..(467): Homolog of NCBI NO: 28278918 NR Description: Similar to nucleolar GTPase [Danio rerio]
  misc_feature (18)..(467): Homolog of NCBI NO: 33604045 NR Description: Unknown (protein for MGC:65800) [Danio rerio]
MAKKKEKAVNVSGKPRHSNDVNRPNDKKGAGGGAGGGSRSAATVRRLKMYKTRPKRDRSWKVLRNDFQSKELPNTRIEPDRRWFGNTRVVGQPQLEMFREELQSRLSDNFSVILKERKLPLSLLQDHQKQAKAHLLEVEPFEHAFGPKGKRKRPKLTALDYESLLKRADDSQDVFEQKYASSKLPREEEEDGLRDLVRHTMFEKGQSKRIWGELYKVIDSSDVVVQVLDARDPMGTRCYHLERHLKENCKHKHLVFLLNKCDLIPAWATKGWLRTLSKDYPTLAFHASINKSFGKGSLLSVLRQFARLKNDKQAISVGFVGYPNVGKSSIINTLRSKSVCKVAPIPGETKVWQYITLTKKIFLIHCPGVVYQNNDSETDIVLKGVVRVTNLADAAEHIGEVLRRVKKEHLQRAYKIQDWSDDNDFLVQLCRTTGKLLKGGEPDLTTAAKMVLHDWQRGKIPFFVPPPQQSDGGASESAEQPIGITKEDGVSSDRTAAAMKAIAGIISSQQNMNVPCHKENNADNEDTENADNEDIESSDNEDNDDIEPAGAI

SEQ ID NO: 6661 - protein, 504 aa, Zea mays subsp. mays
  peptide (1)..(504): Ceres Seq. ID no. 12405516
  misc_feature (162)..(418): Pfam Name: GTPase of unknown function Pfam Description: GTPase of unknown function
  misc_feature (1)..(499): Homolog of NCBI NO: 15219138 NR Description: putative GTP-binding protein; protein id:
  misc_feature (1)..(499): Homolog of NCBI NO: 27503448 NR Description: Similar to nucleolar GTPase [Xenopus laevis]
  misc_feature (1)..(419): Homolog of NCBI NO: 21704088 NR Description: similar to Autoantigen NGP-1 [Mus musculus]
  misc_feature (1)..(468): Homolog of NCBI NO: 7019419 NR Description: nucleolar GTPase [Homo sapiens]
  misc_feature (1)..(419): Homolog of NCBI NO: 26346398 NR Description: unnamed protein product [Mus musculus]
  misc_feature (1)..(302): Homolog of NCBI NO: 34870998 NR Description: similar to Autoantigen NGP-1 [Rattus norvegicus]
  misc_feature (302)..(439): Homolog of NCBI NO: 34870998 NR Description: similar to Autoantigen NGP-1 [Rattus norvegicus]
  misc_feature (1)..(468): Homolog of NCBI NO: 12652715 NR Description: nucleolar GTPase [Homo sapiens]
  misc_feature (1)..(419): Homolog of NCBI NO: 28278918 NR Description: Similar to nucleolar GTPase [Danio rerio]
  misc_feature (1)..(419): Homolog of NCBI NO: 33604045 NR Description: Unknown (protein for MGC:65800) [Danio rerio]
MYKTRPKRDRSWKVLRNDFQSKELPNTRIEPDRRWFGNTRVVGQPQLEMFREELQSRLSDNFSVILKERKLPLSLLQDHQKQAKAHLLEVEPFEHAFGPKGKRKRPKLTALDYESLLKRADDSQDVFEQKYASSKLPREEEEDGLRDLVRHTMFEKGQSKRIWGELYKVIDSSDVVVQVLDARDPMGTRCYHLERHLKENCKHKHLVFLLNKCDLIPAWATKGWLRTLSKDYPTLAFHASINKSFGKGSLLSVLRQFARLKNDKQAISVGFVGYPNVGKSSIINTLRSKSVCKVAPIPGETKVWQYITLTKKIFLIHCPGVVYQNNDSETDIVLKGVVRVTNLADAAEHIGEVLRRVKKEHLQRAYKIQDWSDDNDFLVQLCRTTGKLLKGGEPDLTTAAKMVLHDWQRGKIPFFVPPPQQSDGGASESAEQPIGITKEDGVSSDRTAAAMKAIAGIISSQQNMNVPCHKENNADNEDTENADNEDIESSDNEDNDDIEPAGAI

SEQ ID NO: 6662 - protein, 456 aa, Zea mays subsp. mays
  peptide (1)..(456): Ceres Seq. ID no. 12405517
  misc_feature (114)..(370): Pfam Name: GTPase of unknown function Pfam Description: GTPase of unknown function
  misc_feature (1)..(451): Homolog of NCBI NO: 15219138 NR Description: putative GTP-binding protein; protein id:
  misc_feature (1)..(451): Homolog of NCBI NO: 27503448 NR Description: Similar to nucleolar GTPase [Xenopus laevis]
  misc_feature (1)..(371): Homolog of NCBI NO: 21704088 NR Description: similar to Autoantigen NGP-1 [Mus musculus]
  misc_feature (1)..(420): Homolog of NCBI NO: 7019419 NR Description: nucleolar GTPase [Homo sapiens]
  misc_feature (1)..(371): Homolog of NCBI NO: 26346398 NR Description: unnamed protein product [Mus musculus]
  misc_feature (1)..(254): Homolog of NCBI NO: 34870998 NR Description: similar to Autoantigen NGP-1 [Rattus norvegicus]
  misc_feature (254)..(391): Homolog of NCBI NO: 34870998 NR Description: similar to Autoantigen NGP-1 [Rattus norvegicus]
  misc_feature (1)..(420): Homolog of NCBI NO: 12652715 NR Description: nucleolar GTPase [Homo sapiens]
  misc_feature (1)..(371): Homolog of NCBI NO: 28278918 NR Description: Similar to nucleolar GTPase [Danio rerio]
  misc_feature (1)..(371): Homolog of NCBI NO: 33604045 NR Description: Unknown (protein for MGC:65800) [Danio rerio]
MFREELQSRLSDNFSVILKERKLPLSLLQDHQKQAKAHLLEVEPFEHAFGPKGKRKRPKLTALDYESLLKRADDSQDVFEQKYASSKLPREEEEDGLRDLVRHTMFEKGQSKRIWGELYKVIDSSDVVVQVLDARDPMGTRCYHLERHLKENCKHKHLVFLLNKCDLIPAWATKGWLRTLSKDYPTLAFHASINKSFGKGSLLSVLRQFARLKNDKQAISVGFVGYPNVGKSSIINTLRSKSVCKVAPIPGETKVWQYITLTKKIFLIHCPGVVYQNNDSETDIVLKGVVRVTNLADAAEHIGEVLRRVKKEHLQRAYKIQDWSDDNDFLVQLCRTTGKLLKGGEPDLTTAAKMVLHDWQRGKIPFFVPPPQQSDGGASESAEQPIGITKEDGVSSDRTAAAMKAIAGIISSQQNMNVPCHKENNADNEDTENADNEDIESSDNEDNDDIEPAGAI

SEQ ID NO: 6663 - DNA, 1025 bp, Zea mays subsp. mays
  misc_feature (1)..(1025): Ceres Seq. ID no. 12356370
  misc_feature: MA Experiment ID: 108536 Result: Up-regulated in Transcription
  misc_feature: MA Experiment 108536 PARAMETER Experiment Name: Zm_Meristem_P Parameter: Age (day) Value: 8
  misc_feature: MA Experiment 108536 PARAMETER Experiment Name: Zm_Meristem_P Parameter: Organism Value: Zea mays
  misc_feature: MA Experiment 108536 PARAMETER Experiment Name: Zm_Meristem_P Parameter: Plant Line Value: 35A19
  misc_feature: MA Experiment 108536 PARAMETER Experiment Name: Zm_Meristem_P Parameter: Tissue Value: Shoot Meristem vs. Above Shoot Meristem
  misc_feature: MA Experiment ID: 20000480 Result: Up-regulated in Transcription
  misc_feature: MA Experiment 20000480 PARAMETER Experiment Name: Zm_Drought_P Parameter: Age (day) Value: 11
  misc_feature: MA Experiment 20000480 PARAMETER Experiment Name: Zm_Drought_P Parameter: Organism Value: Zea mays
  misc_feature: MA Experiment 20000480 PARAMETER Experiment Name: Zm_Drought_P Parameter: Plant Line Value: 35A19
  misc_feature: MA Experiment 20000480 PARAMETER Experiment Name: Zm_Drought_P Parameter: Timepoint (hr) Value: 72
  misc_feature: MA Experiment 20000480 PARAMETER Experiment Name: Zm_Drought_P Parameter: Tissue Value: Aerial
  misc_feature: MA Experiment 20000480 PARAMETER Experiment Name: Zm_Drought_P Parameter: Treatment Value: Drought vs. No Drought
  misc_feature: MA Experiment ID: 20000535 Result: Up-regulated in Transcription
  misc_feature: MA Experiment 20000535 PARAMETER Experiment Name: Zm_Hybrid_Seed_Dev_P Parameter: DAP Value: 30 vs. 12
  misc_feature: MA Experiment 20000535 PARAMETER Experiment Name: Zm_Hybrid_Seed_Dev_P Parameter: Organism Value: Zea mays
  misc_feature: MA Experiment 20000535 PARAMETER Experiment Name: Zm_Hybrid_Seed_Dev_P Parameter: Plant Line Value: 35A19
  misc_feature: MA Experiment 20000535 PARAMETER Experiment Name: Zm_Hybrid_Seed_Dev_P Parameter: Tissue Value: Embryo vs. Unfert Floret
ccaatctgtgtttgtctttgcttgccccccttctcccccctcatctccccccttttcttgttcctgtgcctgtgcattggctggcgatggggtccacttctccttcaggcctggagctcaccatggctgtcccgggcctcagctcctcctctggctcagaggggtttggatgcaacaacaacaacgggagcgggaacgggaacaacatgagggacctggacatgaaccagccggcgagcggcggcgaggaggaggagttcccaatggggagcgtggaggaggaggaggacgagcgcggcggcgccggcgggccgcaccgcgccaagaagctccggctgtccaaggagcagtcccgcctcctggaggagagcttccgcctcaaccacaccctcacaccgaagcaaaaggaggccttggctgtcaagctcaagctgcggcccaggcaggtggaggtctggttccagaaccgcagggctaggacgaagcttaagcagacggagctggagtgcgagtacctgaagcgctgcttcggctcgctgaccgaggagaaccggcggctgcagcgggaggtggaggagctgcgcgcgatgcgggtggccccgcccaccgtgctctccccgcacacccggcagccgctcccggcgtccgcgctcaccatgtgcccgcgctgcgagcgcatcaccgccgcaacggccgcgcgcaccccacgcccggcgcccgccgcgagccccttccacccgcgccgcccgtccgcggcgttttagcctagtctcccgctgcatgcggttccggccggtagggggaaggagcggaaagtttggttgttagggggggggggcagagtgtttgtgctgtgtaaatttgatgatggatggagaaaaccagcgcgggcccgtgtagctttttaggtgtaggtgtaggtgtagggtttggaccttggagtcccttcgcgtcaacgtccccgtccccgtgttccgttccatgccgtgcatggcttgatggatcaaaagtttgtactagcttcc

SEQ ID NO: 6664 - protein, 253 aa, Zea mays subsp. mays
  peptide (1)..(253): Ceres Seq. ID no. 12356371
  misc_feature (106)..(162): Pfam Name: Homeobox domain Pfam Description: Homeobox domain
  misc_feature (29)..(253): Homolog of NCBI NO: 5006851 NR Description: homeodomain leucine zipper protein [Oryza sativa]
  misc_feature (35)..(253): Homolog of NCBI NO: 34911664 NR Description: putative homeodomain-leucine zipper [Oryza sativa
  misc_feature (27)..(247): Homolog of NCBI NO: 30677923 NR Description: homeodomain-leucine zipper protein ATHB-17
  misc_feature (92)..(247): Homolog of NCBI NO: 25386214 NR Description: probable homeodomain transcription factor - Arabidopsis thaliana >gi|3785973|gb|AAC67320.1| putative
  misc_feature (31)..(229): Homolog of NCBI NO: 30698765 NR Description: homeodomain-leucine zipper protein, putative thaliana] >gi|26451347|dbj|BAC42774.1| unknown protein thaliana] >gi|28973379|gb|AAO64014.1| putative homeodomain
  misc_feature (59)..(250): Homolog of NCBI NO: 15225368 NR Description: homeobox-leucine zipper protein, Athb-4; protein
  misc_feature (93)..(252): Homolog of NCBI NO: 7415620 NR Description: homeobox protein PpHB4 [Physcomitrella patens]
  misc_feature (58)..(251): Homolog of NCBI NO: 18034437 NR Description: homeodomain leucine zipper protein CPHB-3
  misc_feature (88)..(252): Homolog of NCBI NO: 3868833 NR Description: CRHB3 [Ceratopteris richardii]
  misc_feature (36)..(253): Homolog of NCBI NO: 15232311 NR Description: homeobox-leucine zipper protein HAT3; protein id:
NLCLSLLAPLLPPHLPPFLVPVPVHWLAMGSTSPSGLELTMAVPGLSSSSGSEGFGCNNNNGSGNGNNMRDLDMNQPASGGEEEEFPMGSVEEEEDERGGAGGPHRAKKLRLSKEQSRLLEESFRLNHTLTPKQKEALAVKLKLRPRQVEVWFQNRRARTKLKQTELECEYLKRCFGSLTEENRRLQREVEELRAMRVAPPTVLSPHTRQPLPASALTMCPRCERITAATAARTPRPAPAASPFHPRRPSAAF

SEQ ID NO: 6665 - protein, 225 aa, Zea mays subsp. mays
  peptide (1)..(225): Ceres Seq. ID no. 12356372
  misc_feature (78)..(134): Pfam Name: Homeobox domain Pfam Description: Homeobox domain
  misc_feature (1)..(225): Homolog of NCBI NO: 5006851 NR Description: homeodomain leucine zipper protein [Oryza sativa]
  misc_feature (7)..(225): Homolog of NCBI NO: 34911664 NR Description: putative homeodomain-leucine zipper [Oryza sativa
  misc_feature (1)..(219): Homolog of NCBI NO: 30677923 NR Description: homeodomain-leucine zipper protein ATHB-17
  misc_feature (64)..(219): Homolog of NCBI NO: 25386214 NR Description: probable homeodomain transcription factor - Arabidopsis thaliana >gi|3785973|gb|AAC67320.1| putative
  misc_feature (3)..(201): Homolog of NCBI NO: 30698765 NR Description: homeodomain-leucine zipper protein, putative thaliana] >gi|26451347|dbj|BAC42774.1| unknown protein thaliana] >gi|28973379|gb|AAO64014.1| putative homeodomain
  misc_feature (31)..(222): Homolog of NCBI NO: 15225368 NR Description: homeobox-leucine zipper protein, Athb-4; protein
  misc_feature (65)..(224): Homolog of NCBI NO: 7415620 NR Description: homeobox protein PpHB4 [Physcomitrella patens]
  misc_feature (30)..(223): Homolog of NCBI NO: 18034437 NR Description: homeodomain leucine zipper protein CPHB-3
  misc_feature (60)..(224): Homolog of NCBI NO: 3868833 NR Description: CRHB3 [Ceratopteris richardii]
  misc_feature (8)..(225): Homolog of NCBI NO: 15232311 NR Description: homeobox-leucine zipper protein HAT3; protein id:
MGSTSPSGLELTMAVPGLSSSSGSEGFGCNNNNGSGNGNNMRDLDMNQPASGGEEEEFPMGSVEEEEDERGGAGGPHRAKKLRLSKEQSRLLEESFRLNHTLTPKQKEALAVKLKLRPRQVEVWFQNRRARTKLKQTELECEYLKRCFGSLTEENRRLQREVEELRAMRVAPPTVLSPHTRQPLPASALTMCPRCERITAATAARTPRPAPAASPFHPRRPSAAF

SEQ ID NO: 6666 - protein, 213 aa, Zea mays subsp. mays
  peptide (1)..(213): Ceres Seq. ID no. 12356373
  misc_feature (66)..(122): Pfam Name: Homeobox domain Pfam Description: Homeobox domain
  misc_feature (1)..(213): Homolog of NCBI NO: 5006851 NR Description: homeodomain leucine zipper protein [Oryza sativa]
  misc_feature (1)..(213): Homolog of NCBI NO: 34911664 NR Description: putative homeodomain-leucine zipper [Oryza sativa
  misc_feature (1)..(207): Homolog of NCBI NO: 30677923 NR Description: homeodomain-leucine zipper protein ATHB-17
  misc_feature (52)..(207): Homolog of NCBI NO: 25386214 NR Description: probable homeodomain transcription factor - Arabidopsis thaliana >gi|3785973|gb|AAC67320.1| putative
  misc_feature (1)..(189): Homolog of NCBI NO: 30698765 NR Description: homeodomain-leucine zipper protein, putative thaliana] >gi|26451347|dbj|BAC42774.1| unknown protein thaliana] >gi|28973379|gb|AAO64014.1| putative homeodomain
  misc_feature (19)..(210): Homolog of NCBI NO: 15225368 NR Description: homeobox-leucine zipper protein, Athb-4; protein
  misc_feature (53)..(212): Homolog of NCBI NO: 7415620 NR Description: homeobox protein PpHB4 [Physcomitrella patens]
  misc_feature (18)..(211): Homolog of NCBI NO: 18034437 NR Description: homeodomain leucine zipper protein CPHB-3
  misc_feature (48)..(212): Homolog of NCBI NO: 3868833 NR Description: CRHB3 [Ceratopteris richardii]
  misc_feature (1)..(213): Homolog of NCBI NO: 15232311 NR Description: homeobox-leucine zipper protein HAT3; protein id:
MAVPGLSSSSGSEGFGCNNNNGSGNGNNMRDLDMNQPASGGEEEEFPMGSVEEEEDERGGAGGPHRAKKLRLSKEQSRLLEESFRLNHTLTPKQKEALAVKLKLRPRQVEVWFQNRRARTKLKQTELECEYLKRCFGSLTEENRRLQREVEELRAMRVAPPTVLSPHTRQPLPASALTMCPRCERITAATAARTPRPAPAASPFHPRRPSAAF

SEQ ID NO: 6667 - DNA, 688 bp, Zea mays subsp. mays
  misc_feature (1)..(688): Ceres Seq. ID no. 12383120
  misc_feature: MA Experiment ID: 108504 Result: Down-regulated in Transcription
  misc_feature: MA Experiment 108504 PARAMETER Experiment Name: Zm_Drought_P Parameter: Age (day) Value: 8
  misc_feature: MA Experiment 108504 PARAMETER Experiment Name: Zm_Drought_P Parameter: Organism Value: Zea mays
  misc_feature: MA Experiment 108504 PARAMETER Experiment Name: Zm_Drought_P Parameter: Plant Line Value: 35A19
  misc_feature: MA Experiment 108504 PARAMETER Experiment Name: Zm_Drought_P Parameter: Timepoint (hr) Value: 12
  misc_feature: MA Experiment 108504 PARAMETER Experiment Name: Zm_Drought_P Parameter: Tissue Value: Aerial
  misc_feature: MA Experiment 108504 PARAMETER Experiment Name: Zm_Drought_P Parameter: Treatment Value: Drought vs. No Drought
  misc_feature: MA Experiment ID: 108515 Result: Up-regulated in Transcription
  misc_feature: MA Experiment 108515 PARAMETER Experiment Name: Zm_2mM_SA_P Parameter: Age (day) Value: 8
  misc_feature: MA Experiment 108515 PARAMETER Experiment Name: Zm_2mM_SA_P Parameter: Organism Value: Zea mays
  misc_feature: MA Experiment 108515 PARAMETER Experiment Name: Zm_2mM_SA_P Parameter: Plant Line Value: 35A19
  misc_feature: MA Experiment 108515 PARAMETER Experiment Name: Zm_2mM_SA_P Parameter: Timepoint (hr) Value: 12
  misc_feature: MA Experiment 108515 PARAMETER Experiment Name: Zm_2mM_SA_P Parameter: Tissue Value: Aerial
  misc_feature: MA Experiment 108515 PARAMETER Experiment Name: Zm_2mM_SA_P Parameter: Treatment Value: 2mM SA vs. No Treatment
  misc_feature: MA Experiment ID: 108522 Result: Down-regulated in Transcription
  misc_feature: MA Experiment 108522 PARAMETER Experiment Name: Zm_42deg_Heat_P Parameter: Age (day) Value: 8
  misc_feature: MA Experiment 108522 PARAMETER Experiment Name: Zm_42deg_Heat_P Parameter: Organism Value: Zea mays
  misc_feature: MA Experiment 108522 PARAMETER Experiment Name: Zm_42deg_Heat_P Parameter: Plant Line Value: 35A19
  misc_feature: MA Experiment 108522 PARAMETER Experiment Name: Zm_42deg_Heat_P Parameter: Temperature (deg C) Value: 42 vs. 22
  misc_feature: MA Experiment 108522 PARAMETER Experiment Name: Zm_42deg_Heat_P Parameter: Timepoint (hr) Value: 1
  misc_feature: MA Experiment 108522 PARAMETER Experiment Name: Zm_42deg_Heat_P Parameter: Tissue Value: Aerial
  misc_feature: MA Experiment ID: 108528 Result: Down-regulated in Transcription
  misc_feature: MA Experiment 108528 PARAMETER Experiment Name: Zm_Imbibed_Seeds_P Parameter: Age (day) Value: 5 vs. 2
  misc_feature: MA Experiment 108528 PARAMETER Experiment Name: Zm_Imbibed_Seeds_P Parameter: Organism Value: Zea mays
  misc_feature: MA Experiment 108528 PARAMETER Experiment Name: Zm_Imbibed_Seeds_P Parameter: Plant Line Value: 35A19
  misc_feature: MA Experiment 108528 PARAMETER Experiment Name: Zm_Imbibed_Seeds_P Parameter: Tissue Value: Aerial vs. Embryo
  misc_feature: MA Experiment ID: 108530 Result: Down-regulated in Transcription
  misc_feature: MA Experiment 108530 PARAMETER Experiment Name: Zm_Imbibed_Seeds_P Parameter: Age (day) Value: 6 vs. 2
  misc_feature: MA Experiment 108530 PARAMETER Experiment Name: Zm_Imbibed_Seeds_P Parameter: Organism Value: Zea mays
  misc_feature: MA Experiment 108530 PARAMETER Experiment Name: Zm_Imbibed_Seeds_P Parameter: Plant Line Value: 35A19
  misc_feature: MA Experiment 108530 PARAMETER Experiment Name: Zm_Imbibed_Seeds_P Parameter: Tissue Value: Aerial vs. Embryo
  misc_feature: MA Experiment ID: 108535 Result: Up-regulated in Transcription
  misc_feature: MA Experiment 108535 PARAMETER Experiment Name: Zm_Meristem_P Parameter: Age (day) Value: 8
  misc_feature: MA Experiment 108535 PARAMETER Experiment Name: Zm_Meristem_P Parameter: Organism Value: Zea mays
  misc_feature: MA Experiment 108535 PARAMETER Experiment Name: Zm_Meristem_P Parameter: Plant Line Value: 35A19
  misc_feature: MA Experiment 108535 PARAMETER Experiment Name: Zm_Meristem_P Parameter: Tissue Value: Root Meristem vs. Above Root Meristem
  misc_feature: MA Experiment ID: 20000108 Result: Up-regulated in Transcription
  misc_feature: MA Experiment 20000108 PARAMETER Experiment Name: Zm_Root-Tips_P Parameter: Age (day) Value: 12
  misc_feature: MA Experiment 20000108 PARAMETER Experiment Name: Zm_Root-Tips_P Parameter: Organism Value: Zea mays
  misc_feature: MA Experiment 20000108 PARAMETER Experiment Name: Zm_Root-Tips_P Parameter: Tissue Value: Root tips vs. Root mid region    35
  misc_feature: MA Experiment 20000108 PARAMETER Experiment Name: Zm_Root-Tips_P Parameter: Tissue Value: Root tips vs. Root mid region   Sequence Listing-Misc Features (4)
  misc_feature: MA Experiment ID: 20000487 Result: Up-regulated in Transcription
  misc_feature: MA Experiment 20000487 PARAMETER Experiment Name: Zm_50mM_NH4NO3_L_to_H_P Parameter: Organism Value: Zea mays
  misc_feature: MA Experiment 20000487 PARAMETER Experiment Name: Zm_50mM_NH4NO3_L_to_H_P Parameter: Timepoint (hr) Value: 4
  misc_feature: MA Experiment 20000487 PARAMETER Experiment Name: Zm_50mM_NH4NO3_L_to_H_P Parameter: Tissue Value: Leaves
  misc_feature: MA Experiment 20000487 PARAMETER Experiment Name: Zm_50mM_NH4NO3_L_to_H_P Parameter: Treatment Value: 50mM NH4NO3 vs. 100mM Mannitol
  misc_feature: MA Experiment ID: 20000488 Result: Up-regulated in Transcription
  misc_feature: MA Experiment 20000488 PARAMETER Experiment Name: Zm_50mM_NH4NO3_L_to_H_P Parameter: Organism Value: Zea mays
  misc_feature: MA Experiment 20000488 PARAMETER Experiment Name: Zm_50mM_NH4NO3_L_to_H_P Parameter: Timepoint (hr) Value: 8
  misc_feature: MA Experiment 20000488 PARAMETER Experiment Name: Zm_50mM_NH4NO3_L_to_H_P Parameter: Tissue Value: Leaves
  misc_feature: MA Experiment 20000488 PARAMETER Experiment Name: Zm_50mM_NH4NO3_L_to_H_P Parameter: Treatment Value: 50mM NH4NO3 vs. 100mM Mannitol
  misc_feature: MA Experiment ID: 20000492 Result: Up-regulated in Transcription
  misc_feature: MA Experiment 20000492 PARAMETER Experiment Name: Zm_Hybrid_Seed_Dev_P Parameter: DAP Value: 12
  misc_feature: MA Experiment 20000492 PARAMETER Experiment Name: Zm_Hybrid_Seed_Dev_P Parameter: Organism Value: Zea mays
  misc_feature: MA Experiment 20000492 PARAMETER Experiment Name: Zm_Hybrid_Seed_Dev_P Parameter: Plant Line Value: 35A19
  misc_feature: MA Experiment 20000492 PARAMETER Experiment Name: Zm_Hybrid_Seed_Dev_P Parameter: Tissue Value: Fert Kernel vs. Unfert Floret
  misc_feature: MA Experiment ID: 20000626 Result: Up-regulated in Transcription
  misc_feature: MA Experiment 20000626 PARAMETER Experiment Name: Zm_Herbicide-Treatments_P Parameter: Timepoint (hr) Value: 12
  misc_feature: MA Experiment 20000626 PARAMETER Experiment Name: Zm_Herbicide-Treatments_P Parameter: Tissue Value: Aerial
  misc_feature: MA Experiment 20000626 PARAMETER Experiment Name: Zm_Herbicide-Treatments_P Parameter: Treatment Value: Roundup vs. No Treatment
  misc_feature: MA Experiment ID: 20001606 Result: Up-regulated in Transcription
  misc_feature: MA Experiment 20001606 PARAMETER Experiment Name: Zm_50ppm_KNO3_L-to-H_P Parameter: Age (day) Value: 19
  misc_feature: MA Experiment 20001606 PARAMETER Experiment Name: Zm_50ppm_KNO3_L-to-H_P Parameter: Organism Value: Zea mays
  misc_feature: MA Experiment 20001606 PARAMETER Experiment Name: Zm_50ppm_KNO3_L-to-H_P Parameter: Plant Line Value: 35A19
  misc_feature: MA Experiment 20001606 PARAMETER Experiment Name: Zm_50ppm_KNO3_L-to-H_P Parameter: Timepoint (hr) Value: 8
  misc_feature: MA Experiment 20001606 PARAMETER Experiment Name: Zm_50ppm_KNO3_L-to-H_P Parameter: Tissue Value: Shoots
  misc_feature: MA Experiment 20001606 PARAMETER Experiment Name: Zm_50ppm_KNO3_L-to-H_P Parameter: Treatment Value: 50ppm KNO3 vs. 50ppm KCl
  misc_feature: MA Experiment ID: 20001612 Result: Up-regulated in Transcription
  misc_feature: MA Experiment 20001612 PARAMETER Experiment Name: Zm_50ppm_KNO3_L-to-H_P Parameter: Age (day) Value: 19
  misc_feature: MA Experiment 20001612 PARAMETER Experiment Name: Zm_50ppm_KNO3_L-to-H_P Parameter: Organism Value: Zea mays
  misc_feature: MA Experiment 20001612 PARAMETER Experiment Name: Zm_50ppm_KNO3_L-to-H_P Parameter: Plant Line Value: 35A19
  misc_feature: MA Experiment 20001612 PARAMETER Experiment Name: Zm_50ppm_KNO3_L-to-H_P Parameter: Timepoint (hr) Value: 8
  misc_feature: MA Experiment 20001612 PARAMETER Experiment Name: Zm_50ppm_KNO3_L-to-H_P Parameter: Tissue Value: Roots
  misc_feature: MA Experiment 20001612 PARAMETER Experiment Name: Zm_50ppm_KNO3_L-to-H_P Parameter: Treatment Value: 50ppm KNO3 vs. 50ppm KCl
gtgtcaagcatgatattacggacaacctttctttaaagataaatgctcagttgacaagtgagccccactactcccaagggatgctgaattttgattataagggcaaagattttagatctcaggttcaattcggaaacaatggtttctatggagcaaactacatccagagtgtcagcaagaacctttccttgggaactgaagccttttggcttgggcagcaaaggaagtctggagtcggtgttgttgctcgctatgacacaaagaaaatggttgcgactgcacaaattgcaaccactggaatggtcgcgcttagttatgtacagaaagtttctgaaaaggtttcccttgcatctgatttcatgtacaatcaaatgacaaaggatgtaacagcaagctttggttatgattatatgctgagacagtgtcgattgagagggaaactggataccaatggcgtaatttcttctcttttggaggagcgattgactccaggtgtcactttccagttgtctgcagagctggaccactggaagaaagattacaaatttgggtttggtatggctctcggagagtaagacgatttgagcaaattctagacacatgtacaattagtggttggcattagtcgacagggattaaaacgattctactttatctttgcatttatttgtctcccagttattcgttt

SEQ ID NO: 6668 - protein, 190 aa, Zea mays subsp. mays
  peptide (1)..(190): Ceres Seq. ID no. 12383121
  misc_feature (1)..(183): Pfam Name: Eukaryotic porin Pfam Description: Eukaryotic porin
  misc_feature (29)..(188): Homolog of NCBI NO: 40738660 NR Description: hypothetical protein AN6510.2 [Aspergillus
  misc_feature (1)..(189): Homolog of NCBI NO: 15231008 NR Description: membrane import protein, putative; protein id: supported by cDNA: gi_15292982 [Arabidopsis thaliana] Probable mitochondrial import receptor subunit TOM40 homolog
  misc_feature (2)..(186): Homolog of NCBI NO: 15222963 NR Description: hypothetical protein; protein id: At1g50400.1
  misc_feature (13)..(186): Homolog of NCBI NO: 25405370 NR Description: hypothetical protein F14I3.2 [imported] -
  misc_feature (45)..(190): Homolog of NCBI NO: 34903264 NR Description: unnamed protein product [Oryza sativa (japonica group)] >gi|6539563|dbj|BAA88180.1| unnamed protein product
  misc_feature (13)..(93): Homolog of NCBI NO: 34903264 NR Description: unnamed protein product [Oryza sativa (japonica group)] >gi|6539563|dbj|BAA88180.1| unnamed protein product
  misc_feature (98)..(190): Homolog of NCBI NO: 2982293 NR Description: ISP42-like protein [Picea mariana]
  misc_feature (13)..(186): Homolog of NCBI NO: 13162531 NR Description: Hypothetical protein [Arabidopsis thaliana]
  misc_feature (16)..(189): Homolog of NCBI NO: 11994775 NR Description: membrane import protein-like [Arabidopsis
  misc_feature (5)..(186): Homolog of NCBI NO: 23612250 NR Description: mitochondrial import receptor subunit tom40 falciparum 3D7] >gi|23498491|emb|CAD50442.1| mitochondrial import
VKHDITDNLSLKINAQLTSEPHYSQGMLNFDYKGKDFRSQVQFGNNGFYGANYIQSVSKNLSLGTEAFWLGQQRKSGVGVVARYDTKKMVATAQIATTGMVALSYVQKVSEKVSLASDFMYNQMTKDVTASFGYDYMLRQCRLRGKLDTNGVISSLLEERLTPGVTFQLSAELDHWKKDYKFGFGMALGE

SEQ ID NO: 6669 - protein, 164 aa, Zea mays subsp. mays
  peptide (1)..(164): Ceres Seq. ID no. 12383122
  misc_feature (1)..(157): Pfam Name: Eukaryotic porin Pfam Description: Eukaryotic porin
  misc_feature (1)..(163): Homolog of NCBI NO: 15231008 NR Description: membrane import protein, putative; protein id: supported by cDNA: gi_15292982 [Arabidopsis thaliana] Probable mitochondrial import receptor subunit TOM40 homolog
  misc_feature (1)..(163): Homolog of NCBI NO: 11994775 NR Description: membrane import protein-like [Arabidopsis
  misc_feature (1)..(160): Homolog of NCBI NO: 15222963 NR Description: hypothetical protein; protein id: At1g50400.1
  misc_feature (1)..(160): Homolog of NCBI NO: 13162531 NR Description: Hypothetical protein [Arabidopsis thaliana]
  misc_feature (1)..(160): Homolog of NCBI NO: 25405370 NR Description: hypothetical protein F14I3.2 [imported] -
  misc_feature (72)..(164): Homolog of NCBI NO: 2982293 NR Description: ISP42-like protein [Picea mariana]
  misc_feature (19)..(164): Homolog of NCBI NO: 34903264 NR Description: unnamed protein product [Oryza sativa (japonica group)] >gi|6539563|dbj|BAA88180.1| unnamed protein product
  misc_feature (1)..(67): Homolog of NCBI NO: 34903264 NR Description: unnamed protein product [Oryza sativa (japonica group)] >gi|6539563|dbj|BAA88180.1| unnamed protein product
  misc_feature (3)..(162): Homolog of NCBI NO: 40738660 NR Description: hypothetical protein AN6510.2 [Aspergillus
  misc_feature (1)..(160): Homolog of NCBI NO: 23612250 NR Description: mitochondrial import receptor subunit tom40 falciparum 3D7] >gi|23498491|emb|CAD50442.1| mitochondrial import
MLNFDYKGKDFRSQVQFGNNGFYGANYIQSVSKNLSLGTEAFWLGQQRKSGVGVVARYDTKKMVATAQIATTGMVALSYVQKVSEKVSLASDFMYNQMTKDVTASFGYDYMLRQCRLRGKLDTNGVISSLLEERLTPGVTFQLSAELDHWKKDYKFGFGMALGE

SEQ ID NO: 6670 - protein, 102 aa, Zea mays subsp. mays
  peptide (1)..(102): Ceres Seq. ID no. 12383123
  misc_feature (1)..(95): Pfam Name: Eukaryotic porin Pfam Description: Eukaryotic porin
  misc_feature (1)..(101): Homolog of NCBI NO: 15231008 NR Description: membrane import protein, putative; protein id: supported by cDNA: gi_15292982 [Arabidopsis thaliana] Probable mitochondrial import receptor subunit TOM40 homolog
  misc_feature (1)..(101): Homolog of NCBI NO: 11994775 NR Description: membrane import protein-like [Arabidopsis
  misc_feature (1)..(98): Homolog of NCBI NO: 15222963 NR Description: hypothetical protein; protein id: At1g50400.1
  misc_feature (1)..(98): Homolog of NCBI NO: 13162531 NR Description: Hypothetical protein [Arabidopsis thaliana]
  misc_feature (1)..(98): Homolog of NCBI NO: 25405370 NR Description: hypothetical protein F14I3.2 [imported] -
  misc_feature (10)..(102): Homolog of NCBI NO: 2982293 NR Description: ISP42-like protein [Picea mariana]
  misc_feature (1)..(102): Homolog of NCBI NO: 34903264 NR Description: unnamed protein product [Oryza sativa (japonica group)] >gi|6539563|dbj|BAA88180.1| unnamed protein product
  misc_feature (1)..(100): Homolog of NCBI NO: 40738660 NR Description: hypothetical protein AN6510.2 [Aspergillus
  misc_feature (1)..(98): Homolog of NCBI NO: 23612250 NR Description: mitochondrial import receptor subunit tom40 falciparum 3D7] >gi|23498491|emb|CAD50442.1| mitochondrial import
  misc_feature (1)..(100): Homolog of NCBI NO: 19112353 NR Description: MITOCHONDRIAL IMPORT RECEPTOR SUBUNIT TOM40 pombe] >gi|2257552|dbj|BAA21445.1| MITOCHONDRIAL IMPORT RECEPTOR
MVATAQIATTGMVALSYVQKVSEKVSLASDFMYNQMTKDVTASFGYDYMLRQCRLRGKLDTNGVISSLLEERLTPGVTFQLSAELDHWKKDYKFGFGMALGE

SEQ ID NO: 6671 - DNA, 1761 bp, Zea mays subsp. mays
  misc_feature (1)..(1761): Ceres Seq. ID no. 12382163
  misc_feature: MA Experiment ID: 108515 Result: Down-regulated in Transcription
  misc_feature: MA Experiment 108515 PARAMETER Experiment Name: Zm_2mM_SA_P Parameter: Age (day) Value: 8
  misc_feature: MA Experiment 108515 PARAMETER Experiment Name: Zm_2mM_SA_P Parameter: Organism Value: Zea mays
  misc_feature: MA Experiment 108515 PARAMETER Experiment Name: Zm_2mM_SA_P Parameter: Plant Line Value: 35A19
  misc_feature: MA Experiment 108515 PARAMETER Experiment Name: Zm_2mM_SA_P Parameter: Timepoint (hr) Value: 12
  misc_feature: MA Experiment 108515 PARAMETER Experiment Name: Zm_2mM_SA_P Parameter: Tissue Value: Aerial
  misc_feature: MA Experiment 108515 PARAMETER Experiment Name: Zm_2mM_SA_P Parameter: Treatment Value: 2mM SA vs. No Treatment
  misc_feature: MA Experiment ID: 108522 Result: Down-regulated in Transcription
  misc_feature: MA Experiment 108522 PARAMETER Experiment Name: Zm_42deg_Heat_P Parameter: Age (day) Value: 8
  misc_feature: MA Experiment 108522 PARAMETER Experiment Name: Zm_42deg_Heat_P Parameter: Organism Value: Zea mays
  misc_feature: MA Experiment 108522 PARAMETER Experiment Name: Zm_42deg_Heat_P Parameter: Plant Line Value: 35A19
  misc_feature: MA Experiment 108522 PARAMETER Experiment Name: Zm_42deg_Heat_P Parameter: Temperature (deg C) Value: 42 vs. 22
  misc_feature: MA Experiment 108522 PARAMETER Experiment Name: Zm_42deg_Heat_P Parameter: Timepoint (hr) Value: 1
  misc_feature: MA Experiment 108522 PARAMETER Experiment Name: Zm_42deg_Heat_P Parameter: Tissue Value: Aerial
  misc_feature: MA Experiment ID: 108523 Result: Down-regulated in Transcription
  misc_feature: MA Experiment 108523 PARAMETER Experiment Name: Zm_42deg_Heat_P Parameter: Age (day) Value: 8
  misc_feature: MA Experiment 108523 PARAMETER Experiment Name: Zm_42deg_Heat_P Parameter: Organism Value: Zea mays
  misc_feature: MA Experiment 108523 PARAMETER Experiment Name: Zm_42deg_Heat_P Parameter: Plant Line Value: 35A19
  misc_feature: MA Experiment 108523 PARAMETER Experiment Name: Zm_42deg_Heat_P Parameter: Temperature (deg C) Value: 42 vs. 22
  misc_feature: MA Experiment 108523 PARAMETER Experiment Name: Zm_42deg_Heat_P Parameter: Timepoint (hr) Value: 6
  misc_feature: MA Experiment 108523 PARAMETER Experiment Name: Zm_42deg_Heat_P Parameter: Tissue Value: Aerial
  misc_feature: MA Experiment ID: 108526 Result: Down-regulated in Transcription
  misc_feature: MA Experiment 108526 PARAMETER Experiment Name: Zm_5mM_NO_P Parameter: Age (day) Value: 8
  misc_feature: MA Experiment 108526 PARAMETER Experiment Name: Zm_5mM_NO_P Parameter: Organism Value: Zea mays
  misc_feature: MA Experiment 108526 PARAMETER Experiment Name: Zm_5mM_NO_P Parameter: Plant Line Value: 35A19
  misc_feature: MA Experiment 108526 PARAMETER Experiment Name: Zm_5mM_NO_P Parameter: Timepoint (hr) Value: 1
  misc_feature: MA Experiment 108526 PARAMETER Experiment Name: Zm_5mM_NO_P Parameter: Tissue Value: Aerial
  misc_feature: MA Experiment 108526 PARAMETER Experiment Name: Zm_5mM_NO_P Parameter: Treatment Value: 5mM NO vs. No Treatment
  misc_feature: MA Experiment ID: 108527 Result: Down-regulated in Transcription
  misc_feature: MA Experiment 108527 PARAMETER Experiment Name: Zm_5mM_NO_P Parameter: Age (day) Value: 8
  misc_feature: MA Experiment 108527 PARAMETER Experiment Name: Zm_5mM_NO_P Parameter: Organism Value: Zea mays
  misc_feature: MA Experiment 108527 PARAMETER Experiment Name: Zm_5mM_NO_P Parameter: Plant Line Value: 35A19
  misc_feature: MA Experiment 108527 PARAMETER Experiment Name: Zm_5mM_NO_P Parameter: Timepoint (hr) Value: 6
  misc_feature: MA Experiment 108527 PARAMETER Experiment Name: Zm_5mM_NO_P Parameter: Tissue Value: Aerial
  misc_feature: MA Experiment 108527 PARAMETER Experiment Name: Zm_5mM_NO_P Parameter: Treatment Value: 5mM NO vs. No Treatment
  misc_feature: MA Experiment ID: 108528 Result: Up-regulated in Transcription
  misc_feature: MA Experiment 108528 PARAMETER Experiment Name: Zm_Imbibed_Seeds_P Parameter: Age (day) Value: 5 vs. 2
  misc_feature: MA Experiment 108528 PARAMETER Experiment Name: Zm_Imbibed_Seeds_P Parameter: Organism Value: Zea mays
  misc_feature: MA Experiment 108528 PARAMETER Experiment Name: Zm_Imbibed_Seeds_P Parameter: Plant Line Value: 35A19
  misc_feature: MA Experiment 108528 PARAMETER Experiment Name: Zm_Imbibed_Seeds_P Parameter: Tissue Value: Aerial vs. Embryo
  misc_feature: MA Experiment ID: 108529 Result: Up-regulated in Transcription
  misc_feature: MA Experiment 108529 PARAMETER Experiment Name: Zm_Imbibed_Seeds_P Parameter: Age (day) Value: 5 vs. 2
  misc_feature: MA Experiment 108529 PARAMETER Experiment Name: Zm_Imbibed_Seeds_P Parameter: Organism Value: Zea mays
  misc_feature: MA Experiment 108529 PARAMETER Experiment Name: Zm_Imbibed_Seeds_P Parameter: Plant Line Value: 35A19
  misc_feature: MA Experiment 108529 PARAMETER Experiment Name: Zm_Imbibed_Seeds_P Parameter: Tissue Value: Roots vs. Embryo
  misc_feature: MA Experiment ID: 108530 Result: Up-regulated in Transcription
  misc_feature: MA Experiment 108530 PARAMETER Experiment Name: Zm_Imbibed_Seeds_P Parameter: Age (day) Value: 6 vs. 2
  misc_feature: MA Experiment 108530 PARAMETER Experiment Name: Zm_Imbibed_Seeds_P Parameter: Organism Value: Zea mays
  misc_feature: MA Experiment 108530 PARAMETER Experiment Name: Zm_Imbibed_Seeds_P Parameter: Plant Line Value: 35A19
  misc_feature: MA Experiment 108530 PARAMETER Experiment Name: Zm_Imbibed_Seeds_P Parameter: Tissue Value: Aerial vs. Embryo
  misc_feature: MA Experiment ID: 108535 Result: Down-regulated in Transcription
  misc_feature: MA Experiment 108535 PARAMETER Experiment Name: Zm_Meristem_P Parameter: Age (day) Value: 8
  misc_feature: MA Experiment 108535 PARAMETER Experiment Name: Zm_Meristem_P Parameter: Organism Value: Zea mays
  misc_feature: MA Experiment 108535 PARAMETER Experiment Name: Zm_Meristem_P Parameter: Plant Line Value: 35A19
  misc_feature: MA Experiment 108535 PARAMETER Experiment Name: Zm_Meristem_P Parameter: Tissue Value: Root Meristem vs. Above Root Meristem
  misc_feature: MA Experiment ID: 108543 Result: Up-regulated in Transcription
  misc_feature: MA Experiment ID: 108545 Result: Up-regulated in Transcription
  misc_feature: MA Experiment 108545 PARAMETER Experiment Name: Zm_Imbibed_Seeds_P Parameter: Age (day) Value: 3 vs. 2
  misc_feature: MA Experiment 108545 PARAMETER Experiment Name: Zm_Imbibed_Seeds_P Parameter: Organism Value: Zea mays
  misc_feature: MA Experiment 108545 PARAMETER Experiment Name: Zm_Imbibed_Seeds_P Parameter: Plant Line Value: 35A19
  misc_feature: MA Experiment 108545 PARAMETER Experiment Name: Zm_Imbibed_Seeds_P Parameter: Tissue Value: Aerial vs. Embryo
  misc_feature: MA Experiment ID: 108546 Result: Up-regulated in Transcription
  misc_feature: MA Experiment 108546 PARAMETER Experiment Name: Zm_Imbibed_Seeds_P Parameter: Age (day) Value: 3 vs. 2
  misc_feature: MA Experiment 108546 PARAMETER Experiment Name: Zm_Imbibed_Seeds_P Parameter: Organism Value: Zea mays
  misc_feature: MA Experiment 108546 PARAMETER Experiment Name: Zm_Imbibed_Seeds_P Parameter: Plant Line Value: 35A19
  misc_feature: MA Experiment 108546 PARAMETER Experiment Name: Zm_Imbibed_Seeds_P Parameter: Tissue Value: Roots vs. Embryo
  misc_feature: MA Experiment ID: 108547 Result: Up-regulated in Transcription
  misc_feature: MA Experiment 108547 PARAMETER Experiment Name: Zm_Imbibed_Seeds_P Parameter: Age (day) Value: 4 vs. 2
  misc_feature: MA Experiment 108547 PARAMETER Experiment Name: Zm_Imbibed_Seeds_P Parameter: Organism Value: Zea mays
  misc_feature: MA Experiment 108547 PARAMETER Experiment Name: Zm_Imbibed_Seeds_P Parameter: Plant Line Value: 35A19
  misc_feature: MA Experiment 108547 PARAMETER Experiment Name: Zm_Imbibed_Seeds_P Parameter: Tissue Value: Aerial vs. Embryo
  misc_feature: MA Experiment ID: 108559 Result: Down-regulated in Transcription
  misc_feature: MA Experiment 108559 PARAMETER Experiment Name: Zm_5mM_NO_P Parameter: Age (day) Value: 8
  misc_feature: MA Experiment 108559 PARAMETER Experiment Name: Zm_5mM_NO_P Parameter: Organism Value: Zea mays
  misc_feature: MA Experiment 108559 PARAMETER Experiment Name: Zm_5mM_NO_P Parameter: Plant Line Value: 35A19
  misc_feature: MA Experiment 108559 PARAMETER Experiment Name: Zm_5mM_NO_P Parameter: Timepoint (hr) Value: 12
  misc_feature: MA Experiment 108559 PARAMETER Experiment Name: Zm_5mM_NO_P Parameter: Tissue Value: Aerial
  misc_feature: MA Experiment 108559 PARAMETER Experiment Name: Zm_5mM_NO_P Parameter: Treatment Value: 5mM NO vs. No Treatment
  misc_feature: MA Experiment ID: 108687 Result: Down-regulated in Transcription
  misc_feature: MA Experiment 108687 PARAMETER Experiment Name: Zm_Embryos-Flowers__P Parameter: Tissue Value: Embryo vs. Aerial+
  misc_feature: MA Experiment ID: 108689 Result: Up-regulated in Transcription
  misc_feature: MA Experiment 108689 PARAMETER Experiment Name: Zm_Drought_Roots_P Parameter: Age (day) Value: 9
  misc_feature: MA Experiment 108689 PARAMETER Experiment Name: Zm_Drought_Roots_P Parameter: Organism Value: Zea mays
  misc_feature: MA Experiment 108689 PARAMETER Experiment Name: Zm_Drought_Roots_P Parameter: Plant Line Value: 35A19
  misc_feature: MA Experiment 108689 PARAMETER Experiment Name: Zm_Drought_Roots_P Parameter: Timepoint (hr) Value: 24
  misc_feature: MA Experiment 108689 PARAMETER Experiment Name: Zm_Drought_Roots_P Parameter: Tissue Value: Roots
  misc_feature: MA Experiment 108689 PARAMETER Experiment Name: Zm_Drought_Roots_P Parameter: Treatment Value: Drought vs. No Drought
  misc_feature: MA Experiment ID: 20000477 Result: Down-regulated in Transcription
  misc_feature: MA Experiment 20000477 PARAMETER Experiment Name: Zm_5mM_SA_P Parameter: Age (day) Value: 10
  misc_feature: MA Experiment 20000477 PARAMETER Experiment Name: Zm_5mM_SA_P Parameter: Organism Value: Zea mays
  misc_feature: MA Experiment 20000477 PARAMETER Experiment Name: Zm_5mM_SA_P Parameter: Plant Line Value: 35A19
  misc_feature: MA Experiment 20000477 PARAMETER Experiment Name: Zm_5mM_SA_P Parameter: Timepoint (hr) Value: 48
  misc_feature: MA Experiment 20000477 PARAMETER Experiment Name: Zm_5mM_SA_P Parameter: Tissue Value: Aerial
  misc_feature: MA Experiment 20000477 PARAMETER Experiment Name: Zm_5mM_SA_P Parameter: Treatment Value: 5mM SA vs. No Treatment
  misc_feature: MA Experiment ID: 20000478 Result: Down-regulated in Transcription
  misc_feature: MA Experiment 20000478 PARAMETER Experiment Name: Zm_5mM_SA_P Parameter: Age (day) Value: 11
  misc_feature: MA Experiment 20000478 PARAMETER Experiment Name: Zm_5mM_SA_P Parameter: Organism Value: Zea mays
  misc_feature: MA Experiment 20000478 PARAMETER Experiment Name: Zm_5mM_SA_P Parameter: Plant Line Value: 35A19
  misc_feature: MA Experiment 20000478 PARAMETER Experiment Name: Zm_5mM_SA_P Parameter: Timepoint (hr) Value: 72
  misc_feature: MA Experiment 20000478 PARAMETER Experiment Name: Zm_5mM_SA_P Parameter: Tissue Value: Aerial
  misc_feature: MA Experiment 20000478 PARAMETER Experiment Name: Zm_5mM_SA_P Parameter: Treatment Value: 5mM SA vs. No Treatment
  misc_feature: MA Experiment ID: 20000487 Result: Down-regulated in Transcription
  misc_feature: MA Experiment 20000487 PARAMETER Experiment Name: Zm_50mM_NH4NO3_L_to_H_P Parameter: Organism Value: Zea mays
  misc_feature: MA Experiment 20000487 PARAMETER Experiment Name: Zm_50mM_NH4NO3_L_to_H_P Parameter: Timepoint (hr) Value: 4
  misc_feature: MA Experiment 20000487 PARAMETER Experiment Name: Zm_50mM_NH4NO3_L_to_H_P Parameter: Tissue Value: Leaves
  misc_feature: MA Experiment 20000487 PARAMETER Experiment Name: Zm_50mM_NH4NO3_L_to_H_P Parameter: Treatment Value: 50mM NH4NO3 vs. 100mM Mannitol
  misc_feature: MA Experiment ID: 20000535 Result: Down-regulated in Transcription
  misc_feature: MA Experiment 20000535 PARAMETER Experiment Name: Zm_Hybrid_Seed_Dev_P Parameter: DAP Value: 30 vs. 12
  misc_feature: MA Experiment 20000535 PARAMETER Experiment Name: Zm_Hybrid_Seed_Dev_P Parameter: Organism Value: Zea mays
  misc_feature: MA Experiment 20000535 PARAMETER Experiment Name: Zm_Hybrid_Seed_Dev_P Parameter: Plant Line Value: 35A19
  misc_feature: MA Experiment 20000535 PARAMETER Experiment Name: Zm_Hybrid_Seed_Dev_P Parameter: Tissue Value: Embryo vs. Unfert Floret
gcacgagaccattacctagaacatcctaatcaaaaaagaaggaacatcgaagaaaggaaggaggtgggcggcaatggaggatgcgatggcggcggacgggaagagcgtgctgcaggggcggtacgagctggggcgggtgctggggcacggcaacttcgggcgggtgcacgcggcgcgggacctgcgcacgggccgcagcgtcgcggtcaaggtggtggccaaggacaagctggagcgcgcgggcatggcggagcagatcaagcgggagatcgccgtcatgaagatggtgtcccaccccaacatcgtggagctgcacgaggtgatggccacccgctccaagatctacctcgcgctcgagctcgtccgcggcggggagctcttctcccgcatcgcgcgcgcggggcgggtccgggaggacgtggcgcgctgttacttccggcagctcgtcgccgcggtcgacttctgccacggccgcggggtgttccaccgagacctgaagctcgagaacctgctcctcgacgaggtaggcaacctcaaagtggcggactttgggctcagcgcgctcgccgggcacgcgcgctccgacgggctgctccataccgcctgtggcacgccgtcatacgtcgcccccgaggtgctcggcgggaagggctacgacggcgccaaggcggacctctggtcctgtggcgtcatcctctacgtgctcctcgttggcagcttgccattccacgaggacaacctcatggtcatgtaccggaagatgcagcgcggcgagttcctctgcccgccgtgggtctcagcggacgcccggaagctcatcggcgagctgctcgaccccgacccgagcacgcgcatcaccgtcgctcgcctcgtcgagacgccgtggtaccggaagccgttgcccgtcctgccgccgctcaacctcaaggagccaaccccggacgcgcgccgcgccacctctgacaaggaagagcccgaggtgctgaacgcgttccacctcatctctttctcggagggcttcgacctgtccccgctcttcgaccagggccgtggcggcggcgtagggaggtctagcgcgggcggcatccgtttcgtgacgcgcgaggccgccagcagcgtggtctcccgtctggagtcgctggtcaccggccgcggagccaacatgcgcgtgacaaagagcggctcgcggggcgttcgtttggaggccgtgtcgcgcgggcgctcgggggcgcggctggcagtggccgcggagatcttcagcgtggcgccgtcggtgctcctggtggacgtgaagaaggacggcggcgacacgatggagtaccggtcgttctgttgcgaggagctccggccggcgctcaaggacatcgtctgggcctccagccaggacacaccgggcgccgcttgatgtcgtcgctgtcgctcctgccaccattattgtccttgcccatcaattgctgttggtgtccgtgtagggggggtcgtgctcgtgcattattgtttggtgacgaagtgatgtttgtttgtcgtttgccactctcgtagttggtttctgctgtggtgcagcggctgctggcagttgcagttgggctgttgcccgcggggcgcgagcaaagcagaatcagcgggaactagcattcgtatcctgcatgcacgcccataccgtgtcagctctgaagtgggaagaactgtaacaagtagtagtacgaatgtaccagggtgatgtgctttcgagtcacttgtgtatatattcatttttttagc

SEQ ID NO: 6672 - protein, 443 aa, Zea mays subsp. mays
  peptide (1)..(443): Ceres Seq. ID no. 12382164
  misc_feature (17)..(272): Pfam Name: Protein kinase domain Pfam Description: Protein kinase domain
MEDAMAADGKSVLQGRYELGRVLGHGNFGRVHAARDLRTGRSVAVKVVAKDKLERAGMAEQIKREIAVMKMVSHPNIVELHEVMATRSKIYLALELVRGGELFSRIARAGRVREDVARCYFRQLVAAVDFCHGRGVFHRDLKLENLLLDEVGNLKVADFGLSALAGHARSDGLLHTACGTPSYVAPEVLGGKGYDGAKADLWSCGVILYVLLVGSLPFHEDNLMVMYRKMQRGEFLCPPWVSADARKLIGELLDPDPSTRITVARLVETPWYRKPLPVLPPLNLKEPTPDARRATSDKEEPEVLNAFHLISFSEGFDLSPLFDQGRGGGVGRSSAGGIRFVTREAASSVVSRLESLVTGRGANMRVTKSGSRGVRLEAVSRGRSGARLAVAAEIFSVAPSVLLVDVKKDGGDTMEYRSFCCEELRPALKDIVWASSQDTPGAA

SEQ ID NO: 6673 - protein, 439 aa, Zea mays subsp. mays
  peptide (1)..(439): Ceres Seq. ID no. 12382165
  misc_feature (13)..(268): Pfam Name: Protein kinase domain Pfam Description: Protein kinase domain
MAADGKSVLQGRYELGRVLGHGNFGRVHAARDLRTGRSVAVKVVAKDKLERAGMAEQIKREIAVMKMVSHPNIVELHEVMATRSKIYLALELVRGGELFSRIARAGRVREDVARCYFRQLVAAVDFCHGRGVFHRDLKLENLLLDEVGNLKVADFGLSALAGHARSDGLLHTACGTPSYVAPEVLGGKGYDGAKADLWSCGVILYVLLVGSLPFHEDNLMVMYRKMQRGEFLCPPWVSADARKLIGELLDPDPSTRITVARLVETPWYRKPLPVLPPLNLKEPTPDARRATSDKEEPEVLNAFHLISFSEGFDLSPLFDQGRGGGVGRSSAGGIRFVTREAASSVVSRLESLVTGRGANMRVTKSGSRGVRLEAVSRGRSGARLAVAAEIFSVAPSVLLVDVKKDGGDTMEYRSFCCEELRPALKDIVWASSQDTPGAA

SEQ ID NO: 6674 - protein, 386 aa, Zea mays subsp. mays
  peptide (1)..(386): Ceres Seq. ID no. 12382166
  misc_feature (1)..(215): Pfam Name: Protein kinase domain Pfam Description: Protein kinase domain
MAEQIKREIAVMKMVSHPNIVELHEVMATRSKIYLALELVRGGELFSRIARAGRVREDVARCYFRQLVAAVDFCHGRGVFHRDLKLENLLLDEVGNLKVADFGLSALAGHARSDGLLHTACGTPSYVAPEVLGGKGYDGAKADLWSCGVILYVLLVGSLPFHEDNLMVMYRKMQRGEFLCPPWVSADARKLIGELLDPDPSTRITVARLVETPWYRKPLPVLPPLNLKEPTPDARRATSDKEEPEVLNAFHLISFSEGFDLSPLFDQGRGGGVGRSSAGGIRFVTREAASSVVSRLESLVTGRGANMRVTKSGSRGVRLEAVSRGRSGARLAVAAEIFSVAPSVLLVDVKKDGGDTMEYRSFCCEELRPALKDIVWASSQDTPGAA

SEQ ID NO: 6675 - DNA, 733 bp, Zea mays subsp. mays
  misc_feature (1)..(733): Ceres Seq. ID no. 12414009
  misc_feature: MA Experiment ID: 108688 Result: Down-regulated in Transcription
  misc_feature: MA Experiment 108688 PARAMETER Experiment Name: Zm_Embryos-Flowers__P Parameter: Tissue Value: Immature Flowers vs. Aerial+
gttccccagcagcctcttccccttcccgaccagagcaagcacgccaccgcttccgtcgtcgtcctcccgaccgtctcactcccgcccccacctccgcatccgatctccgaaacctaataatccaacggtcgcgcccgcgtcctctcggatggaggtggcccagccccaggcgagcaacgcccagggaggggcggagccggccatgaagctactgttcgtggagatgggcgtcggctacgatcagcacggccaagatatcaccgccgccgccgtgcgcgcctgcaaggacgccatcacctccaactccatccccgccttccggggcgggtccattccaggagtgaacacggaccagatgaagctgcagatcaagctcggagtgcctaggtcgacgcagcacttgctggatgctgagagagtcaaggccgtcttcccctatggcaagataatcagctttgaggtcgttgacggtggcatgatctgttcaagcggcgtgtgcctggaagcaatgggggataagaacgatgactgctacatagtcaacgctgcagtgtatgtcggctactgatgtactgtagtacctggaatggaacagtagagattggttatggttcctccgttatagaaaaaaaaaactgctacctccgtcctaaaataaaacagttgatattttttcttcatagaagccaaatattgtaaactttgactaaatattactccctccattttcttt

SEQ ID NO: 6676 - protein, 188 aa, Zea mays subsp. mays
  peptide (1)..(188): Ceres Seq. ID no. 12414010
  misc_feature (11)..(188): Homolog of NCBI NO: 18396927 NR Description: expressed protein; protein id: At1g29040.1, by cDNA: 19718. [Arabidopsis thaliana] unknown [Arabidopsis thaliana] >gi|23297690|gb|AAN13008.1|
  misc_feature (11)..(188): Homolog of NCBI NO: 21954066 NR Description: unknown protein [Arabidopsis thaliana]
  misc_feature (5)..(145): Homolog of NCBI NO: 34912624 NR Description: P0410E01.16 [Oryza sativa (japonica
  misc_feature (11)..(188): Homolog of NCBI NO: 30690579 NR Description: expressed protein [Arabidopsis thaliana]
  misc_feature (68)..(188): Homolog of NCBI NO: 37520060 NR Description: hypothetical protein glr0491 [Gloeobacter
  misc_feature (70)..(188): Homolog of NCBI NO: 23098097 NR Description: hypothetical protein [Oceanobacillus iheyensis >gi|22776322|dbj|BAC12598.1| hypothetical conserved protein
  misc_feature (69)..(188): Homolog of NCBI NO: 23098421 NR Description: hypothetical protein [Oceanobacillus iheyensis >gi|22776647|dbj|BAC12922.1| hypothetical conserved protein
  misc_feature (69)..(188): Homolog of NCBI NO: 16802555 NR Description: lmo0512 [Listeria monocytogenes EGD-e]
  misc_feature (69)..(188): Homolog of NCBI NO: 16799587 NR Description: lin0512 [Listeria innocua]
  misc_feature (67)..(186): Homolog of NCBI NO: 23127863 NR Description: hypothetical protein [Nostoc punctiforme]
FPSSLFPFPTRASTPPLPSSSSRPSHSRPHLRIRSPKPNNPTVAPASSRMEVAQPQASNAQGGAEPAMKLLFVEMGVGYDQHGQDITAAAVRACKDAITSNSIPAFRGGSIPGVNTDQMKLQIKLGVPRSTQHLLDAERVKAVFPYGKIISFEVVDGGMICSSGVCLEAMGDKNDDCYIVNAAVYVGY

SEQ ID NO: 6677 - protein, 139 aa, Zea mays subsp. mays
  peptide (1)..(139): Ceres Seq. ID no. 12414011
  misc_feature (1)..(139): Homolog of NCBI NO: 18396927 NR Description: expressed protein; protein id: At1g29040.1, by cDNA: 19718. [Arabidopsis thaliana] unknown [Arabidopsis thaliana] >gi|23297690|gb|AAN13008.1|
  misc_feature (1)..(139): Homolog of NCBI NO: 21954066 NR Description: unknown protein [Arabidopsis thaliana]
  misc_feature (1)..(96): Homolog of NCBI NO: 34912624 NR Description: P0410E01.16 [Oryza sativa (japonica
  misc_feature (1)..(139): Homolog of NCBI NO: 30690579 NR Description: expressed protein [Arabidopsis thaliana]
  misc_feature (19)..(139): Homolog of NCBI NO: 37520060 NR Description: hypothetical protein glr0491 [Gloeobacter
  misc_feature (21)..(139): Homolog of NCBI NO: 23098097 NR Description: hypothetical protein [Oceanobacillus iheyensis >gi|22776322|dbj|BAC12598.1| hypothetical conserved protein
  misc_feature (20)..(139): Homolog of NCBI NO: 23098421 NR Description: hypothetical protein [Oceanobacillus iheyensis >gi|22776647|dbj|BAC12922.1| hypothetical conserved protein
  misc_feature (20)..(139): Homolog of NCBI NO: 16802555 NR Description: lmo0512 [Listeria monocytogenes EGD-e]
  misc_feature (20)..(139): Homolog of NCBI NO: 16799587 NR Description: lin0512 [Listeria innocua]
  misc_feature (18)..(137): Homolog of NCBI NO: 23127863 NR Description: hypothetical protein [Nostoc punctiforme]
MEVAQPQASNAQGGAEPAMKLLFVEMGVGYDQHGQDITAAAVRACKDAITSNSIPAFRGGSIPGVNTDQMKLQIKLGVPRSTQHLLDAERVKAVFPYGKIISFEVVDGGMICSSGVCLEAMGDKNDDCYIVNAAVYVGY

SEQ ID NO: 6678 - protein, 121 aa, Zea mays subsp. mays
  peptide (1)..(121): Ceres Seq. ID no. 12414012
  misc_feature (1)..(121): Homolog of NCBI NO: 18396927 NR Description: expressed protein; protein id: At1g29040.1, by cDNA: 19718. [Arabidopsis thaliana] unknown [Arabidopsis thaliana] >gi|23297690|gb|AAN13008.1|
  misc_feature (1)..(121): Homolog of NCBI NO: 21954066 NR Description: unknown protein [Arabidopsis thaliana]
  misc_feature (1)..(78): Homolog of NCBI NO: 34912624 NR Description: P0410E01.16 [Oryza sativa (japonica
  misc_feature (1)..(121): Homolog of NCBI NO: 30690579 NR Description: expressed protein [Arabidopsis thaliana]
  misc_feature (1)..(121): Homolog of NCBI NO: 37520060 NR Description: hypothetical protein glr0491 [Gloeobacter
  misc_feature (3)..(121): Homolog of NCBI NO: 23098097 NR Description: hypothetical protein [Oceanobacillus iheyensis >gi|22776322|dbj|BAC12598.1| hypothetical conserved protein
  misc_feature (2)..(121): Homolog of NCBI NO: 23098421 NR Description: hypothetical protein [Oceanobacillus iheyensis >gi|22776647|dbj|BAC12922.1| hypothetical conserved protein
  misc_feature (2)..(121): Homolog of NCBI NO: 16802555 NR Description: lmo0512 [Listeria monocytogenes EGD-e]
  misc_feature (2)..(121): Homolog of NCBI NO: 16799587 NR Description: lin0512 [Listeria innocua]
  misc_feature (1)..(119): Homolog of NCBI NO: 23127863 NR Description: hypothetical protein [Nostoc punctiforme]
MKLLFVEMGVGYDQHGQDITAAAVRACKDAITSNSIPAFRGGSIPGVNTDQMKLQIKLGVPRSTQHLLDAERVKAVFPYGKIISFEVVDGGMICSSGVCLEAMGDKNDDCYIVNAAVYVGY

SEQ ID NO: 6679 - DNA, 1220 bp, Zea mays subsp. mays
  misc_feature (1)..(1220): Ceres Seq. ID no. 12366799
  misc_feature: MA Experiment ID: 108523 Result: Up-regulated in Transcription
  misc_feature: MA Experiment 108523 PARAMETER Experiment Name: Zm_42deg_Heat_P Parameter: Age (day) Value: 8
  misc_feature: MA Experiment 108523 PARAMETER Experiment Name: Zm_42deg_Heat_P Parameter: Organism Value: Zea mays
  misc_feature: MA Experiment 108523 PARAMETER Experiment Name: Zm_42deg_Heat_P Parameter: Plant Line Value: 35A19
  misc_feature: MA Experiment 108523 PARAMETER Experiment Name: Zm_42deg_Heat_P Parameter: Temperature (deg C) Value: 42 vs. 22
  misc_feature: MA Experiment 108523 PARAMETER Experiment Name: Zm_42deg_Heat_P Parameter: Timepoint (hr) Value: 6
  misc_feature: MA Experiment 108523 PARAMETER Experiment Name: Zm_42deg_Heat_P Parameter: Tissue Value: Aerial
  misc_feature: MA Experiment ID: 108535 Result: Up-regulated in Transcription
  misc_feature: MA Experiment 108535 PARAMETER Experiment Name: Zm_Meristem_P Parameter: Age (day) Value: 8
  misc_feature: MA Experiment 108535 PARAMETER Experiment Name: Zm_Meristem_P Parameter: Organism Value: Zea mays
  misc_feature: MA Experiment 108535 PARAMETER Experiment Name: Zm_Meristem_P Parameter: Plant Line Value: 35A19
  misc_feature: MA Experiment 108535 PARAMETER Experiment Name: Zm_Meristem_P Parameter: Tissue Value: Root Meristem vs. Above Root Meristem
  misc_feature: MA Experiment ID: 20000487 Result: Up-regulated in Transcription
  misc_feature: MA Experiment 20000487 PARAMETER Experiment Name: Zm_50mM_NH4NO3_L_to_H_P Parameter: Organism Value: Zea mays
  misc_feature: MA Experiment 20000487 PARAMETER Experiment Name: Zm_50mM_NH4NO3_L_to_H_P Parameter: Timepoint (hr) Value: 4
  misc_feature: MA Experiment 20000487 PARAMETER Experiment Name: Zm_50mM_NH4NO3_L_to_H_P Parameter: Tissue Value: Leaves
  misc_feature: MA Experiment 20000487 PARAMETER Experiment Name: Zm_50mM_NH4NO3_L_to_H_P Parameter: Treatment Value: 50mM NH4NO3 vs. 100mM Mannitol
  misc_feature: MA Experiment ID: 20000488 Result: Up-regulated in Transcription
  misc_feature: MA Experiment 20000488 PARAMETER Experiment Name: Zm_50mM_NH4NO3_L_to_H_P Parameter: Organism Value: Zea mays
  misc_feature: MA Experiment 20000488 PARAMETER Experiment Name: Zm_50mM_NH4NO3_L_to_H_P Parameter: Timepoint (hr) Value: 8
  misc_feature: MA Experiment 20000488 PARAMETER Experiment Name: Zm_50mM_NH4NO3_L_to_H_P Parameter: Tissue Value: Leaves
  misc_feature: MA Experiment 20000488 PARAMETER Experiment Name: Zm_50mM_NH4NO3_L_to_H_P Parameter: Treatment Value: 50mM NH4NO3 vs. 100mM Mannitol
  misc_feature: MA Experiment ID: 20000492 Result: Up-regulated in Transcription
  misc_feature: MA Experiment 20000492 PARAMETER Experiment Name: Zm_Hybrid_Seed_Dev_P Parameter: DAP Value: 12
  misc_feature: MA Experiment 20000492 PARAMETER Experiment Name: Zm_Hybrid_Seed_Dev_P Parameter: Organism Value: Zea mays
  misc_feature: MA Experiment 20000492 PARAMETER Experiment Name: Zm_Hybrid_Seed_Dev_P Parameter: Plant Line Value: 35A19
  misc_feature: MA Experiment 20000492 PARAMETER Experiment Name: Zm_Hybrid_Seed_Dev_P Parameter: Tissue Value: Fert Kernel vs. Unfert Floret
aattcacgattgagaaaccctcacctcttcccttccttggttcctccccaccgccgccaccgccggaaaaaaaaaaaatgggtgccgatggggaagaagcgtcgcggatagtcgtgccaatggcggtggaggggacctcggagcagctggcgttcgtggaggagtcgaagctgcagaagcgcaaggagaacgcggactgggccgtcaggaaccgggagcgcagggcggtaaagcgccagcgcatccgcgacgagcacaaggtcaccgtaaggcggcctgaggacttcgttgccgcgttccggaacaaggaacgcgacttcctgcggatgaggacccgcctcaaggtccgcaagcagccgcccgccgaggcgctcggctccaagctcgtcttcgcaattcgcatccctggctgcgtggacttgcatccgaacatcaggaaggtcttgaggaagctacggctgacgacggtcctcaccggcgtattcctcagggccaccgagctgacgctgaagaggcttcttgtggtcgaaccctttgtcacctacgggtttccaaacttgaagaacgtgaaagagcttatttacaagaagggccgtgggtttttcgacaaggagcctttccctcttaccagtaacgatctaattgagaaggctcttggagatcacggcatcatatgcttggaagacgttgtgcacgagatcgccacggttggccgcacttccgagaagcatcgaggttcctcatgcccttcaggctcaagtgtccggagaggaggctgcagatgaagaggaaaccctacaaggatggcggcgactcgggcgaccgtggcgacaagatcaacgaactaatcgagaagctgaactagaagcgcagaccttgcctcctccggccgtcgttttgcgttggagctatggatctgttattaccttgtcggttttgtaatagcattagctgagtgtgccttcggctttgaaaccttacctgcacttgtgcgatcaggtcatgaaatagcaggcgcttctttggttatccacatgcctcttcggttggtgcgacaatatatcagctgtgttatgaatgatgtagtgtgctagtgtagtgcagacgcttataatgtatgcacacttacaaccgtgaacggacatatatgcaaacacttctatgatcttcgaaggagattgatgaaagtcactttgcttgatttagggcctgtttaattc

SEQ ID NO: 6680 - protein, 260 aa, Zea mays subsp. mays
  peptide (1)..(260): Ceres Seq. ID no. 12366800
  misc_feature (128)..(179): Pfam Name: Ribosomal protein L30p/L7e Pfam Description: Ribosomal protein L30p/L7e
  misc_feature (40)..(237): Homolog of NCBI NO: 38636688 NR Description: putative 60S ribosomal protein L7 (RPL7A) [Oryza
  misc_feature (43)..(237): Homolog of NCBI NO: 15220825 NR Description: ribosomal protein L7, putative; protein id: [Arabidopsis thaliana] >gi|25295064|pir||A96840 hypothetical
  misc_feature (52)..(237): Homolog of NCBI NO: 445613 NR Description: ribosomal protein L7
  misc_feature (50)..(237): Homolog of NCBI NO: 38637548 NR Description: putative 60S ribosomal protein L7 [Oryza sativa
  misc_feature (47)..(237): Homolog of NCBI NO: 15226212 NR Description: putative ribosomal protein L7; protein id: supported by cDNA: 13298., supported by cDNA: gi_13877566, by cDNA: gi_15028382, supported by cDNA: gi_19310656, supported
  misc_feature (46)..(237): Homolog of NCBI NO: 15231288 NR Description: ribosomal protein, putative; protein id: supported by cDNA: gi_14532551, supported by cDNA: gi_15810195, by cDNA: gi_18655394 [Arabidopsis thaliana]
  misc_feature (40)..(237): Homolog of NCBI NO: 30689623 NR Description: 60S ribosomal protein L7 (RPL7C) [Arabidopsis >gi|6174958|sp|Q42208|RL7_ARATH 60S ribosomal protein L7
  misc_feature (46)..(237): Homolog of NCBI NO: 27311547 NR Description: Unknown protein [Arabidopsis thaliana]
  misc_feature (46)..(237): Homolog of NCBI NO: 30689617 NR Description: 60S ribosomal protein L7 (RPL7C) [Arabidopsis >gi|15450713|gb|AAK96628.1| At2g44120/F6E13.25 [Arabidopsis >gi|17386142|gb|AAL38617.1|AF446884_1 At2g44120/F6E13.25
  misc_feature (52)..(237): Homolog of NCBI NO: 38346542 NR Description: OSJNBa0035M09.3 [Oryza sativa (japonica
FTIEKPSPLPFLGSSPPPPPPEKKKMGADGEEASRIVVPMAVEGTSEQLAFVEESKLQKRKENADWAVRNRERRAVKRQRIRDEHKVTVRRPEDFVAAFRNKERDFLRMRTRLKVRKQPPAEALGSKLVFAIRIPGCVDLHPNIRKVLRKLRLTTVLTGVFLRATELTLKRLLVVEPFVTYGFPNLKNVKELIYKKGRGFFDKEPFPLTSNDLIEKALGDHGIICLEDVVHEIATVGRTSEKHRGSSCPSGSSVRRGGCR

SEQ ID NO: 6681 - protein, 235 aa, Zea mays subsp. mays
  peptide (1)..(235): Ceres Seq. ID no. 12366801
  misc_feature (103)..(154): Pfam Name: Ribosomal protein L30p/L7e Pfam Description: Ribosomal protein L30p/L7e
  misc_feature (15)..(212): Homolog of NCBI NO: 38636688 NR Description: putative 60S ribosomal protein L7 (RPL7A) [Oryza
  misc_feature (18)..(212): Homolog of NCBI NO: 15220825 NR Description: ribosomal protein L7, putative; protein id: [Arabidopsis thaliana] >gi|25295064|pir||A96840 hypothetical
  misc_feature (27)..(212): Homolog of NCBI NO: 445613 NR Description: ribosomal protein L7
  misc_feature (25)..(212): Homolog of NCBI NO: 38637548 NR Description: putative 60S ribosomal protein L7 [Oryza sativa
  misc_feature (22)..(212): Homolog of NCBI NO: 15226212 NR Description: putative ribosomal protein L7; protein id: supported by cDNA: 13298., supported by cDNA: gi_13877566, by cDNA: gi_15028382, supported by cDNA: gi_19310656, supported
  misc_feature (21)..(212): Homolog of NCBI NO: 15231288 NR Description: ribosomal protein, putative; protein id: supported by cDNA: gi_14532551, supported by cDNA: gi_15810195, by cDNA: gi_18655394 [Arabidopsis thaliana]
  misc_feature (15)..(212): Homolog of NCBI NO: 30689623 NR Description: 60S ribosomal protein L7 (RPL7C) [Arabidopsis >gi|6174958|sp|Q42208|RL7_ARATH 60S ribosomal protein L7
  misc_feature (21)..(212): Homolog of NCBI NO: 27311547 NR Description: Unknown protein [Arabidopsis thaliana]
  misc_feature (21)..(212): Homolog of NCBI NO: 30689617 NR Description: 60S ribosomal protein L7 (RPL7C) [Arabidopsis >gi|15450713|gb|AAK96628.1| At2g44120/F6E13.25 [Arabidopsis >gi|17386142|gb|AAL38617.1|AF446884_1 At2g44120/F6E13.25
  misc_feature (27)..(212): Homolog of NCBI NO: 38346542 NR Description: OSJNBa0035M09.3 [Oryza sativa (japonica
MGADGEEASRIVVPMAVEGTSEQLAFVEESKLQKRKENADWAVRNRERRAVKRQRIRDEHKVTVRRPEDFVAAFRNKERDFLRMRTRLKVRKQPPAEALGSKLVFAIRIPGCVDLHPNIRKVLRKLRLTTVLTGVFLRATELTLKRLLVVEPFVTYGFPNLKNVKELIYKKGRGFFDKEPFPLTSNDLIEKALGDHGIICLEDVVHEIATVGRTSEKHRGSSCPSGSSVRRGGCR

SEQ ID NO: 6682 - protein, 221 aa, Zea mays subsp. mays
  peptide (1)..(221): Ceres Seq. ID no. 12366802
  misc_feature (89)..(140): Pfam Name: Ribosomal protein L30p/L7e Pfam Description: Ribosomal protein L30p/L7e
  misc_feature (1)..(198): Homolog of NCBI NO: 38636688 NR Description: putative 60S ribosomal protein L7 (RPL7A) [Oryza
  misc_feature (4)..(198): Homolog of NCBI NO: 15220825 NR Description: ribosomal protein L7, putative; protein id: [Arabidopsis thaliana] >gi|25295064|pir||A96840 hypothetical
  misc_feature (13)..(198): Homolog of NCBI NO: 445613 NR Description: ribosomal protein L7
  misc_feature (11)..(198): Homolog of NCBI NO: 38637548 NR Description: putative 60S ribosomal protein L7 [Oryza sativa
  misc_feature (8)..(198): Homolog of NCBI NO: 15226212 NR Description: putative ribosomal protein L7; protein id: supported by cDNA: 13298., supported by cDNA: gi_13877566, by cDNA: gi_15028382, supported by cDNA: gi_19310656, supported
  misc_feature (7)..(198): Homolog of NCBI NO: 15231288 NR Description: ribosomal protein, putative; protein id: supported by cDNA: gi_14532551, supported by cDNA: gi_15810195, by cDNA: gi_18655394 [Arabidopsis thaliana]
  misc_feature (1)..(198): Homolog of NCBI NO: 30689623 NR Description: 60S ribosomal protein L7 (RPL7C) [Arabidopsis >gi|6174958|sp|Q42208|RL7_ARATH 60S ribosomal protein L7
  misc_feature (7)..(198): Homolog of NCBI NO: 27311547 NR Description: Unknown protein [Arabidopsis thaliana]
  misc_feature (7)..(198): Homolog of NCBI NO: 30689617 NR Description: 60S ribosomal protein L7 (RPL7C) [Arabidopsis >gi|15450713|gb|AAK96628.1| At2g44120/F6E13.25 [Arabidopsis >gi|17386142|gb|AAL38617.1|AF446884_1 At2g44120/F6E13.25
  misc_feature (13)..(198): Homolog of NCBI NO: 38346542 NR Description: OSJNBa0035M09.3 [Oryza sativa (japonica
MAVEGTSEQLAFVEESKLQKRKENADWAVRNRERRAVKRQRIRDEHKVTVRRPEDFVAAFRNKERDFLRMRTRLKVRKQPPAEALGSKLVFAIRIPGCVDLHPNIRKVLRKLRLTTVLTGVFLRATELTLKRLLVVEPFVTYGFPNLKNVKELIYKKGRGFFDKEPFPLTSNDLIEKALGDHGIICLEDVVHEIATVGRTSEKHRGSSCPSGSSVRRGGCR

SEQ ID NO: 6683 - DNA, 1285 bp, Zea mays subsp. mays
  misc_feature (1)..(1285): Ceres Seq. ID no. 12353872
  misc_feature: MA Experiment ID: 108523 Result: Up-regulated in Transcription
  misc_feature: MA Experiment 108523 PARAMETER Experiment Name: Zm_42deg_Heat_P Parameter: Age (day) Value: 8
  misc_feature: MA Experiment 108523 PARAMETER Experiment Name: Zm_42deg_Heat_P Parameter: Organism Value: Zea mays
  misc_feature: MA Experiment 108523 PARAMETER Experiment Name: Zm_42deg_Heat_P Parameter: Plant Line Value: 35A19
  misc_feature: MA Experiment 108523 PARAMETER Experiment Name: Zm_42deg_Heat_P Parameter: Temperature (deg C) Value: 42 vs. 22
  misc_feature: MA Experiment 108523 PARAMETER Experiment Name: Zm_42deg_Heat_P Parameter: Timepoint (hr) Value: 6
  misc_feature: MA Experiment 108523 PARAMETER Experiment Name: Zm_42deg_Heat_P Parameter: Tissue Value: Aerial
  misc_feature: MA Experiment ID: 108535 Result: Up-regulated in Transcription
  misc_feature: MA Experiment 108535 PARAMETER Experiment Name: Zm_Meristem_P Parameter: Age (day) Value: 8
  misc_feature: MA Experiment 108535 PARAMETER Experiment Name: Zm_Meristem_P Parameter: Organism Value: Zea mays
  misc_feature: MA Experiment 108535 PARAMETER Experiment Name: Zm_Meristem_P Parameter: Plant Line Value: 35A19
  misc_feature: MA Experiment 108535 PARAMETER Experiment Name: Zm_Meristem_P Parameter: Tissue Value: Root Meristem vs. Above Root Meristem
  misc_feature: MA Experiment ID: 108543 Result: Up-regulated in Transcription
  misc_feature: MA Experiment ID: 20000479 Result: Down-regulated in Transcription
  misc_feature: MA Experiment 20000479 PARAMETER Experiment Name: Zm_Drought_P Parameter: Age (day) Value: 10
  misc_feature: MA Experiment 20000479 PARAMETER Experiment Name: Zm_Drought_P Parameter: Organism Value: Zea mays
  misc_feature: MA Experiment 20000479 PARAMETER Experiment Name: Zm_Drought_P Parameter: Plant Line Value: 35A19
  misc_feature: MA Experiment 20000479 PARAMETER Experiment Name: Zm_Drought_P Parameter: Timepoint (hr) Value: 48
  misc_feature: MA Experiment 20000479 PARAMETER Experiment Name: Zm_Drought_P Parameter: Tissue Value: Aerial
  misc_feature: MA Experiment 20000479 PARAMETER Experiment Name: Zm_Drought_P Parameter: Treatment Value: Drought vs. No Drought
tcctccccgctccagcgcccctgcagttctcgctccactgacagctcgccgaggggccgcgccgcgctcgagacccgtcgatggcgaggcggagcctggcggtcgacgcaaccgcaggcgccgcatcccgggttcggttcgcgcccacctccaataacctgctcgtctcctcatgggattcggggctgcggttgtacgatgccgacgagggcacgctcagggtcaacgtggagtcagaggcggcattcctcgactgctgcttcgaggatgagtctgcagcgtttgcctgcggctctgatggatctgtgagaaggtacgacttccactcaggttcgcaggatacggtggggctccatgaagatgcactagcctgcattgagttctcttcactgaccggtcagattatgacaggcagccttgacaagaagctaaagctttgggattcaaaaacaagaaatgtaagcccgagcggcaccataaccttaaattcagatgtggcctcaatttctatatgcggcatttacatattagctgcagttgagagaaatgtttatctttatgacatgaggaatctaacaagaccagttgatgaaaaagactgtcctctggattatcaaattcgatgccttcatacttctctagagtggaatgcttatgttgctggctctgtggatggagttgttgcattgaagtatcttgatcgtggaacagatagagatttgggatatgcatttcgttgtcatccaaattccagaaacggaaaatggaatctggtccctgtaaattgcatctcagttcatccctgcaacagaactttcgttacgggagatgataaaggatgcactattgtttgggatgctcaattgaaaaagaagctgattgagcttccaatgtatttgggcagtgtggcgtcagtggcatacaaccataatggccaacttctggcggttgcctcaaactattttttagaagtataaagaggagcaacaccaccaggtattcattgaaactgtggagaacttcaaaggcaagtcccgtgtgggatagagccttctaacaaaacatgttctgttcatctgttgtattgtattttgtctaccatacatgttaaaggtcaccaagatgtgacagcatgttgtattatgttgtatgactaagcattttttttaggaaacgacataatatggctaagcaatacttgtatatattggttacatctagtctgagacagctgtggtgtgttgtaactcttttgagcttttgcaaccagtattgctgttctggt

SEQ ID NO: 6684 - protein, 298 aa, Zea mays subsp. mays
  peptide (1)..(298): Ceres Seq. ID no. 12353873
  misc_feature (14)..(294): Homolog of NCBI NO: 18409261 NR Description: mitotic checkpoint protein, putative; protein id:
  misc_feature (14)..(294): Homolog of NCBI NO: 12597795 NR Description: mitotic checkpoint protein, putative [Arabidopsis
  misc_feature (14)..(294): Homolog of NCBI NO: 21593642 NR Description: mitotic checkpoint protein, putative [Arabidopsis
  misc_feature (16)..(297): Homolog of NCBI NO: 15222841 NR Description: mitotic checkpoint protein, putative; protein id: [Arabidopsis thaliana] >gi|12597855|gb|AAG60165.1|AC074110_3
  misc_feature (1)..(297): Homolog of NCBI NO: 18402300 NR Description: mitotic checkpoint protein, putative; protein id:
  misc_feature (16)..(297): Homolog of NCBI NO: 28564814 NR Description: putative mitotic checkpoint protein [Oryza sativa
  misc_feature (14)..(298): Homolog of NCBI NO: 37362190 NR Description: BUB3 budding uninhibited by benzimidazoles 3-like
  misc_feature (16)..(298): Homolog of NCBI NO: 4757880 NR Description: BUB3 budding uninhibited by benzimidazoles 3 mitotic checkpoint component; BUB3 (budding uninhibited by
  misc_feature (16)..(298): Homolog of NCBI NO: 3986296 NR Description: mitotic checkpoint [Xenopus laevis]
  misc_feature (16)..(298): Homolog of NCBI NO: 13122448 NR Description: WD repeat protein Bub3 [Xenopus laevis]
MARRSLAVDATAGAASRVRFAPTSNNLLVSSWDSGLRLYDADEGTLRVNVESEAAFLDCCFEDESAAFACGSDGSVRRYDFHSGSQDTVGLHEDALACIEFSSLTGQIMTGSLDKKLKLWDSKTRNVSPSGTITLNSDVASISICGIYILAAVERNVYLYDMRNLTRPVDEKDCPLDYQIRCLHTSLEWNAYVAGSVDGVVALKYLDRGTDRDLGYAFRCHPNSRNGKWNLVPVNCISVHPCNRTFVTGDDKGCTIVWDAQLKKKLIELPMYLGSVASVAYNHNGQLLAVASNYFLEV

SEQ ID NO: 6685 - protein, 190 aa, Zea mays subsp. mays
  peptide (1)..(190): Ceres Seq. ID no. 12353874
  misc_feature (1)..(190): Homolog of NCBI NO: 4757880 NR Description: BUB3 budding uninhibited by benzimidazoles 3 mitotic checkpoint component; BUB3 (budding uninhibited by
  misc_feature (1)..(190): Homolog of NCBI NO: 3986296 NR Description: mitotic checkpoint [Xenopus laevis]
  misc_feature (1)..(190): Homolog of NCBI NO: 13122448 NR Description: WD repeat protein Bub3 [Xenopus laevis]
  misc_feature (1)..(186): Homolog of NCBI NO: 18409261 NR Description: mitotic checkpoint protein, putative; protein id:
  misc_feature (1)..(186): Homolog of NCBI NO: 12597795 NR Description: mitotic checkpoint protein, putative [Arabidopsis
  misc_feature (1)..(186): Homolog of NCBI NO: 21593642 NR Description: mitotic checkpoint protein, putative [Arabidopsis
  misc_feature (1)..(189): Homolog of NCBI NO: 15222841 NR Description: mitotic checkpoint protein, putative; protein id: [Arabidopsis thaliana] >gi|12597855|gb|AAG60165.1|AC074110_3
  misc_feature (1)..(189): Homolog of NCBI NO: 18402300 NR Description: mitotic checkpoint protein, putative; protein id:
  misc_feature (1)..(189): Homolog of NCBI NO: 28564814 NR Description: putative mitotic checkpoint protein [Oryza sativa
  misc_feature (1)..(190): Homolog of NCBI NO: 37362190 NR Description: BUB3 budding uninhibited by benzimidazoles 3-like
MTGSLDKKLKLWDSKTRNVSPSGTITLNSDVASISICGIYILAAVERNVYLYDMRNLTRPVDEKDCPLDYQIRCLHTSLEWNAYVAGSVDGVVALKYLDRGTDRDLGYAFRCHPNSRNGKWNLVPVNCISVHPCNRTFVTGDDKGCTIVWDAQLKKKLIELPMYLGSVASVAYNHNGQLLAVASNYFLEV

SEQ ID NO: 6686 - DNA, 1274 bp, Zea mays subsp. mays
  misc_feature (1)..(1274): Ceres Seq. ID no. 12405506
  misc_feature: MA Experiment ID: 108504 Result: Down-regulated in Transcription
  misc_feature: MA Experiment 108504 PARAMETER Experiment Name: Zm_Drought_P Parameter: Age (day) Value: 8
  misc_feature: MA Experiment 108504 PARAMETER Experiment Name: Zm_Drought_P Parameter: Organism Value: Zea mays
  misc_feature: MA Experiment 108504 PARAMETER Experiment Name: Zm_Drought_P Parameter: Plant Line Value: 35A19
  misc_feature: MA Experiment 108504 PARAMETER Experiment Name: Zm_Drought_P Parameter: Timepoint (hr) Value: 12
  misc_feature: MA Experiment 108504 PARAMETER Experiment Name: Zm_Drought_P Parameter: Tissue Value: Aerial
  misc_feature: MA Experiment 108504 PARAMETER Experiment Name: Zm_Drought_P Parameter: Treatment Value: Drought vs. No Drought
  misc_feature: MA Experiment ID: 108544 Result: Down-regulated in Transcription
  misc_feature: MA Experiment ID: 108597 Result: Down-regulated in Transcription
  misc_feature: MA Experiment 108597 PARAMETER Experiment Name: Zm_100uM_ABA_P Parameter: Age (day) Value: 9
  misc_feature: MA Experiment 108597 PARAMETER Experiment Name: Zm_100uM_ABA_P Parameter: Organism Value: Zea mays
  misc_feature: MA Experiment 108597 PARAMETER Experiment Name: Zm_100uM_ABA_P Parameter: Plant Line Value: 35A19
  misc_feature: MA Experiment 108597 PARAMETER Experiment Name: Zm_100uM_ABA_P Parameter: Timepoint (hr) Value: 24
  misc_feature: MA Experiment 108597 PARAMETER Experiment Name: Zm_100uM_ABA_P Parameter: Tissue Value: Aerial
  misc_feature: MA Experiment 108597 PARAMETER Experiment Name: Zm_100uM_ABA_P Parameter: Treatment Value: 100uM ABA vs. No Treatment
  misc_feature: MA Experiment ID: 108689 Result: Down-regulated in Transcription
  misc_feature: MA Experiment 108689 PARAMETER Experiment Name: Zm_Drought_Roots_P Parameter: Age (day) Value: 9
  misc_feature: MA Experiment 108689 PARAMETER Experiment Name: Zm_Drought_Roots_P Parameter: Organism Value: Zea mays
  misc_feature: MA Experiment 108689 PARAMETER Experiment Name: Zm_Drought_Roots_P Parameter: Plant Line Value: 35A19
  misc_feature: MA Experiment 108689 PARAMETER Experiment Name: Zm_Drought_Roots_P Parameter: Timepoint (hr) Value: 24
  misc_feature: MA Experiment 108689 PARAMETER Experiment Name: Zm_Drought_Roots_P Parameter: Tissue Value: Roots
  misc_feature: MA Experiment 108689 PARAMETER Experiment Name: Zm_Drought_Roots_P Parameter: Treatment Value: Drought vs. No Drought
  misc_feature: MA Experiment ID: 20000480 Result: Down-regulated in Transcription
  misc_feature: MA Experiment 20000480 PARAMETER Experiment Name: Zm_Drought_P Parameter: Age (day) Value: 11
  misc_feature: MA Experiment 20000480 PARAMETER Experiment Name: Zm_Drought_P Parameter: Organism Value: Zea mays
  misc_feature: MA Experiment 20000480 PARAMETER Experiment Name: Zm_Drought_P Parameter: Plant Line Value: 35A19
  misc_feature: MA Experiment 20000480 PARAMETER Experiment Name: Zm_Drought_P Parameter: Timepoint (hr) Value: 72
  misc_feature: MA Experiment 20000480 PARAMETER Experiment Name: Zm_Drought_P Parameter: Tissue Value: Aerial
  misc_feature: MA Experiment 20000480 PARAMETER Experiment Name: Zm_Drought_P Parameter: Treatment Value: Drought vs. No Drought
  misc_feature: MA Experiment ID: 20000492 Result: Down-regulated in Transcription
  misc_feature: MA Experiment 20000492 PARAMETER Experiment Name: Zm_Hybrid_Seed_Dev_P Parameter: DAP Value: 12
  misc_feature: MA Experiment 20000492 PARAMETER Experiment Name: Zm_Hybrid_Seed_Dev_P Parameter: Organism Value: Zea mays
  misc_feature: MA Experiment 20000492 PARAMETER Experiment Name: Zm_Hybrid_Seed_Dev_P Parameter: Plant Line Value: 35A19
  misc_feature: MA Experiment 20000492 PARAMETER Experiment Name: Zm_Hybrid_Seed_Dev_P Parameter: Tissue Value: Fert Kernel vs. Unfert Floret
  misc_feature: MA Experiment ID: 20000535 Result: Down-regulated in Transcription
  misc_feature: MA Experiment 20000535 PARAMETER Experiment Name: Zm_Hybrid_Seed_Dev_P Parameter: DAP Value: 30 vs. 12
  misc_feature: MA Experiment 20000535 PARAMETER Experiment Name: Zm_Hybrid_Seed_Dev_P Parameter: Organism Value: Zea mays
  misc_feature: MA Experiment 20000535 PARAMETER Experiment Name: Zm_Hybrid_Seed_Dev_P Parameter: Plant Line Value: 35A19
  misc_feature: MA Experiment 20000535 PARAMETER Experiment Name: Zm_Hybrid_Seed_Dev_P Parameter: Tissue Value: Embryo vs. Unfert Floret
gtccgcctcgctgtgcctgtgttgtacttgtactactgctactgctaggtagccaactcatttcctcccccaacccaaatgggcgactccaccgccaccaacccctcctcggcgaccgcagccatggatcccgactccgaggtcgtcttcgacttccagccctacctctgccagtacaagagcggccgcatccaccggcccggcggcgcccccaccgtccccgccggcacggacccggccaccggcgtcgtctccaaggacatccgctccggccccgcctccgcgcgcgtctacctccctcccggcgccaccggcaagatcccggtgatcgtctacttccacggcggcggcttcgtggtcggctcgccggcgcggccgggcacgcacagctacctgaacgacctcgtcgcccggtcgggcgccatcggcgtgtccgtctactaccgcctcgcgccggagcacaagctgcccgccgcgtacgacgacgcgtgggcggcgctgcggtgggcggtgacgctcggcggcgaggacccgtggctgctggagcacgccgacctgtcccgcgtgttcctggcgggctgcagcgccggcgccaacatcgcgcacgacacggccgtgcgagcctccgcggccggcgcgctccccgacggcgtggccatccgcgggctcgccctggtgcacccgtacttcactggcagggaggccgtgggcggcgagacggcggcgttcggccccgagatccggccgtccatggaccggacttggcggttcgtggtgtcggacacggtggggctggacgacccgcgcgtgaacccgttcgtggacgacgcggcgcgcaaggcctccgccgggatcccgtgccagcgcgtgctggtgtgtgtggccgagaacgacttcctgctcaaggagcgcgcgctgtggtaccaccgggagatcaaggccagtggctacgccggcgaggtcgagctgttcgagtctaagggcgtcggccacgcgttccacttcgacatgctggactcggagcagggcgtcgcactccaggagcggatcgtggctttcataaataaatgaaaaccgagacgataaataagagttttcttttttttgtccactatcgattcacggagtaaatcgattgtttggtttggtccattttatccgctgtcggtccacggagtaattcgttgtctcgttttttgttagaacaatttgtatcgattcacagagctatcagtgcggtgattgatcaccagcggtatgtaactccattcctg

SEQ ID NO: 6687 - protein, 330 aa, Zea mays subsp. mays
  peptide (1)..(330): Ceres Seq. ID no. 12405507
  misc_feature (73)..(126): Pfam Name: Carboxylesterase Pfam Description: Carboxylesterase
  misc_feature (19)..(329): Homolog of NCBI NO: 38344841 NR Description: OSJNBa0064H22.22 [Oryza sativa (japonica
  misc_feature (21)..(330): Homolog of NCBI NO: 18401743 NR Description: expressed protein; protein id: At1g47480.1, by cDNA: 111056. [Arabidopsis thaliana] >gi|25405208|pir||A96515
  misc_feature (21)..(330): Homolog of NCBI NO: 21536771 NR Description: unknown [Arabidopsis thaliana]
  misc_feature (21)..(330): Homolog of NCBI NO: 34393904 NR Description: putative cell death associated protein [Oryza
  misc_feature (19)..(328): Homolog of NCBI NO: 18086341 NR Description: AT3g48690/T8P19_200 [Arabidopsis thaliana]
  misc_feature (19)..(328): Homolog of NCBI NO: 15228425 NR Description: putative protein; protein id: At3g48690.1, by cDNA: gi_18086340 [Arabidopsis thaliana]
  misc_feature (19)..(328): Homolog of NCBI NO: 15228426 NR Description: putative protein; protein id: At3g48700.1
  misc_feature (19)..(330): Homolog of NCBI NO: 15221975 NR Description: hypothetical protein; protein id: At1g19190.1
  misc_feature (19)..(330): Homolog of NCBI NO: 15227669 NR Description: putative esterase; protein id: At2g03550.1
  misc_feature (22)..(330): Homolog of NCBI NO: 28393060 NR Description: putative esterase [Arabidopsis thaliana]
MGDSTATNPSSATAAMDPDSEVVFDFQPYLCQYKSGRIHRPGGAPTVPAGTDPATGVVSKDIRSGPASARVYLPPGATGKIPVIVYFHGGGFVVGSPARPGTHSYLNDLVARSGAIGVSVYYRLAPEHKLPAAYDDAWAALRWAVTLGGEDPWLLEHADLSRVFLAGCSAGANIAHDTAVRASAAGALPDGVAIRGLALVHPYFTGREAVGGETAAFGPEIRPSMDRTWRFVVSDTVGLDDPRVNPFVDDAARKASAGIPCQRVLVCVAENDFLLKERALWYHREIKASGYAGEVELFESKGVGHAFHFDMLDSEQGVALQERIVAFINK

SEQ ID NO: 6688 - protein, 325 aa, Zea mays subsp. mays
  peptide (1)..(325): Ceres Seq. ID no. 12405508
  misc_feature (117)..(223): Pfam Name: Cupin Pfam Description: Cupin
  misc_feature (25)..(325): Homolog of NCBI NO: 23018055 NR Description: hypothetical protein [Thermobifida fusca]
PPRCACVVLVLLLLLGSQLISSPNPNGRLHRHQPLLGDRSHGSRLRGRLRLPALPLPVQERPHPPARRRPHRPRRHGPGHRRRLQGHPLRPRLRARLPPSRRHRQDPGDRLLPRRRLRGRLAGAAGHAQLPERPRRPVGRHRRVRLLPPRAGAQAARRVRRRVGGAAVGGDARRRGPVAAGARRPVPRVPGGLQRRRQHRARHGRASLRGRRAPRRRGHPRARPGAPVLHWQGGRGRRDGGVRPRDPAVHGPDLAVRGVGHGGAGRPAREPVRGRRGAQGLRRDPVPARAGVCGRERLPAQGARAVVPPGDQGQWLRRRGRAVRV

SEQ ID NO: 6689 - protein, 315 aa, Zea mays subsp. mays
  peptide (1)..(315): Ceres Seq. ID no. 12405509
  misc_feature (58)..(111): Pfam Name: Carboxylesterase Pfam Description: Carboxylesterase
  misc_feature (4)..(314): Homolog of NCBI NO: 38344841 NR Description: OSJNBa0064H22.22 [Oryza sativa (japonica
  misc_feature (6)..(315): Homolog of NCBI NO: 18401743 NR Description: expressed protein; protein id: At1g47480.1, by cDNA: 111056. [Arabidopsis thaliana] >gi|25405208|pir||A96515
  misc_feature (6)..(315): Homolog of NCBI NO: 21536771 NR Description: unknown [Arabidopsis thaliana]
  misc_feature (6)..(315): Homolog of NCBI NO: 34393904 NR Description: putative cell death associated protein [Oryza
  misc_feature (4)..(313): Homolog of NCBI NO: 18086341 NR Description: AT3g48690/T8P19_200 [Arabidopsis thaliana]
  misc_feature (4)..(313): Homolog of NCBI NO: 15228425 NR Description: putative protein; protein id: At3g48690.1, by cDNA: gi_18086340 [Arabidopsis thaliana]
  misc_feature (4)..(313): Homolog of NCBI NO: 15228426 NR Description: putative protein; protein id: At3g48700.1
  misc_feature (4)..(315): Homolog of NCBI NO: 15221975 NR Description: hypothetical protein; protein id: At1g19190.1
  misc_feature (4)..(315): Homolog of NCBI NO: 15227669 NR Description: putative esterase; protein id: At2g03550.1
  misc_feature (7)..(315): Homolog of NCBI NO: 28393060 NR Description: putative esterase [Arabidopsis thaliana]
MDPDSEVVFDFQPYLCQYKSGRIHRPGGAPTVPAGTDPATGVVSKDIRSGPASARVYLPPGATGKIPVIVYFHGGGFVVGSPARPGTHSYLNDLVARSGAIGVSVYYRLAPEHKLPAAYDDAWAALRWAVTLGGEDPWLLEHADLSRVFLAGCSAGANIAHDTAVRASAAGALPDGVAIRGLALVHPYFTGREAVGGETAAFGPEIRPSMDRTWRFVVSDTVGLDDPRVNPFVDDAARKASAGIPCQRVLVCVAENDFLLKERALWYHREIKASGYAGEVELFESKGVGHAFHFDMLDSEQGVALQERIVAFINK

SEQ ID NO: 6690 - DNA, 1280 bp, Zea mays subsp. mays
  misc_feature (1)..(1280): Ceres Seq. ID no. 12405502
  misc_feature: MA Experiment ID: 108504 Result: Down-regulated in Transcription
  misc_feature: MA Experiment 108504 PARAMETER Experiment Name: Zm_Drought_P Parameter: Age (day) Value: 8
  misc_feature: MA Experiment 108504 PARAMETER Experiment Name: Zm_Drought_P Parameter: Organism Value: Zea mays
  misc_feature: MA Experiment 108504 PARAMETER Experiment Name: Zm_Drought_P Parameter: Plant Line Value: 35A19
  misc_feature: MA Experiment 108504 PARAMETER Experiment Name: Zm_Drought_P Parameter: Timepoint (hr) Value: 12
  misc_feature: MA Experiment 108504 PARAMETER Experiment Name: Zm_Drought_P Parameter: Tissue Value: Aerial
  misc_feature: MA Experiment 108504 PARAMETER Experiment Name: Zm_Drought_P Parameter: Treatment Value: Drought vs. No Drought
  misc_feature: MA Experiment ID: 108522 Result: Down-regulated in Transcription
  misc_feature: MA Experiment 108522 PARAMETER Experiment Name: Zm_42deg_Heat_P Parameter: Age (day) Value: 8
  misc_feature: MA Experiment 108522 PARAMETER Experiment Name: Zm_42deg_Heat_P Parameter: Organism Value: Zea mays
  misc_feature: MA Experiment 108522 PARAMETER Experiment Name: Zm_42deg_Heat_P Parameter: Plant Line Value: 35A19
  misc_feature: MA Experiment 108522 PARAMETER Experiment Name: Zm_42deg_Heat_P Parameter: Temperature (deg C) Value: 42 vs. 22
  misc_feature: MA Experiment 108522 PARAMETER Experiment Name: Zm_42deg_Heat_P Parameter: Timepoint (hr) Value: 1
  misc_feature: MA Experiment 108522 PARAMETER Experiment Name: Zm_42deg_Heat_P Parameter: Tissue Value: Aerial
  misc_feature: MA Experiment ID: 108527 Result: Down-regulated in Transcription
  misc_feature: MA Experiment 108527 PARAMETER Experiment Name: Zm_5mM_NO_P Parameter: Age (day) Value: 8
  misc_feature: MA Experiment 108527 PARAMETER Experiment Name: Zm_5mM_NO_P Parameter: Organism Value: Zea mays
  misc_feature: MA Experiment 108527 PARAMETER Experiment Name: Zm_5mM_NO_P Parameter: Plant Line Value: 35A19
  misc_feature: MA Experiment 108527 PARAMETER Experiment Name: Zm_5mM_NO_P Parameter: Timepoint (hr) Value: 6
  misc_feature: MA Experiment 108527 PARAMETER Experiment Name: Zm_5mM_NO_P Parameter: Tissue Value: Aerial
  misc_feature: MA Experiment 108527 PARAMETER Experiment Name: Zm_5mM_NO_P Parameter: Treatment Value: 5mM NO vs. No Treatment
  misc_feature: MA Experiment ID: 108528 Result: Down-regulated in Transcription
  misc_feature: MA Experiment 108528 PARAMETER Experiment Name: Zm_Imbibed_Seeds_P Parameter: Age (day) Value: 5 vs. 2
  misc_feature: MA Experiment 108528 PARAMETER Experiment Name: Zm_Imbibed_Seeds_P Parameter: Organism Value: Zea mays
  misc_feature: MA Experiment 108528 PARAMETER Experiment Name: Zm_Imbibed_Seeds_P Parameter: Plant Line Value: 35A19
  misc_feature: MA Experiment 108528 PARAMETER Experiment Name: Zm_Imbibed_Seeds_P Parameter: Tissue Value: Aerial vs. Embryo
  misc_feature: MA Experiment ID: 108529 Result: Up-regulated in Transcription
  misc_feature: MA Experiment 108529 PARAMETER Experiment Name: Zm_Imbibed_Seeds_P Parameter: Age (day) Value: 5 vs. 2
  misc_feature: MA Experiment 108529 PARAMETER Experiment Name: Zm_Imbibed_Seeds_P Parameter: Organism Value: Zea mays
  misc_feature: MA Experiment 108529 PARAMETER Experiment Name: Zm_Imbibed_Seeds_P Parameter: Plant Line Value: 35A19
  misc_feature: MA Experiment 108529 PARAMETER Experiment Name: Zm_Imbibed_Seeds_P Parameter: Tissue Value: Roots vs. Embryo
  misc_feature: MA Experiment ID: 108540 Result: Down-regulated in Transcription
  misc_feature: MA Experiment 108540 PARAMETER Experiment Name: Zm_20percent_PEG_P Parameter: Age (day) Value: 8
  misc_feature: MA Experiment 108540 PARAMETER Experiment Name: Zm_20percent_PEG_P Parameter: Organism Value: Zea mays
  misc_feature: MA Experiment 108540 PARAMETER Experiment Name: Zm_20percent_PEG_P Parameter: Plant Line Value: 35A19
  misc_feature: MA Experiment 108540 PARAMETER Experiment Name: Zm_20percent_PEG_P Parameter: Timepoint (hr) Value: 6
  misc_feature: MA Experiment 108540 PARAMETER Experiment Name: Zm_20percent_PEG_P Parameter: Tissue Value: Aerial
  misc_feature: MA Experiment 108540 PARAMETER Experiment Name: Zm_20percent_PEG_P Parameter: Treatment Value: 20percent PEG vs. No Treatment
  misc_feature: MA Experiment ID: 108542 Result: Down-regulated in Transcription
  misc_feature: MA Experiment 108542 PARAMETER Experiment Name: Zm_150mM_NaCl_P Parameter: Age (day) Value: 8
  misc_feature: MA Experiment 108542 PARAMETER Experiment Name: Zm_150mM_NaCl_P Parameter: Organism Value: Zea mays
  misc_feature: MA Experiment 108542 PARAMETER Experiment Name: Zm_150mM_NaCl_P Parameter: Plant Line Value: 35A19
  misc_feature: MA Experiment 108542 PARAMETER Experiment Name: Zm_150mM_NaCl_P Parameter: Timepoint (hr) Value: 6
  misc_feature: MA Experiment 108542 PARAMETER Experiment Name: Zm_150mM_NaCl_P Parameter: Tissue Value: Aerial
  misc_feature: MA Experiment 108542 PARAMETER Experiment Name: Zm_150mM_NaCl_P Parameter: Treatment Value: 150mM NaCl vs. No Treatment
  misc_feature: MA Experiment ID: 108544 Result: Down-regulated in Transcription
  misc_feature: MA Experiment ID: 108545 Result: Down-regulated in Transcription
  misc_feature: MA Experiment 108545 PARAMETER Experiment Name: Zm_Imbibed_Seeds_P Parameter: Age (day) Value: 3 vs. 2
  misc_feature: MA Experiment 108545 PARAMETER Experiment Name: Zm_Imbibed_Seeds_P Parameter: Organism Value: Zea mays
  misc_feature: MA Experiment 108545 PARAMETER Experiment Name: Zm_Imbibed_Seeds_P Parameter: Plant Line Value: 35A19
  misc_feature: MA Experiment 108545 PARAMETER Experiment Name: Zm_Imbibed_Seeds_P Parameter: Tissue Value: Aerial vs. Embryo
  misc_feature: MA Experiment ID: 108547 Result: Down-regulated in Transcription
  misc_feature: MA Experiment 108547 PARAMETER Experiment Name: Zm_Imbibed_Seeds_P Parameter: Age (day) Value: 4 vs. 2
  misc_feature: MA Experiment 108547 PARAMETER Experiment Name: Zm_Imbibed_Seeds_P Parameter: Organism Value: Zea mays
  misc_feature: MA Experiment 108547 PARAMETER Experiment Name: Zm_Imbibed_Seeds_P Parameter: Plant Line Value: 35A19
  misc_feature: MA Experiment 108547 PARAMETER Experiment Name: Zm_Imbibed_Seeds_P Parameter: Tissue Value: Aerial vs. Embryo
  misc_feature: MA Experiment ID: 108597 Result: Down-regulated in Transcription
  misc_feature: MA Experiment 108597 PARAMETER Experiment Name: Zm_100uM_ABA_P Parameter: Age (day) Value: 9
  misc_feature: MA Experiment 108597 PARAMETER Experiment Name: Zm_100uM_ABA_P Parameter: Organism Value: Zea mays
  misc_feature: MA Experiment 108597 PARAMETER Experiment Name: Zm_100uM_ABA_P Parameter: Plant Line Value: 35A19
  misc_feature: MA Experiment 108597 PARAMETER Experiment Name: Zm_100uM_ABA_P Parameter: Timepoint (hr) Value: 24
  misc_feature: MA Experiment 108597 PARAMETER Experiment Name: Zm_100uM_ABA_P Parameter: Tissue Value: Aerial
  misc_feature: MA Experiment 108597 PARAMETER Experiment Name: Zm_100uM_ABA_P Parameter: Treatment Value: 100uM ABA vs. No Treatment
  misc_feature: MA Experiment ID: 108689 Result: Down-regulated in Transcription
  misc_feature: MA Experiment 108689 PARAMETER Experiment Name: Zm_Drought_Roots_P Parameter: Age (day) Value: 9
  misc_feature: MA Experiment 108689 PARAMETER Experiment Name: Zm_Drought_Roots_P Parameter: Organism Value: Zea mays
  misc_feature: MA Experiment 108689 PARAMETER Experiment Name: Zm_Drought_Roots_P Parameter: Plant Line Value: 35A19
  misc_feature: MA Experiment 108689 PARAMETER Experiment Name: Zm_Drought_Roots_P Parameter: Timepoint (hr) Value: 24
  misc_feature: MA Experiment 108689 PARAMETER Experiment Name: Zm_Drought_Roots_P Parameter: Tissue Value: Roots
  misc_feature: MA Experiment 108689 PARAMETER Experiment Name: Zm_Drought_Roots_P Parameter: Treatment Value: Drought vs. No Drought
  misc_feature: MA Experiment ID: 20000480 Result: Down-regulated in Transcription
  misc_feature: MA Experiment 20000480 PARAMETER Experiment Name: Zm_Drought_P Parameter: Age (day) Value: 11
  misc_feature: MA Experiment 20000480 PARAMETER Experiment Name: Zm_Drought_P Parameter: Organism Value: Zea mays
  misc_feature: MA Experiment 20000480 PARAMETER Experiment Name: Zm_Drought_P Parameter: Plant Line Value: 35A19
  misc_feature: MA Experiment 20000480 PARAMETER Experiment Name: Zm_Drought_P Parameter: Timepoint (hr) Value: 72
  misc_feature: MA Experiment 20000480 PARAMETER Experiment Name: Zm_Drought_P Parameter: Tissue Value: Aerial
  misc_feature: MA Experiment 20000480 PARAMETER Experiment Name: Zm_Drought_P Parameter: Treatment Value: Drought vs. No Drought
cattccatccgagattacttaacaagaacattcttgctctacccacatcacataattgacgctctgagccctgcttttgtttaacaccgatagatccatccatcagcagcatggcattcaggtcttgtctagtacggctgctgctccctatggcagcactgcttctgctcgctgcaagctcgcccgccgcggctcagctggtggccggctactacagcaagacatgcccggacgccgaggccatcgtccgcaacgagacggagaagatcatcgccgccgcgcccagcctcgccggcccacttctcaggctccatttccacgactgcttcgtcaggggttgtgatgcctcggtcctgctcgacgaccccaacgggggtaacaaggccgagaaggacgccaagccgaacaggagcctgcggggcttcggctccgtggagagagtgaaggccaagctggaagccgcatgccccagcacggtttcctgcgccgacgtcctggccctgatggcccgcgacgccgtggtgctcgccaagggcccatcctggccagtggccctggggaggcgagacggcagggtgtcgagcgccacggaagcggccgacagcctgcctcccgccttcggcgacgtcccgctgctcgccgagatcttcgccgccaacggcctcgacctcaaggacctggcccgtgctctctggcgcgcacaccctcggcacggcgcactgcccgtcgtacgccgggcggctctacaacttcagcaccgcctacggcggcgcggacccgtccctcgacagcgagtacgccgaccggctgaggacgcgctgccggagcgccgacgacacggccacgctctccgagatggaccccggcagctacaagaccttcgacacgagctactaccgccacgtcgccaagcggaggggcctcttccagtccgacgccgcgctgctcgccgacgccaccaccagggagtacgtcctgcgcatggccaccggcaggttcgacggcgtgttcttccaggacttcggcgagtccatgatcaagatgggcaacgctggcgtgctcatcggtgctgctcagggggagatcaggaagaaatgctacatcgtcaactaactagctagttattatatatacaagctagctatactacgaaagcttttaatttgtttgtttgccgcaacggaattgtagcttgctgtattaattaatcaatcagttctctacatatgttatttgcatgcttatgtatagcctattattaatggacgatagactataat

SEQ ID NO: 6691 - protein, 336 aa, Zea mays subsp. mays
  peptide (1)..(336): Ceres Seq. ID no. 12405503
  misc_feature (46)..(190): Pfam Name: Peroxidase Pfam Description: Peroxidase
  misc_feature (14)..(190): Homolog of NCBI NO: 585661 NR Description: Peroxidase 1 precursor >gi|7433074|pir||T03928
  misc_feature (1)..(198): Homolog of NCBI NO: 34915484 NR Description: putative peroxidase [Oryza sativa (japonica >gi|22324451|dbj|BAC10366.1| putative peroxidase 1 precursor
  misc_feature (9)..(190): Homolog of NCBI NO: 15232058 NR Description: peroxidase, putative; protein id: At3g01190.1, by cDNA: 37597., supported by cDNA: gi_17065467, supported by gi_20148488 [Arabidopsis thaliana]
  misc_feature (5)..(198): Homolog of NCBI NO: 15220463 NR Description: peroxidase, putative; protein id: At1g05260.1, by cDNA: 114862., supported by cDNA: gi_2738253 [Arabidopsis >gi|25453190|sp|O23044|PER3_ARATH Peroxidase 3 precursor (Atperox
  misc_feature (5)..(198): Homolog of NCBI NO: 21536908 NR Description: putative peroxidase [Arabidopsis thaliana]
  misc_feature (19)..(190): Homolog of NCBI NO: 15242237 NR Description: peroxidase, putative; protein id: At5g15180.1, by cDNA: gi_18176158 [Arabidopsis thaliana] Peroxidase 56 precursor (Atperox P56) (ATP33)
  misc_feature (8)..(198): Homolog of NCBI NO: 1402920 NR Description: peroxidase [Arabidopsis thaliana]
  misc_feature (8)..(198): Homolog of NCBI NO: 15233153 NR Description: peroxidase, putative; protein id: At3g21770.1, by cDNA: 118626., supported by cDNA: gi_18252200 [Arabidopsis >gi|25453212|sp|Q9LSY7|PE30_ARATH Peroxidase 30 precursor
  misc_feature (8)..(198): Homolog of NCBI NO: 1546704 NR Description: peroxidase ATP7a [Arabidopsis thaliana]
  misc_feature (14)..(198): Homolog of NCBI NO: 678547 NR Description: peroxidase
MAFRSCLVRLLLPMAALLLLAASSPAAAQLVAGYYSKTCPDAEAIVRNETEKIIAAAPSLAGPLLRLHFHDCFVRGCDASVLLDDPNGGNKAEKDAKPNRSLRGFGSVERVKAKLEAACPSTVSCADVLALMARDAVVLAKGPSWPVALGRRDGRVSSATEAADSLPPAFGDVPLLAEIFAANGLDLKDLARALWRAHPRHGALPVVRRAALQLQHRLRRRGPVPRQRVRRPAEDALPERRRHGHALRDGPRQLQDLRHELLPPRRQAEGPLPVRRRAARRRHHQGVRPAHGHRQVRRRVLPGLRRVHDQDGQRWRAHRCCSGGDQEEMLHRQLTS

SEQ ID NO: 6692 - protein, 323 aa, Zea mays subsp. mays
  peptide (1)..(323): Ceres Seq. ID no. 12405504
  misc_feature (33)..(177): Pfam Name: Peroxidase Pfam Description: Peroxidase
  misc_feature (1)..(177): Homolog of NCBI NO: 585661 NR Description: Peroxidase 1 precursor >gi|7433074|pir||T03928
  misc_feature (1)..(185): Homolog of NCBI NO: 34915484 NR Description: putative peroxidase [Oryza sativa (japonica >gi|22324451|dbj|BAC10366.1| putative peroxidase 1 precursor
  misc_feature (1)..(177): Homolog of NCBI NO: 15232058 NR Description: peroxidase, putative; protein id: At3g01190.1, by cDNA: 37597., supported by cDNA: gi_17065467, supported by gi_20148488 [Arabidopsis thaliana]
  misc_feature (1)..(185): Homolog of NCBI NO: 15220463 NR Description: peroxidase, putative; protein id: At1g05260.1, by cDNA: 114862., supported by cDNA: gi_2738253 [Arabidopsis >gi|25453190|sp|O23044|PER3_ARATH Peroxidase 3 precursor (Atperox
  misc_feature (1)..(185): Homolog of NCBI NO: 21536908 NR Description: putative peroxidase [Arabidopsis thaliana]
  misc_feature (6)..(177): Homolog of NCBI NO: 15242237 NR Description: peroxidase, putative; protein id: At5g15180.1, by cDNA: gi_18176158 [Arabidopsis thaliana] Peroxidase 56 precursor (Atperox P56) (ATP33)
  misc_feature (1)..(185): Homolog of NCBI NO: 1402920 NR Description: peroxidase [Arabidopsis thaliana]
  misc_feature (1)..(185): Homolog of NCBI NO: 15233153 NR Description: peroxidase, putative; protein id: At3g21770.1, by cDNA: 118626., supported by cDNA: gi_18252200 [Arabidopsis >gi|25453212|sp|Q9LSY7|PE30_ARATH Peroxidase 30 precursor
  misc_feature (1)..(185): Homolog of NCBI NO: 1546704 NR Description: peroxidase ATP7a [Arabidopsis thaliana]
  misc_feature (1)..(185): Homolog of NCBI NO: 678547 NR Description: peroxidase
MAALLLLAASSPAAAQLVAGYYSKTCPDAEAIVRNETEKIIAAAPSLAGPLLRLHFHDCFVRGCDASVLLDDPNGGNKAEKDAKPNRSLRGFGSVERVKAKLEAACPSTVSCADVLALMARDAVVLAKGPSWPVALGRRDGRVSSATEAADSLPPAFGDVPLLAEIFAANGLDLKDLARALWRAHPRHGALPVVRRAALQLQHRLRRRGPVPRQRVRRPAEDALPERRRHGHALRDGPRQLQDLRHELLPPRRQAEGPLPVRRRAARRRHHQGVRPAHGHRQVRRRVLPGLRRVHDQDGQRWRAHRCCSGGDQEEMLHRQLTS

SEQ ID NO: 6693 - protein, 205 aa, Zea mays subsp. mays
  peptide (1)..(205): Ceres Seq. ID no. 12405505
  misc_feature (1)..(59): Pfam Name: Peroxidase Pfam Description: Peroxidase
  misc_feature (1)..(59): Homolog of NCBI NO: 585661 NR Description: Peroxidase 1 precursor >gi|7433074|pir||T03928
  misc_feature (1)..(67): Homolog of NCBI NO: 34915484 NR Description: putative peroxidase [Oryza sativa (japonica >gi|22324451|dbj|BAC10366.1| putative peroxidase 1 precursor
  misc_feature (1)..(59): Homolog of NCBI NO: 15232058 NR Description: peroxidase, putative; protein id: At3g01190.1, by cDNA: 37597., supported by cDNA: gi_17065467, supported by gi_20148488 [Arabidopsis thaliana]
  misc_feature (1)..(67): Homolog of NCBI NO: 15220463 NR Description: peroxidase, putative; protein id: At1g05260.1, by cDNA: 114862., supported by cDNA: gi_2738253 [Arabidopsis >gi|25453190|sp|O23044|PER3_ARATH Peroxidase 3 precursor (Atperox
  misc_feature (1)..(67): Homolog of NCBI NO: 21536908 NR Description: putative peroxidase [Arabidopsis thaliana]
  misc_feature (1)..(59): Homolog of NCBI NO: 15242237 NR Description: peroxidase, putative; protein id: At5g15180.1, by cDNA: gi_18176158 [Arabidopsis thaliana] Peroxidase 56 precursor (Atperox P56) (ATP33)
  misc_feature (1)..(67): Homolog of NCBI NO: 1402920 NR Description: peroxidase [Arabidopsis thaliana]
  misc_feature (1)..(67): Homolog of NCBI NO: 1546704 NR Description: peroxidase ATP7a [Arabidopsis thaliana]
  misc_feature (1)..(67): Homolog of NCBI NO: 15233153 NR Description: peroxidase, putative; protein id: At3g21770.1, by cDNA: 118626., supported by cDNA: gi_18252200 [Arabidopsis >gi|25453212|sp|Q9LSY7|PE30_ARATH Peroxidase 30 precursor
  misc_feature (1)..(67): Homolog of NCBI NO: 678547 NR Description: peroxidase
MARDAVVLAKGPSWPVALGRRDGRVSSATEAADSLPPAFGDVPLLAEIFAANGLDLKDLARALWRAHPRHGALPVVRRAALQLQHRLRRRGPVPRQRVRRPAEDALPERRRHGHALRDGPRQLQDLRHELLPPRRQAEGPLPVRRRAARRRHHQGVRPAHGHRQVRRRVLPGLRRVHDQDGQRWRAHRCCSGGDQEEMLHRQLTS

SEQ ID NO: 6694 - DNA, 1472 bp, Zea mays subsp. mays
  misc_feature (1)..(1472): Ceres Seq. ID no. 12409035
  misc_feature: MA Experiment ID: 108522 Result: Up-regulated in Transcription
  misc_feature: MA Experiment 108522 PARAMETER Experiment Name: Zm_42deg_Heat_P Parameter: Age (day) Value: 8
  misc_feature: MA Experiment 108522 PARAMETER Experiment Name: Zm_42deg_Heat_P Parameter: Organism Value: Zea mays
  misc_feature: MA Experiment 108522 PARAMETER Experiment Name: Zm_42deg_Heat_P Parameter: Plant Line Value: 35A19
  misc_feature: MA Experiment 108522 PARAMETER Experiment Name: Zm_42deg_Heat_P Parameter: Temperature (deg C) Value: 42 vs. 22
  misc_feature: MA Experiment 108522 PARAMETER Experiment Name: Zm_42deg_Heat_P Parameter: Timepoint (hr) Value: 1
  misc_feature: MA Experiment 108522 PARAMETER Experiment Name: Zm_42deg_Heat_P Parameter: Tissue Value: Aerial
  misc_feature: MA Experiment ID: 108527 Result: Up-regulated in Transcription
  misc_feature: MA Experiment 108527 PARAMETER Experiment Name: Zm_5mM_NO_P Parameter: Age (day) Value: 8
  misc_feature: MA Experiment 108527 PARAMETER Experiment Name: Zm_5mM_NO_P Parameter: Organism Value: Zea mays
  misc_feature: MA Experiment 108527 PARAMETER Experiment Name: Zm_5mM_NO_P Parameter: Plant Line Value: 35A19
  misc_feature: MA Experiment 108527 PARAMETER Experiment Name: Zm_5mM_NO_P Parameter: Timepoint (hr) Value: 6
  misc_feature: MA Experiment 108527 PARAMETER Experiment Name: Zm_5mM_NO_P Parameter: Tissue Value: Aerial
  misc_feature: MA Experiment 108527 PARAMETER Experiment Name: Zm_5mM_NO_P Parameter: Treatment Value: 5mM NO vs. No Treatment
  misc_feature: MA Experiment ID: 108689 Result: Down-regulated in Transcription
  misc_feature: MA Experiment 108689 PARAMETER Experiment Name: Zm_Drought_Roots_P Parameter: Age (day) Value: 9
  misc_feature: MA Experiment 108689 PARAMETER Experiment Name: Zm_Drought_Roots_P Parameter: Organism Value: Zea mays
  misc_feature: MA Experiment 108689 PARAMETER Experiment Name: Zm_Drought_Roots_P Parameter: Plant Line Value: 35A19
  misc_feature: MA Experiment 108689 PARAMETER Experiment Name: Zm_Drought_Roots_P Parameter: Timepoint (hr) Value: 24
  misc_feature: MA Experiment 108689 PARAMETER Experiment Name: Zm_Drought_Roots_P Parameter: Tissue Value: Roots
  misc_feature: MA Experiment 108689 PARAMETER Experiment Name: Zm_Drought_Roots_P Parameter: Treatment Value: Drought vs. No Drought
  misc_feature: MA Experiment ID: 20000478 Result: Up-regulated in Transcription
  misc_feature: MA Experiment 20000478 PARAMETER Experiment Name: Zm_5mM_SA_P Parameter: Age (day) Value: 11
  misc_feature: MA Experiment 20000478 PARAMETER Experiment Name: Zm_5mM_SA_P Parameter: Organism Value: Zea mays
  misc_feature: MA Experiment 20000478 PARAMETER Experiment Name: Zm_5mM_SA_P Parameter: Plant Line Value: 35A19
  misc_feature: MA Experiment 20000478 PARAMETER Experiment Name: Zm_5mM_SA_P Parameter: Timepoint (hr) Value: 72
  misc_feature: MA Experiment 20000478 PARAMETER Experiment Name: Zm_5mM_SA_P Parameter: Tissue Value: Aerial
  misc_feature: MA Experiment 20000478 PARAMETER Experiment Name: Zm_5mM_SA_P Parameter: Treatment Value: 5mM SA vs. No Treatment
  misc_feature: MA Experiment ID: 20001606 Result: Up-regulated in Transcription
  misc_feature: MA Experiment 20001606 PARAMETER Experiment Name: Zm_50ppm_KNO3_L-to-H_P Parameter: Age (day) Value: 19
  misc_feature: MA Experiment 20001606 PARAMETER Experiment Name: Zm_50ppm_KNO3_L-to-H_P Parameter: Organism Value: Zea mays
  misc_feature: MA Experiment 20001606 PARAMETER Experiment Name: Zm_50ppm_KNO3_L-to-H_P Parameter: Plant Line Value: 35A19
  misc_feature: MA Experiment 20001606 PARAMETER Experiment Name: Zm_50ppm_KNO3_L-to-H_P Parameter: Timepoint (hr) Value: 8
  misc_feature: MA Experiment 20001606 PARAMETER Experiment Name: Zm_50ppm_KNO3_L-to-H_P Parameter: Tissue Value: Shoots
  misc_feature: MA Experiment 20001606 PARAMETER Experiment Name: Zm_50ppm_KNO3_L-to-H_P Parameter: Treatment Value: 50ppm KNO3 vs. 50ppm KCl
actctcctctcctctccgcctcaccttgccctgcccgcacacaccacctgtccccgcacggccgcaccgctccgctcccgaggcttagggctccggccgcgctcccttcccttcccggcattcccgatctctcgccgccgcccgcctggccttgatctcgatcgccctcccctctccgctctcgctccggcaggccggcccgggtttgtctcgccgctattgggcctcggcacgctgcgatggtgtcgggcgtgtgcgtggggacggaggggcaggtggaccctgaggcggtggcgccggctgtcgcggaggaggcggtggtgccggcgcccgcgagggaggtcgtggtggggtacgcgctcacgagtaagaaggccaagagcttcctccaacccaagctccggggggctcgccaggaaaaagggaatcttgtttgtcgctattgatcagaaacgcccattgtctgatcaaggtccatttgacattgttcttcataagttgactggaagggggtggcagcaattgctggaggaatatagggaggcacacccagaagttactgttcttgatccacctggcgcaatagcaaacttgcttgatcgccagtctatgcttcaagaagtatctgaattggacctcacagattgtcatggtaaagtacgtgtgcctaagcagctattcgttaatactgatccctcatcaataccagctgcagttaggagggcaggtctctctctcccattggtggcaaaacccttggtggcgaagtcccatgagctatcccttgcttatgatccaacttcactgaccaaacttgagccccccttggttcttcaggaatttgttaaccatggtggcgtcatgtttaaggtgtacattgttggggatgcaataagggttgtacgtcgattttcactcccaaatgttgatgaaggcgatctatcgaacaatgctggggtatttcggtttccaagggtctcttgtgctgcagccagtgcagatgatgcagatcttgaccctcgtgttgctgaacttcctccgagaccattgcttgagatcttggcacgagagctgcgccgacgactgggtcttagactattcaacatcgatatgattagggagcatgggacgcgagatcggttttatgtcatagacatgaactactttcctgggtacggcaaaatgcctggatacgagcacgtgttcaccgacttcctgctgagccttgccaagaaagagtacaagagacgacaaagctatagctcgctaagctcaggcgaatggtgataagcgaggagactactcggcggggcatgtatatgtctatcatccacgatgcgtgcgtacagatgtacttgtgcatgacgagagataatgggtcgtagaagcggagggctgttgtcaggctataactaactgttgctttacatgtgctaactgttgatgcttcagaataaattttgtttgggtgg

SEQ ID NO: 6695 - protein, 428 aa, Zea mays subsp. mays
  peptide (1)..(428): Ceres Seq. ID no. 12409036
  misc_feature (132)..(408): Pfam Name: Inositol 1, 3, 4-trisphosphate 5/6-kinase Pfam Description: Inositol 1, 3, 4-trisphosphate 5/6-kinase
  misc_feature (132)..(417): Homolog of NCBI NO: 18413088 NR Description: inositol 1,3,4-trisphosphate 5/6-kinase-like protein id: At4g08170.1, supported by cDNA: gi_15215757, by cDNA: gi_16323319 [Arabidopsis thaliana]
  misc_feature (124)..(421): Homolog of NCBI NO: 37530372 NR Description: putative inositol 1,3,4-trisphosphate 5/6-kinase
  misc_feature (139)..(416): Homolog of NCBI NO: 27311236 NR Description: Putative inositol 1,3,4-trisphosphate 5/6-kinase
  misc_feature (132)..(391): Homolog of NCBI NO: 7487925 NR Description: inositol 1,3,4-trisphosphate 5/6-kinase homolog
  misc_feature (169)..(417): Homolog of NCBI NO: 30680654 NR Description: inositol 1,3,4-trisphosphate 5/6-kinase-related
  misc_feature (249)..(418): Homolog of NCBI NO: 30689810 NR Description: expressed protein [Arabidopsis thaliana]
  misc_feature (124)..(248): Homolog of NCBI NO: 30689810 NR Description: expressed protein [Arabidopsis thaliana]
  misc_feature (249)..(391): Homolog of NCBI NO: 7487088 NR Description: hypothetical protein T16L1.260 - Arabidopsis >gi|3549679|emb|CAA20590.1| putative protein [Arabidopsis >gi|7270326|emb|CAB80094.1| putative protein [Arabidopsis
  misc_feature (124)..(248): Homolog of NCBI NO: 7487088 NR Description: hypothetical protein T16L1.260 - Arabidopsis >gi|3549679|emb|CAA20590.1| putative protein [Arabidopsis >gi|7270326|emb|CAB80094.1| putative protein [Arabidopsis
  misc_feature (124)..(413): Homolog of NCBI NO: 37537118 NR Description: putative inositol 1,3,4-trisphosphate 5/6-kinase
TLLSSPPHLALPAHTTCPRTAAPLRSRGLGLRPRSLPFPAFPISRRRPPGLDLDRPPLSALAPAGRPGFVSPLLGLGTLRWCRACAWGRRGRWTLRRWRRLSRRRRWCRRPRGRSWWGTRSRVRRPRASSNPSSGGLARKKGILFVAIDQKRPLSDQGPFDIVLHKLTGRGWQQLLEEYREAHPEVTVLDPPGAIANLLDRQSMLQEVSELDLTDCHGKVRVPKQLFVNTDPSSIPAAVRRAGLSLPLVAKPLVAKSHELSLAYDPTSLTKLEPPLVLQEFVNHGGVMFKVYIVGDAIRVVRRFSLPNVDEGDLSNNAGVFRFPRVSCAAASADDADLDPRVAELPPRPLLEILARELRRRLGLRLFNIDMIREHGTRDRFYVIDMNYFPGYGKMPGYEHVFTDFLLSLAKKEYKRRQSYSSLSSGEW

SEQ ID NO: 6696 - protein, 225 aa, Zea mays subsp. mays
  peptide (1)..(225): Ceres Seq. ID no. 12409037
  misc_feature (1)..(205): Pfam Name: Inositol 1, 3, 4-trisphosphate 5/6-kinase Pfam Description: Inositol 1, 3, 4-trisphosphate 5/6-kinase
  misc_feature (1)..(214): Homolog of NCBI NO: 18413088 NR Description: inositol 1,3,4-trisphosphate 5/6-kinase-like protein id: At4g08170.1, supported by cDNA: gi_15215757, by cDNA: gi_16323319 [Arabidopsis thaliana]
  misc_feature (1)..(218): Homolog of NCBI NO: 37530372 NR Description: putative inositol 1,3,4-trisphosphate 5/6-kinase
  misc_feature (1)..(213): Homolog of NCBI NO: 27311236 NR Description: Putative inositol 1,3,4-trisphosphate 5/6-kinase
  misc_feature (1)..(188): Homolog of NCBI NO: 7487925 NR Description: inositol 1,3,4-trisphosphate 5/6-kinase homolog
  misc_feature (1)..(214): Homolog of NCBI NO: 30680654 NR Description: inositol 1,3,4-trisphosphate 5/6-kinase-related
  misc_feature (46)..(215): Homolog of NCBI NO: 30689810 NR Description: expressed protein [Arabidopsis thaliana]
  misc_feature (1)..(45): Homolog of NCBI NO: 30689810 NR Description: expressed protein [Arabidopsis thaliana]
  misc_feature (46)..(188): Homolog of NCBI NO: 7487088 NR Description: hypothetical protein T16L1.260 - Arabidopsis >gi|3549679|emb|CAA20590.1| putative protein [Arabidopsis >gi|7270326|emb|CAB80094.1| putative protein [Arabidopsis
  misc_feature (1)..(45): Homolog of NCBI NO: 7487088 NR Description: hypothetical protein T16L1.260 - Arabidopsis >gi|3549679|emb|CAA20590.1| putative protein [Arabidopsis >gi|7270326|emb|CAB80094.1| putative protein [Arabidopsis
  misc_feature (1)..(210): Homolog of NCBI NO: 37537118 NR Description: putative inositol 1,3,4-trisphosphate 5/6-kinase
MLQEVSELDLTDCHGKVRVPKQLFVNTDPSSIPAAVRRAGLSLPLVAKPLVAKSHELSLAYDPTSLTKLEPPLVLQEFVNHGGVMFKVYIVGDAIRVVRRFSLPNVDEGDLSNNAGVFRFPRVSCAAASADDADLDPRVAELPPRPLLEILARELRRRLGLRLFNIDMIREHGTRDRFYVIDMNYFPGYGKMPGYEHVFTDFLLSLAKKEYKRRQSYSSLSSGEW

SEQ ID NO: 6697 - DNA, 1041 bp, Zea mays subsp. mays
  misc_feature (1)..(1041): Ceres Seq. ID no. 12412692
  misc_feature: MA Experiment ID: 108687 Result: Up-regulated in Transcription
  misc_feature: MA Experiment 108687 PARAMETER Experiment Name: Zm_Embryos-Flowers__P Parameter: Tissue Value: Embryo vs. Aerial+
  misc_feature: MA Experiment ID: 108689 Result: Down-regulated in Transcription
  misc_feature: MA Experiment 108689 PARAMETER Experiment Name: Zm_Drought_Roots_P Parameter: Age (day) Value: 9
  misc_feature: MA Experiment 108689 PARAMETER Experiment Name: Zm_Drought_Roots_P Parameter: Organism Value: Zea mays
  misc_feature: MA Experiment 108689 PARAMETER Experiment Name: Zm_Drought_Roots_P Parameter: Plant Line Value: 35A19
  misc_feature: MA Experiment 108689 PARAMETER Experiment Name: Zm_Drought_Roots_P Parameter: Timepoint (hr) Value: 24
  misc_feature: MA Experiment 108689 PARAMETER Experiment Name: Zm_Drought_Roots_P Parameter: Tissue Value: Roots
  misc_feature: MA Experiment 108689 PARAMETER Experiment Name: Zm_Drought_Roots_P Parameter: Treatment Value: Drought vs. No Drought
  misc_feature: MA Experiment ID: 20000492 Result: Up-regulated in Transcription
  misc_feature: MA Experiment 20000492 PARAMETER Experiment Name: Zm_Hybrid_Seed_Dev_P Parameter: DAP Value: 12
  misc_feature: MA Experiment 20000492 PARAMETER Experiment Name: Zm_Hybrid_Seed_Dev_P Parameter: Organism Value: Zea mays
  misc_feature: MA Experiment 20000492 PARAMETER Experiment Name: Zm_Hybrid_Seed_Dev_P Parameter: Plant Line Value: 35A19
  misc_feature: MA Experiment 20000492 PARAMETER Experiment Name: Zm_Hybrid_Seed_Dev_P Parameter: Tissue Value: Fert Kernel vs. Unfert Floret
gaaaatacatcgccatttccccaatttaccgctgacaccctccacaaaccgcgaatttcctccccggctcctctccctcctccccagtcaatccccacacagtctcggccgggccctcgcgaggccgccgtggaaggacccccagcgatgggctccggcgaggaggacacaggaggcggaggaggggcggtgcggggcgcggtgctgaaggcgctcgtggttgtcggcggcgtcctgctgctccgccgcctgcgccgctccactacccgatgggaccacgcgcgagccgtcgccgacgcgctctccggagaaaagttctcgagggagcaggcgaggaaggatcctgacaacttcttcaatttgagaatgctcacatgtcctgcaaccgagatggtggatggttcaagggtgctttactttgagcaggcattttggagatctccagaaaagccttttagacaaagattctacatggtaaagccctgtccgaaggagatgaaatgcgatgttgagttgagttcatatgcaattagggatgctgaagagtacaagaatttctgtgaccgtcaaaaggatcagaggccacaggcagaagaagtaattgcagatatcgcagagcatctgaccaccatacacttgtcacgatgcggacgaggaaagcgttgcttatacgaaggatctaccccacctgaaggttttcccaacaactggagcggcgcgtcgtactgtacgtcggatctgtccatccacaaaaacggcgaagtacatatctgggacaaaggttttgacgacgaagggaaccaggtttgggggaccaaggctggcccctacgagttcaagcctgctcccaaatccaaatatgacgacatgttctcgccgttaaatttctcggctcctttgtcgctagagaagaagctggataaagcatatgtaattgatgaccagtagggcctgccctaaatttttgttcataggaatggaataagtgaatagaatgtatatgtatatactgtactgagttataatgcattctttgttttg

SEQ ID NO: 6698 - protein, 315 aa, Zea mays subsp. mays
  peptide (1)..(315): Ceres Seq. ID no. 12412693
  misc_feature (51)..(314): Homolog of NCBI NO: 15241343 NR Description: putative protein; protein id: At5g51020.1, by cDNA: 258748., supported by cDNA: gi_13877866, supported by gi_21281134 [Arabidopsis thaliana] >gi|9758249|dbj|BAB08748.1|
  misc_feature (51)..(314): Homolog of NCBI NO: 21554618 NR Description: unknown [Arabidopsis thaliana]
  misc_feature (97)..(280): Homolog of NCBI NO: 37520007 NR Description: hypothetical protein glr0438 [Gloeobacter
ENTSPFPQFTADTLHKPRISSPAPLPPPQSIPTQSRPGPREAAVEGPPAMGSGEEDTGGGGGAVRGAVLKALVVVGGVLLLRRLRRSTTRWDHARAVADALSGEKFSREQARKDPDNFFNLRMLTCPATEMVDGSRVLYFEQAFWRSPEKPFRQRFYMVKPCPKEMKCDVELSSYAIRDAEEYKNFCDRQKDQRPQAEEVIADIAEHLTTIHLSRCGRGKRCLYEGSTPPEGFPNNWSGASYCTSDLSIHKNGEVHIWDKGFDDEGNQVWGTKAGPYEFKPAPKSKYDDMFSPLNFSAPLSLEKKLDKAYVIDDQ

SEQ ID NO: 6699 - protein, 266 aa, Zea mays subsp. mays
  peptide (1)..(266): Ceres Seq. ID no. 12412694
  misc_feature (2)..(265): Homolog of NCBI NO: 15241343 NR Description: putative protein; protein id: At5g51020.1, by cDNA: 258748., supported by cDNA: gi_13877866, supported by gi_21281134 [Arabidopsis thaliana] >gi|9758249|dbj|BAB08748.1|
  misc_feature (2)..(265): Homolog of NCBI NO: 21554618 NR Description: unknown [Arabidopsis thaliana]
  misc_feature (48)..(231): Homolog of NCBI NO: 37520007 NR Description: hypothetical protein glr0438 [Gloeobacter
MGSGEEDTGGGGGAVRGAVLKALVVVGGVLLLRRLRRSTTRWDHARAVADALSGEKFSREQARKDPDNFFNLRMLTCPATEMVDGSRVLYFEQAFWRSPEKPFRQRFYMVKPCPKEMKCDVELSSYAIRDAEEYKNFCDRQKDQRPQAEEVIADIAEHLTTIHLSRCGRGKRCLYEGSTPPEGFPNNWSGASYCTSDLSIHKNGEVHIWDKGFDDEGNQVWGTKAGPYEFKPAPKSKYDDMFSPLNFSAPLSLEKKLDKAYVIDDQ

SEQ ID NO: 6700 - protein, 193 aa, Zea mays subsp. mays
  peptide (1)..(193): Ceres Seq. ID no. 12412695
  misc_feature (1)..(192): Homolog of NCBI NO: 15241343 NR Description: putative protein; protein id: At5g51020.1, by cDNA: 258748., supported by cDNA: gi_13877866, supported by gi_21281134 [Arabidopsis thaliana] >gi|9758249|dbj|BAB08748.1|
  misc_feature (1)..(192): Homolog of NCBI NO: 21554618 NR Description: unknown [Arabidopsis thaliana]
  misc_feature (1)..(158): Homolog of NCBI NO: 37520007 NR Description: hypothetical protein glr0438 [Gloeobacter
MLTCPATEMVDGSRVLYFEQAFWRSPEKPFRQRFYMVKPCPKEMKCDVELSSYAIRDAEEYKNFCDRQKDQRPQAEEVIADIAEHLTTIHLSRCGRGKRCLYEGSTPPEGFPNNWSGASYCTSDLSIHKNGEVHIWDKGFDDEGNQVWGTKAGPYEFKPAPKSKYDDMFSPLNFSAPLSLEKKLDKAYVIDDQ

SEQ ID NO: 6701 - DNA, 1439 bp, Zea mays subsp. mays
  misc_feature (1)..(1439): Ceres Seq. ID no. 12377701
  misc_feature: MA Experiment ID: 108503 Result: Up-regulated in Transcription
  misc_feature: MA Experiment 108503 PARAMETER Experiment Name: Zm_Drought_P Parameter: Age (day) Value: 8
  misc_feature: MA Experiment 108503 PARAMETER Experiment Name: Zm_Drought_P Parameter: Organism Value: Zea mays
  misc_feature: MA Experiment 108503 PARAMETER Experiment Name: Zm_Drought_P Parameter: Plant Line Value: 35A19
  misc_feature: MA Experiment 108503 PARAMETER Experiment Name: Zm_Drought_P Parameter: Timepoint (hr) Value: 6
  misc_feature: MA Experiment 108503 PARAMETER Experiment Name: Zm_Drought_P Parameter: Tissue Value: Aerial
  misc_feature: MA Experiment 108503 PARAMETER Experiment Name: Zm_Drought_P Parameter: Treatment Value: Drought vs. No Drought
  misc_feature: MA Experiment ID: 108504 Result: Up-regulated in Transcription
  misc_feature: MA Experiment 108504 PARAMETER Experiment Name: Zm_Drought_P Parameter: Age (day) Value: 8
  misc_feature: MA Experiment 108504 PARAMETER Experiment Name: Zm_Drought_P Parameter: Organism Value: Zea mays
  misc_feature: MA Experiment 108504 PARAMETER Experiment Name: Zm_Drought_P Parameter: Plant Line Value: 35A19
  misc_feature: MA Experiment 108504 PARAMETER Experiment Name: Zm_Drought_P Parameter: Timepoint (hr) Value: 12
  misc_feature: MA Experiment 108504 PARAMETER Experiment Name: Zm_Drought_P Parameter: Tissue Value: Aerial
  misc_feature: MA Experiment 108504 PARAMETER Experiment Name: Zm_Drought_P Parameter: Treatment Value: Drought vs. No Drought
  misc_feature: MA Experiment ID: 108513 Result: Up-regulated in Transcription
  misc_feature: MA Experiment 108513 PARAMETER Experiment Name: Zm_100uM_ABA_P Parameter: Age (day) Value: 8
  misc_feature: MA Experiment 108513 PARAMETER Experiment Name: Zm_100uM_ABA_P Parameter: Organism Value: Zea mays
  misc_feature: MA Experiment 108513 PARAMETER Experiment Name: Zm_100uM_ABA_P Parameter: Plant Line Value: 35A19
  misc_feature: MA Experiment 108513 PARAMETER Experiment Name: Zm_100uM_ABA_P Parameter: Timepoint (hr) Value: 6
  misc_feature: MA Experiment 108513 PARAMETER Experiment Name: Zm_100uM_ABA_P Parameter: Tissue Value: Aerial
  misc_feature: MA Experiment 108513 PARAMETER Experiment Name: Zm_100uM_ABA_P Parameter: Treatment Value: 100uM ABA vs. No Treatment
  misc_feature: MA Experiment ID: 108522 Result: Up-regulated in Transcription
  misc_feature: MA Experiment 108522 PARAMETER Experiment Name: Zm_42deg_Heat_P Parameter: Age (day) Value: 8
  misc_feature: MA Experiment 108522 PARAMETER Experiment Name: Zm_42deg_Heat_P Parameter: Organism Value: Zea mays
  misc_feature: MA Experiment 108522 PARAMETER Experiment Name: Zm_42deg_Heat_P Parameter: Plant Line Value: 35A19
  misc_feature: MA Experiment 108522 PARAMETER Experiment Name: Zm_42deg_Heat_P Parameter: Temperature (deg C) Value: 42 vs. 22
  misc_feature: MA Experiment 108522 PARAMETER Experiment Name: Zm_42deg_Heat_P Parameter: Timepoint (hr) Value: 1
  misc_feature: MA Experiment 108522 PARAMETER Experiment Name: Zm_42deg_Heat_P Parameter: Tissue Value: Aerial
  misc_feature: MA Experiment ID: 108523 Result: Up-regulated in Transcription
  misc_feature: MA Experiment 108523 PARAMETER Experiment Name: Zm_42deg_Heat_P Parameter: Age (day) Value: 8
  misc_feature: MA Experiment 108523 PARAMETER Experiment Name: Zm_42deg_Heat_P Parameter: Organism Value: Zea mays
  misc_feature: MA Experiment 108523 PARAMETER Experiment Name: Zm_42deg_Heat_P Parameter: Plant Line Value: 35A19
  misc_feature: MA Experiment 108523 PARAMETER Experiment Name: Zm_42deg_Heat_P Parameter: Temperature (deg C) Value: 42 vs. 22
  misc_feature: MA Experiment 108523 PARAMETER Experiment Name: Zm_42deg_Heat_P Parameter: Timepoint (hr) Value: 6
  misc_feature: MA Experiment 108523 PARAMETER Experiment Name: Zm_42deg_Heat_P Parameter: Tissue Value: Aerial
  misc_feature: MA Experiment ID: 108526 Result: Up-regulated in Transcription
  misc_feature: MA Experiment 108526 PARAMETER Experiment Name: Zm_5mM_NO_P Parameter: Age (day) Value: 8
  misc_feature: MA Experiment 108526 PARAMETER Experiment Name: Zm_5mM_NO_P Parameter: Organism Value: Zea mays
  misc_feature: MA Experiment 108526 PARAMETER Experiment Name: Zm_5mM_NO_P Parameter: Plant Line Value: 35A19
  misc_feature: MA Experiment 108526 PARAMETER Experiment Name: Zm_5mM_NO_P Parameter: Timepoint (hr) Value: 1
  misc_feature: MA Experiment 108526 PARAMETER Experiment Name: Zm_5mM_NO_P Parameter: Tissue Value: Aerial
  misc_feature: MA Experiment 108526 PARAMETER Experiment Name: Zm_5mM_NO_P Parameter: Treatment Value: 5mM NO vs. No Treatment
  misc_feature: MA Experiment ID: 108527 Result: Up-regulated in Transcription
  misc_feature: MA Experiment 108527 PARAMETER Experiment Name: Zm_5mM_NO_P Parameter: Age (day) Value: 8
  misc_feature: MA Experiment 108527 PARAMETER Experiment Name: Zm_5mM_NO_P Parameter: Organism Value: Zea mays
  misc_feature: MA Experiment 108527 PARAMETER Experiment Name: Zm_5mM_NO_P Parameter: Plant Line Value: 35A19
  misc_feature: MA Experiment 108527 PARAMETER Experiment Name: Zm_5mM_NO_P Parameter: Timepoint (hr) Value: 6
  misc_feature: MA Experiment 108527 PARAMETER Experiment Name: Zm_5mM_NO_P Parameter: Tissue Value: Aerial
  misc_feature: MA Experiment 108527 PARAMETER Experiment Name: Zm_5mM_NO_P Parameter: Treatment Value: 5mM NO vs. No Treatment
  misc_feature: MA Experiment ID: 108528 Result: Up-regulated in Transcription
  misc_feature: MA Experiment 108528 PARAMETER Experiment Name: Zm_Imbibed_Seeds_P Parameter: Age (day) Value: 5 vs. 2
  misc_feature: MA Experiment 108528 PARAMETER Experiment Name: Zm_Imbibed_Seeds_P Parameter: Organism Value: Zea mays
  misc_feature: MA Experiment 108528 PARAMETER Experiment Name: Zm_Imbibed_Seeds_P Parameter: Plant Line Value: 35A19
  misc_feature: MA Experiment 108528 PARAMETER Experiment Name: Zm_Imbibed_Seeds_P Parameter: Tissue Value: Aerial vs. Embryo
  misc_feature: MA Experiment ID: 108530 Result: Up-regulated in Transcription
  misc_feature: MA Experiment 108530 PARAMETER Experiment Name: Zm_Imbibed_Seeds_P Parameter: Age (day) Value: 6 vs. 2
  misc_feature: MA Experiment 108530 PARAMETER Experiment Name: Zm_Imbibed_Seeds_P Parameter: Organism Value: Zea mays
  misc_feature: MA Experiment 108530 PARAMETER Experiment Name: Zm_Imbibed_Seeds_P Parameter: Plant Line Value: 35A19
  misc_feature: MA Experiment 108530 PARAMETER Experiment Name: Zm_Imbibed_Seeds_P Parameter: Tissue Value: Aerial vs. Embryo
  misc_feature: MA Experiment ID: 108535 Result: Down-regulated in Transcription
  misc_feature: MA Experiment 108535 PARAMETER Experiment Name: Zm_Meristem_P Parameter: Age (day) Value: 8
  misc_feature: MA Experiment 108535 PARAMETER Experiment Name: Zm_Meristem_P Parameter: Organism Value: Zea mays
  misc_feature: MA Experiment 108535 PARAMETER Experiment Name: Zm_Meristem_P Parameter: Plant Line Value: 35A19
  misc_feature: MA Experiment 108535 PARAMETER Experiment Name: Zm_Meristem_P Parameter: Tissue Value: Root Meristem vs. Above Root Meristem
  misc_feature: MA Experiment ID: 108539 Result: Up-regulated in Transcription
  misc_feature: MA Experiment 108539 PARAMETER Experiment Name: Zm_20percent_PEG_P Parameter: Age (day) Value: 8
  misc_feature: MA Experiment 108539 PARAMETER Experiment Name: Zm_20percent_PEG_P Parameter: Organism Value: Zea mays
  misc_feature: MA Experiment 108539 PARAMETER Experiment Name: Zm_20percent_PEG_P Parameter: Plant Line Value: 35A19
  misc_feature: MA Experiment 108539 PARAMETER Experiment Name: Zm_20percent_PEG_P Parameter: Timepoint (hr) Value: 1
  misc_feature: MA Experiment 108539 PARAMETER Experiment Name: Zm_20percent_PEG_P Parameter: Tissue Value: Aerial
  misc_feature: MA Experiment 108539 PARAMETER Experiment Name: Zm_20percent_PEG_P Parameter: Treatment Value: 20percent PEG vs. No Treatment
  misc_feature: MA Experiment ID: 108540 Result: Up-regulated in Transcription
  misc_feature: MA Experiment 108540 PARAMETER Experiment Name: Zm_20percent_PEG_P Parameter: Age (day) Value: 8
  misc_feature: MA Experiment 108540 PARAMETER Experiment Name: Zm_20percent_PEG_P Parameter: Organism Value: Zea mays
  misc_feature: MA Experiment 108540 PARAMETER Experiment Name: Zm_20percent_PEG_P Parameter: Plant Line Value: 35A19
  misc_feature: MA Experiment 108540 PARAMETER Experiment Name: Zm_20percent_PEG_P Parameter: Timepoint (hr) Value: 6
  misc_feature: MA Experiment 108540 PARAMETER Experiment Name: Zm_20percent_PEG_P Parameter: Tissue Value: Aerial
  misc_feature: MA Experiment 108540 PARAMETER Experiment Name: Zm_20percent_PEG_P Parameter: Treatment Value: 20percent PEG vs. No Treatment
  misc_feature: MA Experiment ID: 108542 Result: Up-regulated in Transcription
  misc_feature: MA Experiment 108542 PARAMETER Experiment Name: Zm_150mM_NaCl_P Parameter: Age (day) Value: 8
  misc_feature: MA Experiment 108542 PARAMETER Experiment Name: Zm_150mM_NaCl_P Parameter: Organism Value: Zea mays
  misc_feature: MA Experiment 108542 PARAMETER Experiment Name: Zm_150mM_NaCl_P Parameter: Plant Line Value: 35A19
  misc_feature: MA Experiment 108542 PARAMETER Experiment Name: Zm_150mM_NaCl_P Parameter: Timepoint (hr) Value: 6
  misc_feature: MA Experiment 108542 PARAMETER Experiment Name: Zm_150mM_NaCl_P Parameter: Tissue Value: Aerial
  misc_feature: MA Experiment 108542 PARAMETER Experiment Name: Zm_150mM_NaCl_P Parameter: Treatment Value: 150mM NaCl vs. No Treatment
  misc_feature: MA Experiment ID: 108543 Result: Down-regulated in Transcription
  misc_feature: MA Experiment ID: 108556 Result: Up-regulated in Transcription
  misc_feature: MA Experiment 108556 PARAMETER Experiment Name: Zm_Drought_P Parameter: Age (day) Value: 9
  misc_feature: MA Experiment 108556 PARAMETER Experiment Name: Zm_Drought_P Parameter: Organism Value: Zea mays
  misc_feature: MA Experiment 108556 PARAMETER Experiment Name: Zm_Drought_P Parameter: Plant Line Value: 35A19
  misc_feature: MA Experiment 108556 PARAMETER Experiment Name: Zm_Drought_P Parameter: Timepoint (hr) Value: 24
  misc_feature: MA Experiment 108556 PARAMETER Experiment Name: Zm_Drought_P Parameter: Tissue Value: Aerial
  misc_feature: MA Experiment 108556 PARAMETER Experiment Name: Zm_Drought_P Parameter: Treatment Value: Drought vs. No Drought
  misc_feature: MA Experiment ID: 108597 Result: Up-regulated in Transcription
  misc_feature: MA Experiment 108597 PARAMETER Experiment Name: Zm_100uM_ABA_P Parameter: Age (day) Value: 9
  misc_feature: MA Experiment 108597 PARAMETER Experiment Name: Zm_100uM_ABA_P Parameter: Organism Value: Zea mays
  misc_feature: MA Experiment 108597 PARAMETER Experiment Name: Zm_100uM_ABA_P Parameter: Plant Line Value: 35A19
  misc_feature: MA Experiment 108597 PARAMETER Experiment Name: Zm_100uM_ABA_P Parameter: Timepoint (hr) Value: 24
  misc_feature: MA Experiment 108597 PARAMETER Experiment Name: Zm_100uM_ABA_P Parameter: Tissue Value: Aerial
  misc_feature: MA Experiment 108597 PARAMETER Experiment Name: Zm_100uM_ABA_P Parameter: Treatment Value: 100uM ABA vs. No Treatment
  misc_feature: MA Experiment ID: 108689 Result: Up-regulated in Transcription
  misc_feature: MA Experiment 108689 PARAMETER Experiment Name: Zm_Drought_Roots_P Parameter: Age (day) Value: 9
  misc_feature: MA Experiment 108689 PARAMETER Experiment Name: Zm_Drought_Roots_P Parameter: Organism Value: Zea mays
  misc_feature: MA Experiment 108689 PARAMETER Experiment Name: Zm_Drought_Roots_P Parameter: Plant Line Value: 35A19
  misc_feature: MA Experiment 108689 PARAMETER Experiment Name: Zm_Drought_Roots_P Parameter: Timepoint (hr) Value: 24
  misc_feature: MA Experiment 108689 PARAMETER Experiment Name: Zm_Drought_Roots_P Parameter: Tissue Value: Roots
  misc_feature: MA Experiment 108689 PARAMETER Experiment Name: Zm_Drought_Roots_P Parameter: Treatment Value: Drought vs. No Drought
  misc_feature: MA Experiment ID: 20000477 Result: Up-regulated in Transcription
  misc_feature: MA Experiment 20000477 PARAMETER Experiment Name: Zm_5mM_SA_P Parameter: Age (day) Value: 10
  misc_feature: MA Experiment 20000477 PARAMETER Experiment Name: Zm_5mM_SA_P Parameter: Organism Value: Zea mays
  misc_feature: MA Experiment 20000477 PARAMETER Experiment Name: Zm_5mM_SA_P Parameter: Plant Line Value: 35A19
  misc_feature: MA Experiment 20000477 PARAMETER Experiment Name: Zm_5mM_SA_P Parameter: Timepoint (hr) Value: 48
  misc_feature: MA Experiment 20000477 PARAMETER Experiment Name: Zm_5mM_SA_P Parameter: Tissue Value: Aerial
  misc_feature: MA Experiment 20000477 PARAMETER Experiment Name: Zm_5mM_SA_P Parameter: Treatment Value: 5mM SA vs. No Treatment
  misc_feature: MA Experiment ID: 20000479 Result: Up-regulated in Transcription
  misc_feature: MA Experiment 20000479 PARAMETER Experiment Name: Zm_Drought_P Parameter: Age (day) Value: 10
  misc_feature: MA Experiment 20000479 PARAMETER Experiment Name: Zm_Drought_P Parameter: Organism Value: Zea mays
  misc_feature: MA Experiment 20000479 PARAMETER Experiment Name: Zm_Drought_P Parameter: Plant Line Value: 35A19
  misc_feature: MA Experiment 20000479 PARAMETER Experiment Name: Zm_Drought_P Parameter: Timepoint (hr) Value: 48
  misc_feature: MA Experiment 20000479 PARAMETER Experiment Name: Zm_Drought_P Parameter: Tissue Value: Aerial
  misc_feature: MA Experiment 20000479 PARAMETER Experiment Name: Zm_Drought_P Parameter: Treatment Value: Drought vs. No Drought
  misc_feature: MA Experiment ID: 20000480 Result: Up-regulated in Transcription
  misc_feature: MA Experiment 20000480 PARAMETER Experiment Name: Zm_Drought_P Parameter: Age (day) Value: 11
  misc_feature: MA Experiment 20000480 PARAMETER Experiment Name: Zm_Drought_P Parameter: Organism Value: Zea mays
  misc_feature: MA Experiment 20000480 PARAMETER Experiment Name: Zm_Drought_P Parameter: Plant Line Value: 35A19
  misc_feature: MA Experiment 20000480 PARAMETER Experiment Name: Zm_Drought_P Parameter: Timepoint (hr) Value: 72
  misc_feature: MA Experiment 20000480 PARAMETER Experiment Name: Zm_Drought_P Parameter: Tissue Value: Aerial
  misc_feature: MA Experiment 20000480 PARAMETER Experiment Name: Zm_Drought_P Parameter: Treatment Value: Drought vs. No Drought
  misc_feature: MA Experiment ID: 20000492 Result: Down-regulated in Transcription
  misc_feature: MA Experiment 20000492 PARAMETER Experiment Name: Zm_Hybrid_Seed_Dev_P Parameter: DAP Value: 12
  misc_feature: MA Experiment 20000492 PARAMETER Experiment Name: Zm_Hybrid_Seed_Dev_P Parameter: Organism Value: Zea mays
  misc_feature: MA Experiment 20000492 PARAMETER Experiment Name: Zm_Hybrid_Seed_Dev_P Parameter: Plant Line Value: 35A19
  misc_feature: MA Experiment 20000492 PARAMETER Experiment Name: Zm_Hybrid_Seed_Dev_P Parameter: Tissue Value: Fert Kernel vs. Unfert Floret
  misc_feature: MA Experiment ID: 20000533 Result: Up-regulated in Transcription
  misc_feature: MA Experiment 20000533 PARAMETER Experiment Name: Zm_0.001percent_MeJA_P Parameter: Age (day) Value: 11
  misc_feature: MA Experiment 20000533 PARAMETER Experiment Name: Zm_0.001percent_MeJA_P Parameter: Organism Value: Zea mays
  misc_feature: MA Experiment 20000533 PARAMETER Experiment Name: Zm_0.001percent_MeJA_P Parameter: Plant Line Value: 35A19
  misc_feature: MA Experiment 20000533 PARAMETER Experiment Name: Zm_0.001percent_MeJA_P Parameter: Timepoint (hr) Value: 72
  misc_feature: MA Experiment 20000533 PARAMETER Experiment Name: Zm_0.001percent_MeJA_P Parameter: Tissue Value: Aerial
  misc_feature: MA Experiment 20000533 PARAMETER Experiment Name: Zm_0.001percent_MeJA_P Parameter: Treatment Value: 0.001percent MeJA vs. No Treatment
  misc_feature: MA Experiment ID: 20000535 Result: Down-regulated in Transcription
  misc_feature: MA Experiment 20000535 PARAMETER Experiment Name: Zm_Hybrid_Seed_Dev_P Parameter: DAP Value: 30 vs. 12
  misc_feature: MA Experiment 20000535 PARAMETER Experiment Name: Zm_Hybrid_Seed_Dev_P Parameter: Organism Value: Zea mays
  misc_feature: MA Experiment 20000535 PARAMETER Experiment Name: Zm_Hybrid_Seed_Dev_P Parameter: Plant Line Value: 35A19
  misc_feature: MA Experiment 20000535 PARAMETER Experiment Name: Zm_Hybrid_Seed_Dev_P Parameter: Tissue Value: Embryo vs. Unfert Floret
  misc_feature: MA Experiment ID: 20000626 Result: Up-regulated in Transcription
  misc_feature: MA Experiment 20000626 PARAMETER Experiment Name: Zm_Herbicide-Treatments_P Parameter: Timepoint (hr) Value: 12
  misc_feature: MA Experiment 20000626 PARAMETER Experiment Name: Zm_Herbicide-Treatments_P Parameter: Tissue Value: Aerial
  misc_feature: MA Experiment 20000626 PARAMETER Experiment Name: Zm_Herbicide-Treatments_P Parameter: Treatment Value: Roundup vs. No Treatment
  misc_feature: MA Experiment ID: 20001606 Result: Down-regulated in Transcription
  misc_feature: MA Experiment 20001606 PARAMETER Experiment Name: Zm_50ppm_KNO3_L-to-H_P Parameter: Age (day) Value: 19
  misc_feature: MA Experiment 20001606 PARAMETER Experiment Name: Zm_50ppm_KNO3_L-to-H_P Parameter: Organism Value: Zea mays
  misc_feature: MA Experiment 20001606 PARAMETER Experiment Name: Zm_50ppm_KNO3_L-to-H_P Parameter: Plant Line Value: 35A19
  misc_feature: MA Experiment 20001606 PARAMETER Experiment Name: Zm_50ppm_KNO3_L-to-H_P Parameter: Timepoint (hr) Value: 8
  misc_feature: MA Experiment 20001606 PARAMETER Experiment Name: Zm_50ppm_KNO3_L-to-H_P Parameter: Tissue Value: Shoots
  misc_feature: MA Experiment 20001606 PARAMETER Experiment Name: Zm_50ppm_KNO3_L-to-H_P Parameter: Treatment Value: 50ppm KNO3 vs. 50ppm KCl
gcacgagaccattacctagaacatcctaatcgaaaacgggtcgtcggcgtcctggtggtggtcgtatcttatctctctcactgccatagtgccatcgtgcgagcggcgagaaagtagaaggaagtgtgtcgtactcgtactcataccgggttggttggtttttgagacgtgtgcggtcgggagaggggatggagagaaagggagggtgctgcctcgcgccgaggtacgccgccaccgcggccgcgcagcaggcaggcgcggcctggcagatggggaggatcatgctcaagttccgcccgattgcncctaagccggcggccatggcgcccgcgccggcaccggcatcggcaccggtgaccggatcagccgccggtgccgggagagggaagcgaaaggccgcgtgcggaggcggcgggaggaggggccggaagcccaagaaggcggccaaagttgcgatggtgactgcagcgcctgcggcgacggcggcggcgcaagatgtgggcgactgccgggagcactgcgacaaggagaagtcgtcttcgtcgccgtcctcgtcctcgtcggggacgtcatccgtggactcgtcgccgccaccccggccgcagcagcgccagctcgcaacgctgccgctcatgcccgtgacggcggcggaggataaggccgctgcttgtcctgcgacagtggggccggatcagctcgtgccgtctcaggtggctacggcggcacggccgttggctccgcgcgcgatgcgccccgctgctgctgcagcttacttggtgacggtggaagaggtgaccgcgacgtggcgcgacggcgaggcgccggcctccgcgacgggcgcagacgaggccccggcgttcgtgtcggaccagtgggggcgcgtcacgtggtggaacgccgcgtttgtccgcgctgcatccgcggacgacggcgacgaggcggcggcgcccgtcgtgctcggcggagccctcccggcgtggggcacctgcgcgggattcacgtgccgcgtccgcgcccggcactggagcgcccggcgcntcggttcccccgtggtggcgccctgcgatgtttggcgtctggacgccgccggcagctacctttggcggctggacctgcaggccgcgctcactctcggcggctgcctgtgaaccgtacaccactgtcaagagcaagcaacgaatatgctgtgctactcctctacgtgcggagacgtgttgtattttattctatgagcgttatttactgacgtaaggcatggtttaatcgacggattgctatcctggtcgggcttaattaaggacgttgaagcctggtaaggtatactaagttagcgtccctcggaatgggagtgagtgagttgggaggacttgaaaatgtaagaagaaaaaaaacaaagcatgtgatggatgcttctagatgtgcaagatcagtcttcatcc

SEQ ID NO: 6702 - protein, 319 aa, Zea mays subsp. mays
  peptide (1)..(319): Ceres Seq. ID no. 12377702
  misc_feature (1)..(315): Homolog of NCBI NO: 15242729 NR Description: putative protein; protein id: At5g63350.1 thaliana] >gi|10177443|dbj|BAB10739.1| to unknown protein [Arabidopsis thaliana]
  misc_feature (217)..(315): Homolog of NCBI NO: 15232126 NR Description: hypothetical protein; protein id: At3g27250.1 thaliana] >gi|9294218|dbj|BAB02120.1|
  misc_feature (219)..(315): Homolog of NCBI NO: 18408645 NR Description: expressed protein; protein id: At3g48510.1, by cDNA: 124275. [Arabidopsis thaliana] >gi|11280671|pir||T46195
  misc_feature (219)..(315): Homolog of NCBI NO: 21537225 NR Description: unknown [Arabidopsis thaliana]
  misc_feature (25)..(193): Homolog of NCBI NO: 16127671 NR Description: arylesterase-related protein [Caulobacter
  misc_feature (39)..(39): Xaa is any aa, unknown or other
  misc_feature (284)..(284): Xaa is any aa, unknown or other
MERKGGCCLAPRYAATAAAQQAGAAWQMGRIMLKFRPIXPKPAAMAPAPAPASAPVTGSAAGAGRGKRKAACGGGGRRGRKPKKAAKVAMVTAAPAATAAAQDVGDCREHCDKEKSSSSPSSSSSGTSSVDSSPPPRPQQRQLATLPLMPVTAAEDKAAACPATVGPDQLVPSQVATAARPLAPRAMRPAAAAAYLVTVEEVTATWRDGEAPASATGADEAPAFVSDQWGRVTWWNAAFVRAASADDGDEAAAPVVLGGALPAWGTCAGFTCRVRARHWSARRXGSPVVAPCDVWRLDAAGSYLWRLDLQAALTLGGCL

SEQ ID NO: 6703 - protein, 292 aa, Zea mays subsp. mays
  peptide (1)..(292): Ceres Seq. ID no. 12377703
  misc_feature (1)..(288): Homolog of NCBI NO: 15242729 NR Description: putative protein; protein id: At5g63350.1 thaliana] >gi|10177443|dbj|BAB10739.1| to unknown protein [Arabidopsis thaliana]
  misc_feature (190)..(288): Homolog of NCBI NO: 15232126 NR Description: hypothetical protein; protein id: At3g27250.1 thaliana] >gi|9294218|dbj|BAB02120.1|
  misc_feature (192)..(288): Homolog of NCBI NO: 18408645 NR Description: expressed protein; protein id: At3g48510.1, by cDNA: 124275. [Arabidopsis thaliana] >gi|11280671|pir||T46195
  misc_feature (192)..(288): Homolog of NCBI NO: 21537225 NR Description: unknown [Arabidopsis thaliana]
  misc_feature (1)..(166): Homolog of NCBI NO: 16127671 NR Description: arylesterase-related protein [Caulobacter
  misc_feature (12)..(12): Xaa is any aa, unknown or other
  misc_feature (257)..(257): Xaa is any aa, unknown or other
MGRIMLKFRPIXPKPAAMAPAPAPASAPVTGSAAGAGRGKRKAACGGGGRRGRKPKKAAKVAMVTAAPAATAAAQDVGDCREHCDKEKSSSSPSSSSSGTSSVDSSPPPRPQQRQLATLPLMPVTAAEDKAAACPATVGPDQLVPSQVATAARPLAPRAMRPAAAAAYLVTVEEVTATWRDGEAPASATGADEAPAFVSDQWGRVTWWNAAFVRAASADDGDEAAAPVVLGGALPAWGTCAGFTCRVRARHWSARRXGSPVVAPCDVWRLDAAGSYLWRLDLQAALTLGGCL

SEQ ID NO: 6704 - protein, 288 aa, Zea mays subsp. mays
  peptide (1)..(288): Ceres Seq. ID no. 12377704
  misc_feature (1)..(284): Homolog of NCBI NO: 15242729 NR Description: putative protein; protein id: At5g63350.1 thaliana] >gi|10177443|dbj|BAB10739.1| to unknown protein [Arabidopsis thaliana]
  misc_feature (186)..(284): Homolog of NCBI NO: 15232126 NR Description: hypothetical protein; protein id: At3g27250.1 thaliana] >gi|9294218|dbj|BAB02120.1|
  misc_feature (188)..(284): Homolog of NCBI NO: 18408645 NR Description: expressed protein; protein id: At3g48510.1, by cDNA: 124275. [Arabidopsis thaliana] >gi|11280671|pir||T46195
  misc_feature (188)..(284): Homolog of NCBI NO: 21537225 NR Description: unknown [Arabidopsis thaliana]
  misc_feature (1)..(162): Homolog of NCBI NO: 16127671 NR Description: arylesterase-related protein [Caulobacter
  misc_feature (8)..(8): Xaa is any aa, unknown or other
  misc_feature (253)..(253): Xaa is any aa, unknown or other
MLKFRPIXPKPAAMAPAPAPASAPVTGSAAGAGRGKRKAACGGGGRRGRKPKKAAKVAMVTAAPAATAAAQDVGDCREHCDKEKSSSSPSSSSSGTSSVDSSPPPRPQQRQLATLPLMPVTAAEDKAAACPATVGPDQLVPSQVATAARPLAPRAMRPAAAAAYLVTVEEVTATWRDGEAPASATGADEAPAFVSDQWGRVTWWNAAFVRAASADDGDEAAAPVVLGGALPAWGTCAGFTCRVRARHWSARRXGSPVVAPCDVWRLDAAGSYLWRLDLQAALTLGGCL

SEQ ID NO: 6705 - DNA, 1746 bp, Zea mays subsp. mays
  misc_feature (1)..(1746): Ceres Seq. ID no. 13498516
  misc_feature: MA Experiment ID: 108522 Result: Up-regulated in Transcription
  misc_feature: MA Experiment 108522 PARAMETER Experiment Name: Zm_42deg_Heat_P Parameter: Age (day) Value: 8
  misc_feature: MA Experiment 108522 PARAMETER Experiment Name: Zm_42deg_Heat_P Parameter: Organism Value: Zea mays
  misc_feature: MA Experiment 108522 PARAMETER Experiment Name: Zm_42deg_Heat_P Parameter: Plant Line Value: 35A19
  misc_feature: MA Experiment 108522 PARAMETER Experiment Name: Zm_42deg_Heat_P Parameter: Temperature (deg C) Value: 42 vs. 22
  misc_feature: MA Experiment 108522 PARAMETER Experiment Name: Zm_42deg_Heat_P Parameter: Timepoint (hr) Value: 1
  misc_feature: MA Experiment 108522 PARAMETER Experiment Name: Zm_42deg_Heat_P Parameter: Tissue Value: Aerial
cttcaatttttactatttaattatacagatacatatccagccggcgcagccaggaggcgactgaccgaattgtattgtttgttcgatcgaagcaggcagatggcaggcggcggattcgtggaggacatgaacatgatgagggagcagagcctcctcgaggcgacgtgcggcgacctcttcgaccacatcgacgacctcctcgacttccccaacgaggactccgccgccgccgtgctcctcctggacgcgccggcgccggggagcccgctgtcggcgcgcatcatcgacgtcggccgcgccggcaatgcgctcgccccgcctgctgcccccgcgcagcacgacgcttccgctagcgccttcttcgccgccgcggggaacgatgtgttcgacaccaaggacgtcgtcggcgcacacatcggctcgtgcgacgacattgacatggacatggcgcagctggagtggctatcggggctcttcgacgacgcctccatcccgcacgagccggtgttccctggcgcgacggcgggcggcgcggcgcccatcatgaagagctccgcgctggcggccggcagcgctgctgccgccggacaaaatggaggacgcgctgctgttccgcagctccagccccatctcggtgctggagcacggcagcggtggcagcggcagcgccagcgccaccggctccgcgtcctcgtcctcctcctcggcgtcctcctcctcggagtccttctccgggagtgggagtggaggagggcatgtttggtcggcgccagtgtcgccgcgcccggcgccgccgccggtgctcgtcataccggcgcgcgcgcggagcaagcgctcccgttcgtccgcgttcaccggcgccgccgcgcgcgccggggcggagacgccaaccatcctcgtgccgacgcccatgtactcgtccgggtctgcccactcggaccccgagagcatcgccgagtccagcccgcacccggcgccgcccatgaagaagaagaagaaggccaagaagcctgcgccccccgcgccagctgcctcttctgacgacaacgatggcgacgccgactacgaggaaggcggcgagcaagcggagccgcagggcggcgccgtcaggaggtgcacgcattgccagatcgagaagacgccgcagtggcgcgcggggccgctggggcccaagacgctctgcaacgcctgcggcgtgcgctacaagtccggtcgcctgttcccggagtaccgccccgcggcgagccccaccttcgtgccgtccatccactccaactcgcacaagagggtggtggagatgcgccagaaggctgtccggagcggcgaccccgtcgtgcgaccttctccatttcatccgccgccgggattgacgtcccggcatggcgtcgccggactgtcggtcggtctcgtcccccatatagctatatatgtatgcatgcatggttgcttcatcagtcgtcgtcgcccattatggtcatcatcaccgcttcaccggtcaccgccatggatcgtctcccgcccatcatcacatgcattggtttgtgtcagcatccatccaatcccaatccatcgccgggcgtcccggcgttgttagttcattaggtcttttttttcctcatcggggggctagtgttattttacctttgatccttttgtctattggttaattggtttcccctggatgttttttgtttgtatagagtgaaaaagagagaggagaaatagatgaatcagagtggttgctgc

SEQ ID NO: 6706 - protein, 346 aa, Zea mays subsp. mays
  peptide (1)..(346): Ceres Seq. ID no. 13498517
  misc_feature (34)..(191): Homolog of NCBI NO: 15451574 NR Description: Putative GATA-1 zinc finger protein [Oryza sativa]
  misc_feature (53)..(82): Homolog of NCBI NO: 37572451 NR Description: AG-motif binding protein-5 [Nicotiana tabacum]
  misc_feature (53)..(82): Homolog of NCBI NO: 37572443 NR Description: AG-motif binding protein-1 [Nicotiana tabacum]
LQFLLFNYTDTYPAGAARRRLTELYCLFDRSRQMAGGGFVEDMNMMREQSLLEATCGDLFDHIDDLLDFPNEDSAAAVLLLDAPAPGSPLSARIIDVGRAGNALAPPAAPAQHDASASAFFAAAGNDVFDTKDVVGAHIGSCDDIDMDMAQLEWLSGLFDDASIPHEPVFPGATAGGAAPIMKSSALAAGSAAAAGQNGGRAAVPQLQPHLGAGARQRWQRQRQRHRLRVLVLLLGVLLLGVLLREWEWRRACLVGASVAAPGAAAGARHTGARAEQALPFVRVHRRRRARRGGDANHPRADAHVLVRVCPLGPREHRRVQPAPGAAHEEEEEGQEACAPRASCLF

SEQ ID NO: 6707 - protein, 333 aa, Zea mays subsp. mays
  peptide (1)..(333): Ceres Seq. ID no. 13498518
  misc_feature (1)..(130): Pfam Name: Equine herpesvirus glycoprotein gp2 Pfam Description: Equine herpesvirus glycoprotein gp2
  misc_feature (1)..(246): Homolog of NCBI NO: 15451574 NR Description: Putative GATA-1 zinc finger protein [Oryza sativa]
  misc_feature (29)..(252): Homolog of NCBI NO: 37572451 NR Description: AG-motif binding protein-5 [Nicotiana tabacum]
  misc_feature (29)..(252): Homolog of NCBI NO: 37572443 NR Description: AG-motif binding protein-1 [Nicotiana tabacum]
  misc_feature (29)..(268): Homolog of NCBI NO: 34909448 NR Description: OSJNBa0014K08.18 [Oryza sativa (japonica
  misc_feature (131)..(244): Homolog of NCBI NO: 15233101 NR Description: GATA zinc finger protein [Arabidopsis thaliana]
  misc_feature (173)..(241): Homolog of NCBI NO: 12711287 NR Description: GATA-1 zinc finger protein [Nicotiana tabacum]
  misc_feature (170)..(247): Homolog of NCBI NO: 37572449 NR Description: AG-motif binding protein-4 [Nicotiana tabacum]
  misc_feature (18)..(239): Homolog of NCBI NO: 37536778 NR Description: putative transcription factor [Oryza sativa
  misc_feature (73)..(245): Homolog of NCBI NO: 15239343 NR Description: GATA zinc finger protein [Arabidopsis thaliana]
  misc_feature (124)..(256): Homolog of NCBI NO: 15225399 NR Description: GATA zinc finger protein [Arabidopsis thaliana]
MEDALLFRSSSPISVLEHGSGGSGSASATGSASSSSSSASSSSESFSGSGSGGGHVWSAPVSPRPAPPPVLVIPARARSKRSRSSAFTGAAARAGAETPTILVPTPMYSSGSAHSDPESIAESSPHPAPPMKKKKKAKKPAPPAPAASSDDNDGDADYEEGGEQAEPQGGAVRRCTHCQIEKTPQWRAGPLGPKTLCNACGVRYKSGRLFPEYRPAASPTFVPSIHSNSHKRVVEMRQKAVRSGDPVVRPSPFHPPPGLTSRHGVAGLSVGLVPHIAIYVCMHGCFISRRRPLWSSSPLHRSPPWIVSRPSSHALVCVSIHPIPIHRRASRRC

SEQ ID NO: 6708 - protein, 313 aa, Zea mays subsp. mays
  peptide (1)..(313): Ceres Seq. ID no. 13498519
  misc_feature (1)..(158): Homolog of NCBI NO: 15451574 NR Description: Putative GATA-1 zinc finger protein [Oryza sativa]
  misc_feature (20)..(49): Homolog of NCBI NO: 37572451 NR Description: AG-motif binding protein-5 [Nicotiana tabacum]
  misc_feature (20)..(49): Homolog of NCBI NO: 37572443 NR Description: AG-motif binding protein-1 [Nicotiana tabacum]
MAGGGFVEDMNMMREQSLLEATCGDLFDHIDDLLDFPNEDSAAAVLLLDAPAPGSPLSARIIDVGRAGNALAPPAAPAQHDASASAFFAAAGNDVFDTKDVVGAHIGSCDDIDMDMAQLEWLSGLFDDASIPHEPVFPGATAGGAAPIMKSSALAAGSAAAAGQNGGRAAVPQLQPHLGAGARQRWQRQRQRHRLRVLVLLLGVLLLGVLLREWEWRRACLVGASVAAPGAAAGARHTGARAEQALPFVRVHRRRRARRGGDANHPRADAHVLVRVCPLGPREHRRVQPAPGAAHEEEEEGQEACAPRASCLF

SEQ ID NO: 6709 - DNA, 1124 bp, Zea mays subsp. mays
  misc_feature (1)..(1124): Ceres Seq. ID no. 12409031
  misc_feature: MA Experiment ID: 108522 Result: Down-regulated in Transcription
  misc_feature: MA Experiment 108522 PARAMETER Experiment Name: Zm_42deg_Heat_P Parameter: Age (day) Value: 8
  misc_feature: MA Experiment 108522 PARAMETER Experiment Name: Zm_42deg_Heat_P Parameter: Organism Value: Zea mays
  misc_feature: MA Experiment 108522 PARAMETER Experiment Name: Zm_42deg_Heat_P Parameter: Plant Line Value: 35A19
  misc_feature: MA Experiment 108522 PARAMETER Experiment Name: Zm_42deg_Heat_P Parameter: Temperature (deg C) Value: 42 vs. 22
  misc_feature: MA Experiment 108522 PARAMETER Experiment Name: Zm_42deg_Heat_P Parameter: Timepoint (hr) Value: 1
  misc_feature: MA Experiment 108522 PARAMETER Experiment Name: Zm_42deg_Heat_P Parameter: Tissue Value: Aerial
  misc_feature: MA Experiment ID: 108523 Result: Up-regulated in Transcription
  misc_feature: MA Experiment 108523 PARAMETER Experiment Name: Zm_42deg_Heat_P Parameter: Age (day) Value: 8
  misc_feature: MA Experiment 108523 PARAMETER Experiment Name: Zm_42deg_Heat_P Parameter: Organism Value: Zea mays
  misc_feature: MA Experiment 108523 PARAMETER Experiment Name: Zm_42deg_Heat_P Parameter: Plant Line Value: 35A19
  misc_feature: MA Experiment 108523 PARAMETER Experiment Name: Zm_42deg_Heat_P Parameter: Temperature (deg C) Value: 42 vs. 22
  misc_feature: MA Experiment 108523 PARAMETER Experiment Name: Zm_42deg_Heat_P Parameter: Timepoint (hr) Value: 6
  misc_feature: MA Experiment 108523 PARAMETER Experiment Name: Zm_42deg_Heat_P Parameter: Tissue Value: Aerial
  misc_feature: MA Experiment ID: 108527 Result: Up-regulated in Transcription
  misc_feature: MA Experiment 108527 PARAMETER Experiment Name: Zm_5mM_NO_P Parameter: Age (day) Value: 8
  misc_feature: MA Experiment 108527 PARAMETER Experiment Name: Zm_5mM_NO_P Parameter: Organism Value: Zea mays
  misc_feature: MA Experiment 108527 PARAMETER Experiment Name: Zm_5mM_NO_P Parameter: Plant Line Value: 35A19
  misc_feature: MA Experiment 108527 PARAMETER Experiment Name: Zm_5mM_NO_P Parameter: Timepoint (hr) Value: 6
  misc_feature: MA Experiment 108527 PARAMETER Experiment Name: Zm_5mM_NO_P Parameter: Tissue Value: Aerial
  misc_feature: MA Experiment 108527 PARAMETER Experiment Name: Zm_5mM_NO_P Parameter: Treatment Value: 5mM NO vs. No Treatment
  misc_feature: MA Experiment ID: 108536 Result: Up-regulated in Transcription
  misc_feature: MA Experiment 108536 PARAMETER Experiment Name: Zm_Meristem_P Parameter: Age (day) Value: 8
  misc_feature: MA Experiment 108536 PARAMETER Experiment Name: Zm_Meristem_P Parameter: Organism Value: Zea mays
  misc_feature: MA Experiment 108536 PARAMETER Experiment Name: Zm_Meristem_P Parameter: Plant Line Value: 35A19
  misc_feature: MA Experiment 108536 PARAMETER Experiment Name: Zm_Meristem_P Parameter: Tissue Value: Shoot Meristem vs. Above Shoot Meristem
atgagactctgaggctctgagctgagcgcgctccgtttcagtttcagagagcggttgctgtgcatgtgctggtgctgcgacttgactgttcgagcacagctgcgtctgcgtccccatggtgtagataggaggggaggaagcaggaagagggggaggcagcctgtgtgtgtgagagagaggcagaagtagtgaggaaggaagcaggaagatggcttggaatgcccgcttcggcgatgacgaggaaggcagcggccttgagctcagcctgggccttccgggctacttctccgggtcgccagaccaagccgcaggtttcgaggagaaagcgagccggggttctgctgctgctcctcctcctcctcctcccgctgctgctcgagcgaaaggaagcgacggcttcaaggcgaggccggcggcagctgctccggtcgtgggatggccgccggtgcgcgcgttccggcggaacctcgccacgtcgtcctccaagccgtcgagccacggaggcaaggagcccgccgcgagcgccgacggcggcaacaagggcctgttcgtcaaggtcaacatggacggcgtccccatcggccgtaagctcgacctggcggcgcacgccggctacgacacgctctccgccgccgttgacagcctcttccgcggcctcttcgctgctcaagcggcggggccaggcggggagcagcaggctgtcgcgggtatcctgagcggcggcggcggcggcgagcacacgctggtgtacgaggacgacgagggcgaccagatgctggtcggggacgtgccgtggccgatgttcgtcgccaccgctaggcgtctgcgcgtgctcaagagctccgacctgagcccgtcgtcgctgagggcagcgagagccgcagctgagtgctgaacgcaccctggacctggagcctgaacgttttgcggcctctccggagggcccatccgtgtaaaatcgaagcagttttcgtcgattttgcttttagcaagggattatatgtcctagtgatcaagtagggaagcaagaatctatctagaggtgatgaggggtgtcgtagaaccatgcaatcctagtgctagattttttttctgaaagtttaacaaggtttcttggcgctggc

SEQ ID NO: 6710 - protein, 228 aa, Zea mays subsp. mays
  peptide (1)..(228): Ceres Seq. ID no. 12409032
  misc_feature (17)..(214): Pfam Name: AUX/IAA family Pfam Description: AUX/IAA family
  misc_feature (1)..(227): Homolog of NCBI NO: 34906394 NR Description: P0710E05.9 [Oryza sativa (japonica
  misc_feature (40)..(221): Homolog of NCBI NO: 34909384 NR Description: putative phytochrome-associated protein [Oryza
  misc_feature (70)..(215): Homolog of NCBI NO: 4093155 NR Description: phytochrome-associated protein 1 [Arabidopsis
  misc_feature (70)..(215): Homolog of NCBI NO: 15228226 NR Description: phytochrome-associated protein 1 (PAP1); protein At3g16500.1, supported by cDNA: 38146., supported by cDNA: supported by cDNA: gi_14423421, supported by cDNA: gi_18377501,
  misc_feature (70)..(215): Homolog of NCBI NO: 21593333 NR Description: phytochrome-associated protein 1 (PAP1)
  misc_feature (4)..(215): Homolog of NCBI NO: 15218080 NR Description: auxin regulated protein IAA18, putative; protein At1g51950.1, supported by cDNA: 6493., supported by cDNA: supported by cDNA: gi_15810072 [Arabidopsis thaliana]
  misc_feature (4)..(215): Homolog of NCBI NO: 25296228 NR Description: auxin-induced protein IAA18 [imported] - thaliana (fragment) >gi|2618725|gb|AAB84355.1| IAA18 [Arabidopsis
  misc_feature (70)..(215): Homolog of NCBI NO: 21594025 NR Description: auxin regulated protein IAA18, putative
  misc_feature (15)..(213): Homolog of NCBI NO: 30962267 NR Description: Aux/IAA protein [Oryza sativa (indica
  misc_feature (4)..(224): Homolog of NCBI NO: 25989504 NR Description: Aux/IAA protein [Solanum tuberosum]
MAWNARFGDDEEGSGLELSLGLPGYFSGSPDQAAGFEEKASRGSAAAPPPPPPAAARAKGSDGFKARPAAAAPVVGWPPVRAFRRNLATSSSKPSSHGGKEPAASADGGNKGLFVKVNMDGVPIGRKLDLAAHAGYDTLSAAVDSLFRGLFAAQAAGPGGEQQAVAGILSGGGGGEHTLVYEDDEGDQMLVGDVPWPMFVATARRLRVLKSSDLSPSSLRAARAAAEC

SEQ ID NO: 6711 - protein, 165 aa, Zea mays subsp. mays
  peptide (1)..(165): Ceres Seq. ID no. 12409033
MPASAMTRKAAALSSAWAFRATSPGRQTKPQVSRRKRAGVLLLLLLLLLPLLLERKEATASRRGRRQLLRSWDGRRCARSGGTSPRRPPSRRATEARSPPRAPTAATRACSSRSTWTASPSAVSSTWRRTPATTRSPPPLTASSAASSLLKRRGQAGSSRLSRVS

SEQ ID NO: 6712 - protein, 160 aa, Zea mays subsp. mays
  peptide (1)..(160): Ceres Seq. ID no. 12409034
MTRKAAALSSAWAFRATSPGRQTKPQVSRRKRAGVLLLLLLLLLPLLLERKEATASRRGRRQLLRSWDGRRCARSGGTSPRRPPSRRATEARSPPRAPTAATRACSSRSTWTASPSAVSSTWRRTPATTRSPPPLTASSAASSLLKRRGQAGSSRLSRVS

SEQ ID NO: 6713 - DNA, 1403 bp, Zea mays subsp. mays
  misc_feature (1)..(1403): Ceres Seq. ID no. 12387046
  misc_feature: MA Experiment ID: 20000535 Result: Up-regulated in Transcription
  misc_feature: MA Experiment 20000535 PARAMETER Experiment Name: Zm_Hybrid_Seed_Dev_P Parameter: DAP Value: 30 vs. 12
  misc_feature: MA Experiment 20000535 PARAMETER Experiment Name: Zm_Hybrid_Seed_Dev_P Parameter: Organism Value: Zea mays
  misc_feature: MA Experiment 20000535 PARAMETER Experiment Name: Zm_Hybrid_Seed_Dev_P Parameter: Plant Line Value: 35A19
  misc_feature: MA Experiment 20000535 PARAMETER Experiment Name: Zm_Hybrid_Seed_Dev_P Parameter: Tissue Value: Embryo vs. Unfert Floret
agctgcactgcagcacacgcgccaccgaagcgctctgcccacctcgctcccctccagtggccgccagcgcggctcagcggtccatcctcctgacgccacctgcaacggcgtcaggcggtgatccattccaactcgcgctccgtcctggcaatcactttgggaaggtggtcagtggaatagctttgcttaaaaagcttgaagcagttggtagtgaaactggaaatccttcttatcaagtgaaaattgtagactgtggtgaagtttccaacacaaattctcaggatccgctaaagggagataaagtaagctcaaagacagataacagcagttcagacagtgaaaagggtggccatcgtaccaagcgttccttaccgaaaggaatgatccaggtggaagctccaggaacaatcccattcagtttgatgtaaatttaatgaaaccagtaaatgtagatggcaacattggtggtgataatgcagaggctagcatgtctagaactggtgaaggaaggcatctgccaagcaatgaacctttgtccaccaatggtaaagatttaggtgtgggttctgcagacaatgggcaacctcaacaaatcaggaaaggacgtggttttactcagaagtatgggtatgcacgccgatataggacgccatctcccgagcgtccctctgtttgaccccgctacgatggagggagagatgatagatggaacaatttcaataggtatgaaagaaatggtccttacagtagacgctcgccagtaaggagataccatggctcgccaagagccaatagcccatccagtactacccaagcctcaaccgttcaaagtgttgctcgaagaggatatgtacaggtaatgcatccatcgtactgttgatttagccatcccaacctgcaaataacctttgcatattctgtttgacatttttacatagtgttttctttaaatgaaaccgactcatactactcggcctacacagtgcccattctgcaaaacgcccaattatgctgtggagtatcgtggcatcaaaacaaaggagtaaaggagcatagagcagtttacagacaattgaaaaagagaattgatcttttttatgggcgaagtgttgaagatggctttggtgaaggaaatgtcttgttagcatcaagtaagtggcgacatcacaacccctacaagcttgtgccttaaaacaagaggatacaagaagttggagtgcttttgtgaaggcttttacgaatcacttgaagtgttagtacttttgtgaatgattttgtaaagtgtttgcaaatatgtgcaaaacataataacatgtgtaggttttgtgaatgattttgttgtggtgcttgttgatggtttatgtgatgtggatctaccattgtgcaatactaattaaatttgt

SEQ ID NO: 6714 - protein, 141 aa, Zea mays subsp. mays
  peptide (1)..(141): Ceres Seq. ID no. 12387047
  misc_feature (49)..(122): Homolog of NCBI NO: 37788310 NR Description: cyclophilin-like protein [Triticum aestivum]
  misc_feature (49)..(125): Homolog of NCBI NO: 15229425 NR Description: cyclophylin -like protein; protein id: supported by cDNA: gi_17381037 [Arabidopsis thaliana]
  misc_feature (39)..(121): Homolog of NCBI NO: 20259449 NR Description: unknown protein [Arabidopsis thaliana]
  misc_feature (39)..(121): Homolog of NCBI NO: 22329097 NR Description: putative protein; protein id: At4g32420.1,
  misc_feature (52)..(121): Homolog of NCBI NO: 7486628 NR Description: hypothetical protein F8B4.120 - Arabidopsis >gi|4049344|emb|CAA22569.1| putative protein [Arabidopsis >gi|7270146|emb|CAB79959.1| putative protein [Arabidopsis
LHCSTRATEALCPPRSPPVAASAAQRSILLTPPATASGGDPFQLALRPGNHFGKVVSGIALLKKLEAVGSETGNPSYQVKIVDCGEVSNTNSQDPLKGDKVSSKTDNSSSDSEKGGHRTKRSLPKGMIQVEAPGTIPFSLM

SEQ ID NO: 6715 - protein, 80 aa, Zea mays subsp. mays
  peptide (1)..(80): Ceres Seq. ID no. 12387048
  misc_feature (1)..(80): Homolog of NCBI NO: 37788310 NR Description: cyclophilin-like protein [Triticum aestivum]
  misc_feature (43)..(80): Homolog of NCBI NO: 34393471 NR Description: cyclophylin-like protein [Oryza sativa (japonica
  misc_feature (3)..(80): Homolog of NCBI NO: 15229425 NR Description: cyclophylin -like protein; protein id: supported by cDNA: gi_17381037 [Arabidopsis thaliana]
  misc_feature (26)..(80): Homolog of NCBI NO: 20259449 NR Description: unknown protein [Arabidopsis thaliana]
  misc_feature (26)..(80): Homolog of NCBI NO: 22329097 NR Description: putative protein; protein id: At4g32420.1,
  misc_feature (26)..(80): Homolog of NCBI NO: 7486628 NR Description: hypothetical protein F8B4.120 - Arabidopsis >gi|4049344|emb|CAA22569.1| putative protein [Arabidopsis >gi|7270146|emb|CAB79959.1| putative protein [Arabidopsis
MKPVNVDGNIGGDNAEASMSRTGEGRHLPSNEPLSTNGKDLGVGSADNGQPQQIRKGRGFTQKYGYARRYRTPSPERPSV

SEQ ID NO: 6716 - DNA, 1254 bp, Zea mays subsp. mays
  misc_feature (1)..(1254): Ceres Seq. ID no. 13498495
  misc_feature: MA Experiment ID: 108522 Result: Up-regulated in Transcription
  misc_feature: MA Experiment 108522 PARAMETER Experiment Name: Zm_42deg_Heat_P Parameter: Age (day) Value: 8
  misc_feature: MA Experiment 108522 PARAMETER Experiment Name: Zm_42deg_Heat_P Parameter: Organism Value: Zea mays
  misc_feature: MA Experiment 108522 PARAMETER Experiment Name: Zm_42deg_Heat_P Parameter: Plant Line Value: 35A19
  misc_feature: MA Experiment 108522 PARAMETER Experiment Name: Zm_42deg_Heat_P Parameter: Temperature (deg C) Value: 42 vs. 22
  misc_feature: MA Experiment 108522 PARAMETER Experiment Name: Zm_42deg_Heat_P Parameter: Timepoint (hr) Value: 1
  misc_feature: MA Experiment 108522 PARAMETER Experiment Name: Zm_42deg_Heat_P Parameter: Tissue Value: Aerial
  misc_feature: MA Experiment ID: 108523 Result: Up-regulated in Transcription
  misc_feature: MA Experiment 108523 PARAMETER Experiment Name: Zm_42deg_Heat_P Parameter: Age (day) Value: 8
  misc_feature: MA Experiment 108523 PARAMETER Experiment Name: Zm_42deg_Heat_P Parameter: Organism Value: Zea mays
  misc_feature: MA Experiment 108523 PARAMETER Experiment Name: Zm_42deg_Heat_P Parameter: Plant Line Value: 35A19
  misc_feature: MA Experiment 108523 PARAMETER Experiment Name: Zm_42deg_Heat_P Parameter: Temperature (deg C) Value: 42 vs. 22
  misc_feature: MA Experiment 108523 PARAMETER Experiment Name: Zm_42deg_Heat_P Parameter: Timepoint (hr) Value: 6
  misc_feature: MA Experiment 108523 PARAMETER Experiment Name: Zm_42deg_Heat_P Parameter: Tissue Value: Aerial
  misc_feature: MA Experiment ID: 20000108 Result: Up-regulated in Transcription
  misc_feature: MA Experiment 20000108 PARAMETER Experiment Name: Zm_Root-Tips_P Parameter: Age (day) Value: 12
  misc_feature: MA Experiment 20000108 PARAMETER Experiment Name: Zm_Root-Tips_P Parameter: Organism Value: Zea mays
  misc_feature: MA Experiment 20000108 PARAMETER Experiment Name: Zm_Root-Tips_P Parameter: Tissue Value: Root tips vs. Root mid region    35
  misc_feature: MA Experiment 20000108 PARAMETER Experiment Name: Zm_Root-Tips_P Parameter: Tissue Value: Root tips vs. Root mid region   Sequence Listing-Misc Features (4)
  misc_feature: MA Experiment ID: 20000487 Result: Up-regulated in Transcription
  misc_feature: MA Experiment 20000487 PARAMETER Experiment Name: Zm_50mM_NH4NO3_L_to_H_P Parameter: Organism Value: Zea mays
  misc_feature: MA Experiment 20000487 PARAMETER Experiment Name: Zm_50mM_NH4NO3_L_to_H_P Parameter: Timepoint (hr) Value: 4
  misc_feature: MA Experiment 20000487 PARAMETER Experiment Name: Zm_50mM_NH4NO3_L_to_H_P Parameter: Tissue Value: Leaves
  misc_feature: MA Experiment 20000487 PARAMETER Experiment Name: Zm_50mM_NH4NO3_L_to_H_P Parameter: Treatment Value: 50mM NH4NO3 vs. 100mM Mannitol
gcaaatccccttccgcgtctgtctggcctctggggcttctaggttagcgcgtgccaccaccatggccgaggaggtccaggctccactttccgccaccatggccgaggaggtgcaggctccactttccgccaccatggcgaaggaggcccagtcgccgccgtccgcaaccatagcggaggcgacggcgccgccgcagctcgtattgtttaactcctttacgaagagggaggagccattccagccccgggtagaggggaaggtagggatgtacgtctgtggcgtcactccctacgactttagccacatcggccacgcgcgtgcctacgtcgccttcgacgtcctctacaggtaccttaaattcttggggtatgaagttgaatatgtccgtaatttcacggatattgatgacaagattattaagcgtgccaatgaacgcggtgaaacagtaacaagcttgagtagccagtttatcaatcaatttcttcttgacatgactgagctccagtgcttgcctcctacctgcgagccacgggtaacagaacacattgagcatattataaagttgataacacagataatggacaatggcaaagcctatgctattgaaggagatgtttacttttcagttgaaagttttcctgaatatctcagtttatctggaagaaaatttgatcaaaatcaggcaggtgcacgggttgcttttgatacaagaaagcacaatcctgcagacttcgcactctggaaagctgcaaaggagggtgaacctttttgggatagcccttggggccgtggaagaccaggctggcatattgaatgcagcgcaatgagtgctcactatttaggacatgtattcgatattcatggtggggggaaagatttgatttttcctcatcatgagaatgagcttgcacaaagccgcgcagcttatcctgagagcgaggtcaagtgctggatgcacaatggctttgttaacaaggatgataaaaaaatggcaaaatcagataataactttttcacgattagagatatcactgctctttaccatccaatggctttaagatttttcttgatgcgcacacattatagatcagatgttaaccattctgatcaagcgcttgagattgcatctgatcgtgtctactacatttatcagactttatatgactgtgaggaagtgttagctacatatcgtgaagagggtacctctctcccagtgccgtctgaggagcaaaatctgattggaaagcaccattc

SEQ ID NO: 6717 - protein, 417 aa, Zea mays subsp. mays
  peptide (1)..(417): Ceres Seq. ID no. 13498496
  misc_feature (96)..(199): Pfam Name: tRNA synthetases class I (I, L, M and V) Pfam Description: tRNA synthetases class I (I, L, M and V)
  misc_feature (45)..(413): Homolog of NCBI NO: 37535144 NR Description: putative cysteinyl-tRNA synthetase [Oryza sativa
  misc_feature (65)..(408): Homolog of NCBI NO: 25293240 NR Description: probable cysteinyl-tRNA synthetase [imported] -
  misc_feature (73)..(408): Homolog of NCBI NO: 18402580 NR Description: cysteinyl-tRNA synthetase -related [Arabidopsis
  misc_feature (65)..(415): Homolog of NCBI NO: 15241557 NR Description: cysteine-tRNA ligase -related protein
  misc_feature (65)..(384): Homolog of NCBI NO: 9758060 NR Description: cysteine-tRNA ligase [Arabidopsis thaliana]
  misc_feature (66)..(402): Homolog of NCBI NO: 23055378 NR Description: hypothetical protein [Geobacter metallireducens]
  misc_feature (66)..(408): Homolog of NCBI NO: 23001592 NR Description: hypothetical protein [Magnetococcus sp. MC-1]
  misc_feature (64)..(380): Homolog of NCBI NO: 15228880 NR Description: cysteine-tRNA ligase-related protein [Arabidopsis
  misc_feature (66)..(409): Homolog of NCBI NO: 39998454 NR Description: cysteinyl-tRNA synthetase [Geobacter
  misc_feature (66)..(390): Homolog of NCBI NO: 34497201 NR Description: cysteinyl-tRNA synthetase [Chromobacterium
QIPFRVCLASGASRLARATTMAEEVQAPLSATMAEEVQAPLSATMAKEAQSPPSATIAEATAPPQLVLFNSFTKREEPFQPRVEGKVGMYVCGVTPYDFSHIGHARAYVAFDVLYRYLKFLGYEVEYVRNFTDIDDKIIKRANERGETVTSLSSQFINQFLLDMTELQCLPPTCEPRVTEHIEHIIKLITQIMDNGKAYAIEGDVYFSVESFPEYLSLSGRKFDQNQAGARVAFDTRKHNPADFALWKAAKEGEPFWDSPWGRGRPGWHIECSAMSAHYLGHVFDIHGGGKDLIFPHHENELAQSRAAYPESEVKCWMHNGFVNKDDKKMAKSDNNFFTIRDITALYHPMALRFFLMRTHYRSDVNHSDQALEIASDRVYYIYQTLYDCEEVLATYREEGTSLPVPSEEQNLIGKHH

SEQ ID NO: 6718 - protein, 397 aa, Zea mays subsp. mays
  peptide (1)..(397): Ceres Seq. ID no. 13498497
  misc_feature (76)..(179): Pfam Name: tRNA synthetases class I (I, L, M and V) Pfam Description: tRNA synthetases class I (I, L, M and V)
  misc_feature (25)..(393): Homolog of NCBI NO: 37535144 NR Description: putative cysteinyl-tRNA synthetase [Oryza sativa
  misc_feature (45)..(388): Homolog of NCBI NO: 25293240 NR Description: probable cysteinyl-tRNA synthetase [imported] -
  misc_feature (53)..(388): Homolog of NCBI NO: 18402580 NR Description: cysteinyl-tRNA synthetase -related [Arabidopsis
  misc_feature (45)..(395): Homolog of NCBI NO: 15241557 NR Description: cysteine-tRNA ligase -related protein
  misc_feature (45)..(364): Homolog of NCBI NO: 9758060 NR Description: cysteine-tRNA ligase [Arabidopsis thaliana]
  misc_feature (46)..(382): Homolog of NCBI NO: 23055378 NR Description: hypothetical protein [Geobacter metallireducens]
  misc_feature (46)..(388): Homolog of NCBI NO: 23001592 NR Description: hypothetical protein [Magnetococcus sp. MC-1]
  misc_feature (44)..(360): Homolog of NCBI NO: 15228880 NR Description: cysteine-tRNA ligase-related protein [Arabidopsis
  misc_feature (46)..(389): Homolog of NCBI NO: 39998454 NR Description: cysteinyl-tRNA synthetase [Geobacter
  misc_feature (46)..(370): Homolog of NCBI NO: 34497201 NR Description: cysteinyl-tRNA synthetase [Chromobacterium
MAEEVQAPLSATMAEEVQAPLSATMAKEAQSPPSATIAEATAPPQLVLFNSFTKREEPFQPRVEGKVGMYVCGVTPYDFSHIGHARAYVAFDVLYRYLKFLGYEVEYVRNFTDIDDKIIKRANERGETVTSLSSQFINQFLLDMTELQCLPPTCEPRVTEHIEHIIKLITQIMDNGKAYAIEGDVYFSVESFPEYLSLSGRKFDQNQAGARVAFDTRKHNPADFALWKAAKEGEPFWDSPWGRGRPGWHIECSAMSAHYLGHVFDIHGGGKDLIFPHHENELAQSRAAYPESEVKCWMHNGFVNKDDKKMAKSDNNFFTIRDITALYHPMALRFFLMRTHYRSDVNHSDQALEIASDRVYYIYQTLYDCEEVLATYREEGTSLPVPSEEQNLIGKHH

SEQ ID NO: 6719 - protein, 385 aa, Zea mays subsp. mays
  peptide (1)..(385): Ceres Seq. ID no. 13498498
  misc_feature (64)..(167): Pfam Name: tRNA synthetases class I (I, L, M and V) Pfam Description: tRNA synthetases class I (I, L, M and V)
  misc_feature (13)..(381): Homolog of NCBI NO: 37535144 NR Description: putative cysteinyl-tRNA synthetase [Oryza sativa
  misc_feature (33)..(376): Homolog of NCBI NO: 25293240 NR Description: probable cysteinyl-tRNA synthetase [imported] -
  misc_feature (41)..(376): Homolog of NCBI NO: 18402580 NR Description: cysteinyl-tRNA synthetase -related [Arabidopsis
  misc_feature (33)..(383): Homolog of NCBI NO: 15241557 NR Description: cysteine-tRNA ligase -related protein
  misc_feature (33)..(352): Homolog of NCBI NO: 9758060 NR Description: cysteine-tRNA ligase [Arabidopsis thaliana]
  misc_feature (34)..(370): Homolog of NCBI NO: 23055378 NR Description: hypothetical protein [Geobacter metallireducens]
  misc_feature (34)..(376): Homolog of NCBI NO: 23001592 NR Description: hypothetical protein [Magnetococcus sp. MC-1]
  misc_feature (32)..(348): Homolog of NCBI NO: 15228880 NR Description: cysteine-tRNA ligase-related protein [Arabidopsis
  misc_feature (34)..(377): Homolog of NCBI NO: 39998454 NR Description: cysteinyl-tRNA synthetase [Geobacter
  misc_feature (34)..(358): Homolog of NCBI NO: 34497201 NR Description: cysteinyl-tRNA synthetase [Chromobacterium
MAEEVQAPLSATMAKEAQSPPSATIAEATAPPQLVLFNSFTKREEPFQPRVEGKVGMYVCGVTPYDFSHIGHARAYVAFDVLYRYLKFLGYEVEYVRNFTDIDDKIIKRANERGETVTSLSSQFINQFLLDMTELQCLPPTCEPRVTEHIEHIIKLITQIMDNGKAYAIEGDVYFSVESFPEYLSLSGRKFDQNQAGARVAFDTRKHNPADFALWKAAKEGEPFWDSPWGRGRPGWHIECSAMSAHYLGHVFDIHGGGKDLIFPHHENELAQSRAAYPESEVKCWMHNGFVNKDDKKMAKSDNNFFTIRDITALYHPMALRFFLMRTHYRSDVNHSDQALEIASDRVYYIYQTLYDCEEVLATYREEGTSLPVPSEEQNLIGKHH

SEQ ID NO: 6720 - DNA, 1442 bp, Zea mays subsp. mays
  misc_feature (1)..(1442): Ceres Seq. ID no. 13498707
  misc_feature: MA Experiment ID: 108529 Result: Down-regulated in Transcription
  misc_feature: MA Experiment 108529 PARAMETER Experiment Name: Zm_Imbibed_Seeds_P Parameter: Age (day) Value: 5 vs. 2
  misc_feature: MA Experiment 108529 PARAMETER Experiment Name: Zm_Imbibed_Seeds_P Parameter: Organism Value: Zea mays
  misc_feature: MA Experiment 108529 PARAMETER Experiment Name: Zm_Imbibed_Seeds_P Parameter: Plant Line Value: 35A19
  misc_feature: MA Experiment 108529 PARAMETER Experiment Name: Zm_Imbibed_Seeds_P Parameter: Tissue Value: Roots vs. Embryo
  misc_feature: MA Experiment ID: 108545 Result: Up-regulated in Transcription
  misc_feature: MA Experiment 108545 PARAMETER Experiment Name: Zm_Imbibed_Seeds_P Parameter: Age (day) Value: 3 vs. 2
  misc_feature: MA Experiment 108545 PARAMETER Experiment Name: Zm_Imbibed_Seeds_P Parameter: Organism Value: Zea mays
  misc_feature: MA Experiment 108545 PARAMETER Experiment Name: Zm_Imbibed_Seeds_P Parameter: Plant Line Value: 35A19
  misc_feature: MA Experiment 108545 PARAMETER Experiment Name: Zm_Imbibed_Seeds_P Parameter: Tissue Value: Aerial vs. Embryo
  misc_feature: MA Experiment ID: 108547 Result: Up-regulated in Transcription
  misc_feature: MA Experiment 108547 PARAMETER Experiment Name: Zm_Imbibed_Seeds_P Parameter: Age (day) Value: 4 vs. 2
  misc_feature: MA Experiment 108547 PARAMETER Experiment Name: Zm_Imbibed_Seeds_P Parameter: Organism Value: Zea mays
  misc_feature: MA Experiment 108547 PARAMETER Experiment Name: Zm_Imbibed_Seeds_P Parameter: Plant Line Value: 35A19
  misc_feature: MA Experiment 108547 PARAMETER Experiment Name: Zm_Imbibed_Seeds_P Parameter: Tissue Value: Aerial vs. Embryo
  misc_feature: MA Experiment ID: 20000630 Result: Down-regulated in Transcription
  misc_feature: MA Experiment 20000630 PARAMETER Experiment Name: Zm_Herbicide-Treatments_P Parameter: Timepoint (hr) Value: 4
  misc_feature: MA Experiment 20000630 PARAMETER Experiment Name: Zm_Herbicide-Treatments_P Parameter: Tissue Value: Aerial
  misc_feature: MA Experiment 20000630 PARAMETER Experiment Name: Zm_Herbicide-Treatments_P Parameter: Treatment Value: Roundup vs. No Treatment
ctgaaagaaacaaaaaaataaataaaacaaagataaatcattggggttgggggattgcaattgcaagttgccgctgtgcggtngcggtcgctcccctcccgactccggccagcagcagcgacggtgccggcagtcgattactccacgcggcggcggcggcggcggtagcccatcctttcccgttttctgatccagtcctactgataccgggcacagcacgcctgctcttgtgatatactctattaaggtacggcgtgaagatgagggttttcttggtctcgtgaaggcgacgctcttgtctgctaactacatattatagaatgttttgcttgaggggctactggtcgccttcactagctccagtgagggaagggcctgttcgacatcatataaagttcaattctatagtggtttgtggtgccaggggtccgagaccgagatatccccgtgtgtggaaaactcgtaagaaaattgggactatttccaagtcgcagaagcttgtcgaatgtattaaaggtctgtctaatgtaaaggaggaagtttatggggcacttgactcatttgttgcatgggaactggagtttcccttgatagtggtaaagaaggcactgaagaaacttgaggacgaaaaggaatggaaacgaataattcaggtcattaaatggatgttcaacaaaggtcaagggaagacaatgggaagctattacaccttgttgaatgctttgatcgaggatggacggattgaggaagcagaagagttatttggaatggtgttctcacgatatatggagggtttgcctcgtacatttttcatgagaatgatttctttctattacaacgtggaagcgtatgataatatgtttgagatttttgctgatatggaggaactaggcgtaagacctgatggttctattatcaggatgctaggtgatgtatttcagaagttagagatgatggacaaatatgaaaagttaaaaaagaaataccgaccaccgaaatgggaatatcgacacatcaaaggcaagcgcataagaatcagagtttatcctgacagtaatcctgaagtggcggcaaaaggagatcccgacactgatgagctcgaagagttagaaagcacacaccttaataacgaattggatgaagcagcaagctcaggcctcgacaggagtgtattggacgatgcagcttctggagaccttgaatatatgtagatcagagcttccatttggtacttttttgtgcctgcttaaccaaagcggtctagagcaaattgaactggtaacatactctctgttttgatttgacatcctagaacccgtgtcgtcatactgccaagacatgggcatcgctatcttctgaagtatttttactacctagaatgagtagaaactacatgccaggctttgccatcagcagtcttttcaagacatcatggtggtttc

SEQ ID NO: 6721 - protein, 296 aa, Zea mays subsp. mays
  peptide (1)..(296): Ceres Seq. ID no. 13498708
  misc_feature (126)..(160): Pfam Name: PPR repeat Pfam Description: PPR repeat
  misc_feature (1)..(296): Homolog of NCBI NO: 34909686 NR Description: B1131G08.1 [Oryza sativa (japonica
  misc_feature (1)..(283): Homolog of NCBI NO: 18415645 NR Description: pentatricopeptide (PPR) repeat-containing protein thaliana] >gi|21618230|gb|AAM67280.1| unknown [Arabidopsis
  misc_feature (31)..(283): Homolog of NCBI NO: 7486589 NR Description: hypothetical protein F7J7.130 - Arabidopsis >gi|2911076|emb|CAA17538.1| putative protein [Arabidopsis >gi|7268916|emb|CAB79119.1| putative protein [Arabidopsis
  misc_feature (44)..(242): Homolog of NCBI NO: 18415213 NR Description: pentatricopeptide (PPR) repeat-containing protein
  misc_feature (44)..(232): Homolog of NCBI NO: 7485419 NR Description: hypothetical protein F13C5.140 - Arabidopsis >gi|2832625|emb|CAA16754.1| putative protein [Arabidopsis >gi|7268691|emb|CAB78899.1| putative protein [Arabidopsis
  misc_feature (44)..(240): Homolog of NCBI NO: 34393638 NR Description: pentatricopeptide (PPR) repeat-containing
  misc_feature (42)..(277): Homolog of NCBI NO: 18390413 NR Description: expressed protein [Arabidopsis thaliana] unknown protein [Arabidopsis thaliana]
  misc_feature (42)..(277): Homolog of NCBI NO: 30678929 NR Description: expressed protein [Arabidopsis thaliana]
  misc_feature (71)..(277): Homolog of NCBI NO: 25406795 NR Description: hypothetical protein [imported] - Arabidopsis >gi|2494119|gb|AAB80628.1| EST gb|T04104 comes from this gene.
MFCLRGYWSPSLAPVREGPVRHHIKFNSIVVCGARGPRPRYPRVWKTRKKIGTISKSQKLVECIKGLSNVKEEVYGALDSFVAWELEFPLIVVKKALKKLEDEKEWKRIIQVIKWMFNKGQGKTMGSYYTLLNALIEDGRIEEAEELFGMVFSRYMEGLPRTFFMRMISFYYNVEAYDNMFEIFADMEELGVRPDGSIIRMLGDVFQKLEMMDKYEKLKKKYRPPKWEYRHIKGKRIRIRVYPDSNPEVAAKGDPDTDELEELESTHLNNELDEAASSGLDRSVLDDAASGDLEYM

SEQ ID NO: 6722 - protein, 181 aa, Zea mays subsp. mays
  peptide (1)..(181): Ceres Seq. ID no. 13498709
  misc_feature (11)..(45): Pfam Name: PPR repeat Pfam Description: PPR repeat
  misc_feature (1)..(181): Homolog of NCBI NO: 34909686 NR Description: B1131G08.1 [Oryza sativa (japonica
  misc_feature (1)..(168): Homolog of NCBI NO: 18415645 NR Description: pentatricopeptide (PPR) repeat-containing protein thaliana] >gi|21618230|gb|AAM67280.1| unknown [Arabidopsis
  misc_feature (1)..(168): Homolog of NCBI NO: 7486589 NR Description: hypothetical protein F7J7.130 - Arabidopsis >gi|2911076|emb|CAA17538.1| putative protein [Arabidopsis >gi|7268916|emb|CAB79119.1| putative protein [Arabidopsis
  misc_feature (1)..(127): Homolog of NCBI NO: 18415213 NR Description: pentatricopeptide (PPR) repeat-containing protein
  misc_feature (1)..(117): Homolog of NCBI NO: 7485419 NR Description: hypothetical protein F13C5.140 - Arabidopsis >gi|2832625|emb|CAA16754.1| putative protein [Arabidopsis >gi|7268691|emb|CAB78899.1| putative protein [Arabidopsis
  misc_feature (1)..(125): Homolog of NCBI NO: 34393638 NR Description: pentatricopeptide (PPR) repeat-containing
  misc_feature (1)..(162): Homolog of NCBI NO: 18390413 NR Description: expressed protein [Arabidopsis thaliana] unknown protein [Arabidopsis thaliana]
  misc_feature (1)..(162): Homolog of NCBI NO: 30678929 NR Description: expressed protein [Arabidopsis thaliana]
  misc_feature (1)..(162): Homolog of NCBI NO: 25406795 NR Description: hypothetical protein [imported] - Arabidopsis >gi|2494119|gb|AAB80628.1| EST gb|T04104 comes from this gene.
MFNKGQGKTMGSYYTLLNALIEDGRIEEAEELFGMVFSRYMEGLPRTFFMRMISFYYNVEAYDNMFEIFADMEELGVRPDGSIIRMLGDVFQKLEMMDKYEKLKKKYRPPKWEYRHIKGKRIRIRVYPDSNPEVAAKGDPDTDELEELESTHLNNELDEAASSGLDRSVLDDAASGDLEYM

SEQ ID NO: 6723 - protein, 172 aa, Zea mays subsp. mays
  peptide (1)..(172): Ceres Seq. ID no. 13498710
  misc_feature (2)..(36): Pfam Name: PPR repeat Pfam Description: PPR repeat
  misc_feature (1)..(172): Homolog of NCBI NO: 34909686 NR Description: B1131G08.1 [Oryza sativa (japonica
  misc_feature (1)..(159): Homolog of NCBI NO: 18415645 NR Description: pentatricopeptide (PPR) repeat-containing protein thaliana] >gi|21618230|gb|AAM67280.1| unknown [Arabidopsis
  misc_feature (1)..(159): Homolog of NCBI NO: 7486589 NR Description: hypothetical protein F7J7.130 - Arabidopsis >gi|2911076|emb|CAA17538.1| putative protein [Arabidopsis >gi|7268916|emb|CAB79119.1| putative protein [Arabidopsis
  misc_feature (1)..(118): Homolog of NCBI NO: 18415213 NR Description: pentatricopeptide (PPR) repeat-containing protein
  misc_feature (1)..(108): Homolog of NCBI NO: 7485419 NR Description: hypothetical protein F13C5.140 - Arabidopsis >gi|2832625|emb|CAA16754.1| putative protein [Arabidopsis >gi|7268691|emb|CAB78899.1| putative protein [Arabidopsis
  misc_feature (1)..(116): Homolog of NCBI NO: 34393638 NR Description: pentatricopeptide (PPR) repeat-containing
  misc_feature (1)..(153): Homolog of NCBI NO: 18390413 NR Description: expressed protein [Arabidopsis thaliana] unknown protein [Arabidopsis thaliana]
  misc_feature (1)..(153): Homolog of NCBI NO: 30678929 NR Description: expressed protein [Arabidopsis thaliana]
  misc_feature (1)..(153): Homolog of NCBI NO: 25406795 NR Description: hypothetical protein [imported] - Arabidopsis >gi|2494119|gb|AAB80628.1| EST gb|T04104 comes from this gene.
MGSYYTLLNALIEDGRIEEAEELFGMVFSRYMEGLPRTFFMRMISFYYNVEAYDNMFEIFADMEELGVRPDGSIIRMLGDVFQKLEMMDKYEKLKKKYRPPKWEYRHIKGKRIRIRVYPDSNPEVAAKGDPDTDELEELESTHLNNELDEAASSGLDRSVLDDAASGDLEYM

SEQ ID NO: 6724 - DNA, 1387 bp, Zea mays subsp. mays
  misc_feature (1)..(1387): Ceres Seq. ID no. 13492693
  misc_feature: MA Experiment ID: 108515 Result: Up-regulated in Transcription
  misc_feature: MA Experiment 108515 PARAMETER Experiment Name: Zm_2mM_SA_P Parameter: Age (day) Value: 8
  misc_feature: MA Experiment 108515 PARAMETER Experiment Name: Zm_2mM_SA_P Parameter: Organism Value: Zea mays
  misc_feature: MA Experiment 108515 PARAMETER Experiment Name: Zm_2mM_SA_P Parameter: Plant Line Value: 35A19
  misc_feature: MA Experiment 108515 PARAMETER Experiment Name: Zm_2mM_SA_P Parameter: Timepoint (hr) Value: 12
  misc_feature: MA Experiment 108515 PARAMETER Experiment Name: Zm_2mM_SA_P Parameter: Tissue Value: Aerial
  misc_feature: MA Experiment 108515 PARAMETER Experiment Name: Zm_2mM_SA_P Parameter: Treatment Value: 2mM SA vs. No Treatment
  misc_feature: MA Experiment ID: 108522 Result: Up-regulated in Transcription
  misc_feature: MA Experiment 108522 PARAMETER Experiment Name: Zm_42deg_Heat_P Parameter: Age (day) Value: 8
  misc_feature: MA Experiment 108522 PARAMETER Experiment Name: Zm_42deg_Heat_P Parameter: Organism Value: Zea mays
  misc_feature: MA Experiment 108522 PARAMETER Experiment Name: Zm_42deg_Heat_P Parameter: Plant Line Value: 35A19
  misc_feature: MA Experiment 108522 PARAMETER Experiment Name: Zm_42deg_Heat_P Parameter: Temperature (deg C) Value: 42 vs. 22
  misc_feature: MA Experiment 108522 PARAMETER Experiment Name: Zm_42deg_Heat_P Parameter: Timepoint (hr) Value: 1
  misc_feature: MA Experiment 108522 PARAMETER Experiment Name: Zm_42deg_Heat_P Parameter: Tissue Value: Aerial
  misc_feature: MA Experiment ID: 108523 Result: Up-regulated in Transcription
  misc_feature: MA Experiment 108523 PARAMETER Experiment Name: Zm_42deg_Heat_P Parameter: Age (day) Value: 8
  misc_feature: MA Experiment 108523 PARAMETER Experiment Name: Zm_42deg_Heat_P Parameter: Organism Value: Zea mays
  misc_feature: MA Experiment 108523 PARAMETER Experiment Name: Zm_42deg_Heat_P Parameter: Plant Line Value: 35A19
  misc_feature: MA Experiment 108523 PARAMETER Experiment Name: Zm_42deg_Heat_P Parameter: Temperature (deg C) Value: 42 vs. 22
  misc_feature: MA Experiment 108523 PARAMETER Experiment Name: Zm_42deg_Heat_P Parameter: Timepoint (hr) Value: 6
  misc_feature: MA Experiment 108523 PARAMETER Experiment Name: Zm_42deg_Heat_P Parameter: Tissue Value: Aerial
  misc_feature: MA Experiment ID: 108526 Result: Up-regulated in Transcription
  misc_feature: MA Experiment 108526 PARAMETER Experiment Name: Zm_5mM_NO_P Parameter: Age (day) Value: 8
  misc_feature: MA Experiment 108526 PARAMETER Experiment Name: Zm_5mM_NO_P Parameter: Organism Value: Zea mays
  misc_feature: MA Experiment 108526 PARAMETER Experiment Name: Zm_5mM_NO_P Parameter: Plant Line Value: 35A19
  misc_feature: MA Experiment 108526 PARAMETER Experiment Name: Zm_5mM_NO_P Parameter: Timepoint (hr) Value: 1
  misc_feature: MA Experiment 108526 PARAMETER Experiment Name: Zm_5mM_NO_P Parameter: Tissue Value: Aerial
  misc_feature: MA Experiment 108526 PARAMETER Experiment Name: Zm_5mM_NO_P Parameter: Treatment Value: 5mM NO vs. No Treatment
  misc_feature: MA Experiment ID: 108527 Result: Up-regulated in Transcription
  misc_feature: MA Experiment 108527 PARAMETER Experiment Name: Zm_5mM_NO_P Parameter: Age (day) Value: 8
  misc_feature: MA Experiment 108527 PARAMETER Experiment Name: Zm_5mM_NO_P Parameter: Organism Value: Zea mays
  misc_feature: MA Experiment 108527 PARAMETER Experiment Name: Zm_5mM_NO_P Parameter: Plant Line Value: 35A19
  misc_feature: MA Experiment 108527 PARAMETER Experiment Name: Zm_5mM_NO_P Parameter: Timepoint (hr) Value: 6
  misc_feature: MA Experiment 108527 PARAMETER Experiment Name: Zm_5mM_NO_P Parameter: Tissue Value: Aerial
  misc_feature: MA Experiment 108527 PARAMETER Experiment Name: Zm_5mM_NO_P Parameter: Treatment Value: 5mM NO vs. No Treatment
  misc_feature: MA Experiment ID: 108529 Result: Up-regulated in Transcription
  misc_feature: MA Experiment 108529 PARAMETER Experiment Name: Zm_Imbibed_Seeds_P Parameter: Age (day) Value: 5 vs. 2
  misc_feature: MA Experiment 108529 PARAMETER Experiment Name: Zm_Imbibed_Seeds_P Parameter: Organism Value: Zea mays
  misc_feature: MA Experiment 108529 PARAMETER Experiment Name: Zm_Imbibed_Seeds_P Parameter: Plant Line Value: 35A19
  misc_feature: MA Experiment 108529 PARAMETER Experiment Name: Zm_Imbibed_Seeds_P Parameter: Tissue Value: Roots vs. Embryo
  misc_feature: MA Experiment ID: 108530 Result: Down-regulated in Transcription
  misc_feature: MA Experiment 108530 PARAMETER Experiment Name: Zm_Imbibed_Seeds_P Parameter: Age (day) Value: 6 vs. 2
  misc_feature: MA Experiment 108530 PARAMETER Experiment Name: Zm_Imbibed_Seeds_P Parameter: Organism Value: Zea mays
  misc_feature: MA Experiment 108530 PARAMETER Experiment Name: Zm_Imbibed_Seeds_P Parameter: Plant Line Value: 35A19
  misc_feature: MA Experiment 108530 PARAMETER Experiment Name: Zm_Imbibed_Seeds_P Parameter: Tissue Value: Aerial vs. Embryo
  misc_feature: MA Experiment ID: 108535 Result: Down-regulated in Transcription
  misc_feature: MA Experiment 108535 PARAMETER Experiment Name: Zm_Meristem_P Parameter: Age (day) Value: 8
  misc_feature: MA Experiment 108535 PARAMETER Experiment Name: Zm_Meristem_P Parameter: Organism Value: Zea mays
  misc_feature: MA Experiment 108535 PARAMETER Experiment Name: Zm_Meristem_P Parameter: Plant Line Value: 35A19
  misc_feature: MA Experiment 108535 PARAMETER Experiment Name: Zm_Meristem_P Parameter: Tissue Value: Root Meristem vs. Above Root Meristem
  misc_feature: MA Experiment ID: 108542 Result: Up-regulated in Transcription
  misc_feature: MA Experiment 108542 PARAMETER Experiment Name: Zm_150mM_NaCl_P Parameter: Age (day) Value: 8
  misc_feature: MA Experiment 108542 PARAMETER Experiment Name: Zm_150mM_NaCl_P Parameter: Organism Value: Zea mays
  misc_feature: MA Experiment 108542 PARAMETER Experiment Name: Zm_150mM_NaCl_P Parameter: Plant Line Value: 35A19
  misc_feature: MA Experiment 108542 PARAMETER Experiment Name: Zm_150mM_NaCl_P Parameter: Timepoint (hr) Value: 6
  misc_feature: MA Experiment 108542 PARAMETER Experiment Name: Zm_150mM_NaCl_P Parameter: Tissue Value: Aerial
  misc_feature: MA Experiment 108542 PARAMETER Experiment Name: Zm_150mM_NaCl_P Parameter: Treatment Value: 150mM NaCl vs. No Treatment
  misc_feature: MA Experiment ID: 108545 Result: Down-regulated in Transcription
  misc_feature: MA Experiment 108545 PARAMETER Experiment Name: Zm_Imbibed_Seeds_P Parameter: Age (day) Value: 3 vs. 2
  misc_feature: MA Experiment 108545 PARAMETER Experiment Name: Zm_Imbibed_Seeds_P Parameter: Organism Value: Zea mays
  misc_feature: MA Experiment 108545 PARAMETER Experiment Name: Zm_Imbibed_Seeds_P Parameter: Plant Line Value: 35A19
  misc_feature: MA Experiment 108545 PARAMETER Experiment Name: Zm_Imbibed_Seeds_P Parameter: Tissue Value: Aerial vs. Embryo
  misc_feature: MA Experiment ID: 108547 Result: Down-regulated in Transcription
  misc_feature: MA Experiment 108547 PARAMETER Experiment Name: Zm_Imbibed_Seeds_P Parameter: Age (day) Value: 4 vs. 2
  misc_feature: MA Experiment 108547 PARAMETER Experiment Name: Zm_Imbibed_Seeds_P Parameter: Organism Value: Zea mays
  misc_feature: MA Experiment 108547 PARAMETER Experiment Name: Zm_Imbibed_Seeds_P Parameter: Plant Line Value: 35A19
  misc_feature: MA Experiment 108547 PARAMETER Experiment Name: Zm_Imbibed_Seeds_P Parameter: Tissue Value: Aerial vs. Embryo
  misc_feature: MA Experiment ID: 108559 Result: Up-regulated in Transcription
  misc_feature: MA Experiment 108559 PARAMETER Experiment Name: Zm_5mM_NO_P Parameter: Age (day) Value: 8
  misc_feature: MA Experiment 108559 PARAMETER Experiment Name: Zm_5mM_NO_P Parameter: Organism Value: Zea mays
  misc_feature: MA Experiment 108559 PARAMETER Experiment Name: Zm_5mM_NO_P Parameter: Plant Line Value: 35A19
  misc_feature: MA Experiment 108559 PARAMETER Experiment Name: Zm_5mM_NO_P Parameter: Timepoint (hr) Value: 12
  misc_feature: MA Experiment 108559 PARAMETER Experiment Name: Zm_5mM_NO_P Parameter: Tissue Value: Aerial
  misc_feature: MA Experiment 108559 PARAMETER Experiment Name: Zm_5mM_NO_P Parameter: Treatment Value: 5mM NO vs. No Treatment
  misc_feature: MA Experiment ID: 20000477 Result: Up-regulated in Transcription
  misc_feature: MA Experiment 20000477 PARAMETER Experiment Name: Zm_5mM_SA_P Parameter: Age (day) Value: 10
  misc_feature: MA Experiment 20000477 PARAMETER Experiment Name: Zm_5mM_SA_P Parameter: Organism Value: Zea mays
  misc_feature: MA Experiment 20000477 PARAMETER Experiment Name: Zm_5mM_SA_P Parameter: Plant Line Value: 35A19
  misc_feature: MA Experiment 20000477 PARAMETER Experiment Name: Zm_5mM_SA_P Parameter: Timepoint (hr) Value: 48
  misc_feature: MA Experiment 20000477 PARAMETER Experiment Name: Zm_5mM_SA_P Parameter: Tissue Value: Aerial
  misc_feature: MA Experiment 20000477 PARAMETER Experiment Name: Zm_5mM_SA_P Parameter: Treatment Value: 5mM SA vs. No Treatment
  misc_feature: MA Experiment ID: 20000478 Result: Up-regulated in Transcription
  misc_feature: MA Experiment 20000478 PARAMETER Experiment Name: Zm_5mM_SA_P Parameter: Age (day) Value: 11
  misc_feature: MA Experiment 20000478 PARAMETER Experiment Name: Zm_5mM_SA_P Parameter: Organism Value: Zea mays
  misc_feature: MA Experiment 20000478 PARAMETER Experiment Name: Zm_5mM_SA_P Parameter: Plant Line Value: 35A19
  misc_feature: MA Experiment 20000478 PARAMETER Experiment Name: Zm_5mM_SA_P Parameter: Timepoint (hr) Value: 72
  misc_feature: MA Experiment 20000478 PARAMETER Experiment Name: Zm_5mM_SA_P Parameter: Tissue Value: Aerial
  misc_feature: MA Experiment 20000478 PARAMETER Experiment Name: Zm_5mM_SA_P Parameter: Treatment Value: 5mM SA vs. No Treatment
  misc_feature: MA Experiment ID: 20000533 Result: Up-regulated in Transcription
  misc_feature: MA Experiment 20000533 PARAMETER Experiment Name: Zm_0.001percent_MeJA_P Parameter: Age (day) Value: 11
  misc_feature: MA Experiment 20000533 PARAMETER Experiment Name: Zm_0.001percent_MeJA_P Parameter: Organism Value: Zea mays
  misc_feature: MA Experiment 20000533 PARAMETER Experiment Name: Zm_0.001percent_MeJA_P Parameter: Plant Line Value: 35A19
  misc_feature: MA Experiment 20000533 PARAMETER Experiment Name: Zm_0.001percent_MeJA_P Parameter: Timepoint (hr) Value: 72
  misc_feature: MA Experiment 20000533 PARAMETER Experiment Name: Zm_0.001percent_MeJA_P Parameter: Tissue Value: Aerial
  misc_feature: MA Experiment 20000533 PARAMETER Experiment Name: Zm_0.001percent_MeJA_P Parameter: Treatment Value: 0.001percent MeJA vs. No Treatment
  misc_feature: MA Experiment ID: 20000626 Result: Up-regulated in Transcription
  misc_feature: MA Experiment 20000626 PARAMETER Experiment Name: Zm_Herbicide-Treatments_P Parameter: Timepoint (hr) Value: 12
  misc_feature: MA Experiment 20000626 PARAMETER Experiment Name: Zm_Herbicide-Treatments_P Parameter: Tissue Value: Aerial
  misc_feature: MA Experiment 20000626 PARAMETER Experiment Name: Zm_Herbicide-Treatments_P Parameter: Treatment Value: Roundup vs. No Treatment
  misc_feature: MA Experiment ID: 20001610 Result: Down-regulated in Transcription
  misc_feature: MA Experiment 20001610 PARAMETER Experiment Name: Zm_50ppm_KNO3_L-to-H_P Parameter: Age (day) Value: 19
  misc_feature: MA Experiment 20001610 PARAMETER Experiment Name: Zm_50ppm_KNO3_L-to-H_P Parameter: Organism Value: Zea mays
  misc_feature: MA Experiment 20001610 PARAMETER Experiment Name: Zm_50ppm_KNO3_L-to-H_P Parameter: Plant Line Value: 35A19
  misc_feature: MA Experiment 20001610 PARAMETER Experiment Name: Zm_50ppm_KNO3_L-to-H_P Parameter: Timepoint (hr) Value: 2
  misc_feature: MA Experiment 20001610 PARAMETER Experiment Name: Zm_50ppm_KNO3_L-to-H_P Parameter: Tissue Value: Roots
  misc_feature: MA Experiment 20001610 PARAMETER Experiment Name: Zm_50ppm_KNO3_L-to-H_P Parameter: Treatment Value: 50ppm KNO3 vs. 50ppm KCl
acttccaaactgcaacgaaaacccacgtctaaaacaggtggcccaccaacgattcacttccccgatcccagggggcggcgatcggaattcgcaacttctcccacgcggcgaacacggcagagatgatgagctcccgggccggatccatcctcctccgccacgccggctcccgtctcttcaccgcagcggcgatctctccggcggcggcctcgaggccactgctcgccggcggcaatggtgttccggcagtcatgctacggcttatgtccacgtcctcccccgccgctcccacggaggcgaaggacgaggcagccaaggcctccaaggtgggaggagacaagaaggcggtggtgatcaacagctactgggggatcgagcaaaacaacaagctagcgcgggacgacggcaccgagtggaagtggacttgctttaggccatgggagacgtacacggcggacacgtccattgacctcaccagacaccatgagcccaagacgctgatggataaggtcgcatactggaccgtcaagtcgctgcgcttccccacggacatcttcttccagaggcggtatggctgccgggcgatgatgctggaaaccgtggctgcggtgcctgggatggtgggcggcatgctgctccacctgcgctcactccgccgcttcgagcagagcggcggctggatccgcgctttgctggaggaggccgagaacgagcgcatgcacctcatgaccttcatggaggtggcgaagccgaggtggtacgagcgcgcgctcgttatcaccgtccagggcgtcttcttcaacgcatacttcctcggctacctcttgtccccgaagttcgcgcaccgcgtcgtcggctacctggaggaggaggccatccactcgtacaccgagtacctcaaggatctggaggccggcaagatcgagaacgtccccgccccggccatcgccatcgactactggcgcctccccgctaacgccacgctcaaggacgtagtcaccgtcgtccgcgccgacgaggctcaccaccgcgacgtcaaccactttgcatcggacatccattgccagggaatgcagctgaagcagtcccctgcgccgatcggataccactgaggatgtttgtgctcttcttaattttgcatcgctaataagcaattgtctttaagggaaggaaaggatgcttattgagttacgagtactgctacggcgattaggatattttccaaccagttgtttgagagtgaaacctattatatgtacgcatgttacatgtacatatctctaagtgcgagaggtgcttttctggcgtttatcacttcttcctggagttcctttgttcttcatgtcagctgaattgggctcgctaatatcgaatgtacaatttttgc

SEQ ID NO: 6725 - protein, 329 aa, Zea mays subsp. mays
  peptide (1)..(329): Ceres Seq. ID no. 13492694
  misc_feature (52)..(327): Pfam Name: Alternative oxidase Pfam Description: Alternative oxidase
  misc_feature (1)..(329): Homolog of NCBI NO: 25989199 NR Description: alternative oxidase AOX2 precursor [Zea mays]
  misc_feature (2)..(329): Homolog of NCBI NO: 3218544 NR Description: alternative oxidase [Oryza sativa (japonica >gi|3218546|dbj|BAA28773.1| alternative oxidase [Oryza sativa
  misc_feature (2)..(329): Homolog of NCBI NO: 19912725 NR Description: alternative oxidase [Triticum aestivum]
  misc_feature (1)..(329): Homolog of NCBI NO: 16902306 NR Description: alternative oxidase 1c [Oryza sativa (japonica group)] >gi|16902308|dbj|BAB71945.1| alternative oxidase 1c
  misc_feature (65)..(329): Homolog of NCBI NO: 5802557 NR Description: alternative oxidase [Triticum aestivum]
  misc_feature (23)..(329): Homolog of NCBI NO: 25989197 NR Description: alternative oxidase AOX1 precursor [Zea mays]
  misc_feature (49)..(329): Homolog of NCBI NO: 19912727 NR Description: alternative oxidase [Triticum aestivum]
  misc_feature (1)..(329): Homolog of NCBI NO: 1588565 NR Description: alternative oxidase 1
  misc_feature (58)..(329): Homolog of NCBI NO: 421824 NR Description: alternative respiratory pathway oxidase (EC
  misc_feature (58)..(329): Homolog of NCBI NO: 1872517 NR Description: alternative oxidase [Arabidopsis thaliana]
MMSSRAGSILLRHAGSRLFTAAAISPAAASRPLLAGGNGVPAVMLRLMSTSSPAAPTEAKDEAAKASKVGGDKKAVVINSYWGIEQNNKLARDDGTEWKWTCFRPWETYTADTSIDLTRHHEPKTLMDKVAYWTVKSLRFPTDIFFQRRYGCRAMMLETVAAVPGMVGGMLLHLRSLRRFEQSGGWIRALLEEAENERMHLMTFMEVAKPRWYERALVITVQGVFFNAYFLGYLLSPKFAHRVVGYLEEEAIHSYTEYLKDLEAGKIENVPAPAIAIDYWRLPANATLKDVVTVVRADEAHHRDVNHFASDIHCQGMQLKQSPAPIGYH

SEQ ID NO: 6726 - protein, 328 aa, Zea mays subsp. mays
  peptide (1)..(328): Ceres Seq. ID no. 13492695
  misc_feature (51)..(326): Pfam Name: Alternative oxidase Pfam Description: Alternative oxidase
  misc_feature (1)..(328): Homolog of NCBI NO: 25989199 NR Description: alternative oxidase AOX2 precursor [Zea mays]
  misc_feature (1)..(328): Homolog of NCBI NO: 3218544 NR Description: alternative oxidase [Oryza sativa (japonica >gi|3218546|dbj|BAA28773.1| alternative oxidase [Oryza sativa
  misc_feature (1)..(328): Homolog of NCBI NO: 19912725 NR Description: alternative oxidase [Triticum aestivum]
  misc_feature (1)..(328): Homolog of NCBI NO: 16902306 NR Description: alternative oxidase 1c [Oryza sativa (japonica group)] >gi|16902308|dbj|BAB71945.1| alternative oxidase 1c
  misc_feature (64)..(328): Homolog of NCBI NO: 5802557 NR Description: alternative oxidase [Triticum aestivum]
  misc_feature (22)..(328): Homolog of NCBI NO: 25989197 NR Description: alternative oxidase AOX1 precursor [Zea mays]
  misc_feature (48)..(328): Homolog of NCBI NO: 19912727 NR Description: alternative oxidase [Triticum aestivum]
  misc_feature (1)..(328): Homolog of NCBI NO: 1588565 NR Description: alternative oxidase 1
  misc_feature (57)..(328): Homolog of NCBI NO: 421824 NR Description: alternative respiratory pathway oxidase (EC
  misc_feature (57)..(328): Homolog of NCBI NO: 15228734 NR Description: alternative oxidase 1a, mitochondrial (AOX1A) thaliana] >gi|3915639|sp|Q39219|AX1A_ARATH Alternative oxidase
MSSRAGSILLRHAGSRLFTAAAISPAAASRPLLAGGNGVPAVMLRLMSTSSPAAPTEAKDEAAKASKVGGDKKAVVINSYWGIEQNNKLARDDGTEWKWTCFRPWETYTADTSIDLTRHHEPKTLMDKVAYWTVKSLRFPTDIFFQRRYGCRAMMLETVAAVPGMVGGMLLHLRSLRRFEQSGGWIRALLEEAENERMHLMTFMEVAKPRWYERALVITVQGVFFNAYFLGYLLSPKFAHRVVGYLEEEAIHSYTEYLKDLEAGKIENVPAPAIAIDYWRLPANATLKDVVTVVRADEAHHRDVNHFASDIHCQGMQLKQSPAPIGYH

SEQ ID NO: 6727 - protein, 286 aa, Zea mays subsp. mays
  peptide (1)..(286): Ceres Seq. ID no. 13492696
  misc_feature (9)..(284): Pfam Name: Alternative oxidase Pfam Description: Alternative oxidase
  misc_feature (1)..(286): Homolog of NCBI NO: 19912725 NR Description: alternative oxidase [Triticum aestivum]
  misc_feature (1)..(286): Homolog of NCBI NO: 16902306 NR Description: alternative oxidase 1c [Oryza sativa (japonica group)] >gi|16902308|dbj|BAB71945.1| alternative oxidase 1c
  misc_feature (22)..(286): Homolog of NCBI NO: 5802557 NR Description: alternative oxidase [Triticum aestivum]
  misc_feature (1)..(286): Homolog of NCBI NO: 25989197 NR Description: alternative oxidase AOX1 precursor [Zea mays]
  misc_feature (1)..(286): Homolog of NCBI NO: 25989199 NR Description: alternative oxidase AOX2 precursor [Zea mays]
  misc_feature (1)..(286): Homolog of NCBI NO: 3218544 NR Description: alternative oxidase [Oryza sativa (japonica >gi|3218546|dbj|BAA28773.1| alternative oxidase [Oryza sativa
  misc_feature (6)..(286): Homolog of NCBI NO: 19912727 NR Description: alternative oxidase [Triticum aestivum]
  misc_feature (1)..(286): Homolog of NCBI NO: 1588565 NR Description: alternative oxidase 1
  misc_feature (15)..(286): Homolog of NCBI NO: 421824 NR Description: alternative respiratory pathway oxidase (EC
  misc_feature (15)..(286): Homolog of NCBI NO: 1872517 NR Description: alternative oxidase [Arabidopsis thaliana]
MLRLMSTSSPAAPTEAKDEAAKASKVGGDKKAVVINSYWGIEQNNKLARDDGTEWKWTCFRPWETYTADTSIDLTRHHEPKTLMDKVAYWTVKSLRFPTDIFFQRRYGCRAMMLETVAAVPGMVGGMLLHLRSLRRFEQSGGWIRALLEEAENERMHLMTFMEVAKPRWYERALVITVQGVFFNAYFLGYLLSPKFAHRVVGYLEEEAIHSYTEYLKDLEAGKIENVPAPAIAIDYWRLPANATLKDVVTVVRADEAHHRDVNHFASDIHCQGMQLKQSPAPIGYH

SEQ ID NO: 6728 - DNA, 1316 bp, Zea mays subsp. mays
  misc_feature (1)..(1316): Ceres Seq. ID no. 12347498
  misc_feature: MA Experiment ID: 108522 Result: Down-regulated in Transcription
  misc_feature: MA Experiment 108522 PARAMETER Experiment Name: Zm_42deg_Heat_P Parameter: Age (day) Value: 8
  misc_feature: MA Experiment 108522 PARAMETER Experiment Name: Zm_42deg_Heat_P Parameter: Organism Value: Zea mays
  misc_feature: MA Experiment 108522 PARAMETER Experiment Name: Zm_42deg_Heat_P Parameter: Plant Line Value: 35A19
  misc_feature: MA Experiment 108522 PARAMETER Experiment Name: Zm_42deg_Heat_P Parameter: Temperature (deg C) Value: 42 vs. 22
  misc_feature: MA Experiment 108522 PARAMETER Experiment Name: Zm_42deg_Heat_P Parameter: Timepoint (hr) Value: 1
  misc_feature: MA Experiment 108522 PARAMETER Experiment Name: Zm_42deg_Heat_P Parameter: Tissue Value: Aerial
  misc_feature: MA Experiment ID: 108527 Result: Down-regulated in Transcription
  misc_feature: MA Experiment 108527 PARAMETER Experiment Name: Zm_5mM_NO_P Parameter: Age (day) Value: 8
  misc_feature: MA Experiment 108527 PARAMETER Experiment Name: Zm_5mM_NO_P Parameter: Organism Value: Zea mays
  misc_feature: MA Experiment 108527 PARAMETER Experiment Name: Zm_5mM_NO_P Parameter: Plant Line Value: 35A19
  misc_feature: MA Experiment 108527 PARAMETER Experiment Name: Zm_5mM_NO_P Parameter: Timepoint (hr) Value: 6
  misc_feature: MA Experiment 108527 PARAMETER Experiment Name: Zm_5mM_NO_P Parameter: Tissue Value: Aerial
  misc_feature: MA Experiment 108527 PARAMETER Experiment Name: Zm_5mM_NO_P Parameter: Treatment Value: 5mM NO vs. No Treatment
  misc_feature: MA Experiment ID: 108535 Result: Down-regulated in Transcription
  misc_feature: MA Experiment 108535 PARAMETER Experiment Name: Zm_Meristem_P Parameter: Age (day) Value: 8
  misc_feature: MA Experiment 108535 PARAMETER Experiment Name: Zm_Meristem_P Parameter: Organism Value: Zea mays
  misc_feature: MA Experiment 108535 PARAMETER Experiment Name: Zm_Meristem_P Parameter: Plant Line Value: 35A19
  misc_feature: MA Experiment 108535 PARAMETER Experiment Name: Zm_Meristem_P Parameter: Tissue Value: Root Meristem vs. Above Root Meristem
  misc_feature: MA Experiment ID: 108536 Result: Up-regulated in Transcription
  misc_feature: MA Experiment 108536 PARAMETER Experiment Name: Zm_Meristem_P Parameter: Age (day) Value: 8
  misc_feature: MA Experiment 108536 PARAMETER Experiment Name: Zm_Meristem_P Parameter: Organism Value: Zea mays
  misc_feature: MA Experiment 108536 PARAMETER Experiment Name: Zm_Meristem_P Parameter: Plant Line Value: 35A19
  misc_feature: MA Experiment 108536 PARAMETER Experiment Name: Zm_Meristem_P Parameter: Tissue Value: Shoot Meristem vs. Above Shoot Meristem
  misc_feature: MA Experiment ID: 108543 Result: Up-regulated in Transcription
  misc_feature: MA Experiment ID: 20000492 Result: Down-regulated in Transcription
  misc_feature: MA Experiment 20000492 PARAMETER Experiment Name: Zm_Hybrid_Seed_Dev_P Parameter: DAP Value: 12
  misc_feature: MA Experiment 20000492 PARAMETER Experiment Name: Zm_Hybrid_Seed_Dev_P Parameter: Organism Value: Zea mays
  misc_feature: MA Experiment 20000492 PARAMETER Experiment Name: Zm_Hybrid_Seed_Dev_P Parameter: Plant Line Value: 35A19
  misc_feature: MA Experiment 20000492 PARAMETER Experiment Name: Zm_Hybrid_Seed_Dev_P Parameter: Tissue Value: Fert Kernel vs. Unfert Floret
  misc_feature: MA Experiment ID: 20000535 Result: Down-regulated in Transcription
  misc_feature: MA Experiment 20000535 PARAMETER Experiment Name: Zm_Hybrid_Seed_Dev_P Parameter: DAP Value: 30 vs. 12
  misc_feature: MA Experiment 20000535 PARAMETER Experiment Name: Zm_Hybrid_Seed_Dev_P Parameter: Organism Value: Zea mays
  misc_feature: MA Experiment 20000535 PARAMETER Experiment Name: Zm_Hybrid_Seed_Dev_P Parameter: Plant Line Value: 35A19
  misc_feature: MA Experiment 20000535 PARAMETER Experiment Name: Zm_Hybrid_Seed_Dev_P Parameter: Tissue Value: Embryo vs. Unfert Floret
gagaggctcaggctgctcgtgatggcttggctcgcagacagacaggcagacagagagatatcaaaacatttgagggaaatgttatttgtgtatcactgtgcatgcagtacgcagtgagtaatgaatgaattctggtgtggccagcagatcgtgttcgagatcctggtgaggggtctgatcgggctggaggcaggcccggagatgcagcagctcaagcaccagttccaggaattcattgtcggcctcatgtccctccccatcaagctgccggggactaggctctacaggtccctccaggccaagaagaggatggccacgctgatacaggggatcatacaggagaagaggcggcggcggagggccgcccttgaggatggcggagagggcgagggcgaggccggtcccccgcgcgacgtcatcgacgtgctcataagcggcggcgacgagctcaccgacgagctcatatccgacaacatgatcgacctgatgatccccgccgaggactctgtgcccgtgctcatcacgctcgccgtcaagtatctcagcgagtgcccgcttgctctgcaacaacttgaggaggagaacatgcagctgaagaggcggaaaaccgacgtgggagagaccttgcagtggacggactacatgtcactgtcgttcacacaacatgtgataacggagacactgcggatggggaatatcatcaacgggatcatgcgcaaagcggtgcgggacgtggaggtgaaggggcacctcatccccaagggctggtgcgtgttcgtgtacttccggtcggtccacctcgacgacaagcgctacgacgagccctacaggttcaacccgtggaggtggaaggagaaggacacgagcaccatgggcttcaccccttttggcggtgggcagaggctgtgcccaggcctggatctggccaggctggaagcttccatctttctccatcacctggtgaccagcttcaggtgggtggcggaggaggaccacatcgtcaacttcccaaccgtgcggctcaagcgaggcatgcccgtcaggctcaccagcaaagactagctagctagtcactacgacctgcttgtgcatgccatgcatgcagatttcagtcacgtcatatgcaatatatattggaccctggaggttgcacgtgtacagaagagaggatgcaggagctagcagatgatcggaggtatttaggcagactgaaattgaatcgaccgcgaagagtagcacactactataccacgagtatgatctgtagtagtagtaataagaggaatataatatcattagtgtggtagtatttactg

SEQ ID NO: 6729 - protein, 313 aa, Zea mays subsp. mays
  peptide (1)..(313): Ceres Seq. ID no. 12347499
  misc_feature (8)..(313): Homolog of NCBI NO: 34903584 NR Description: cytochrome P450-like protein [Oryza sativa
  misc_feature (10)..(307): Homolog of NCBI NO: 18400142 NR Description: cytochrome P450, putative; protein id: supported by cDNA: gi_14971016 [Arabidopsis thaliana] CYP90D [Arabidopsis thaliana] >gi|28393374|gb|AAO42111.1|
  misc_feature (8)..(313): Homolog of NCBI NO: 13878393 NR Description: Cytochrome P450 90C1 (ROTUNDIFOLIA3)
  misc_feature (8)..(313): Homolog of NCBI NO: 18419825 NR Description: rotundifolia3 (rot3); protein id: At4g36380.1,
  misc_feature (8)..(313): Homolog of NCBI NO: 25282635 NR Description: cytochrome P450 like protein [imported] - thaliana >gi|4006922|emb|CAB16850.1| cytochrome P450 like protein thaliana] >gi|7270586|emb|CAB80304.1| cytochrome P450 like
  misc_feature (10)..(285): Homolog of NCBI NO: 9294019 NR Description: cytochrome P450-like protein [Arabidopsis
  misc_feature (95)..(313): Homolog of NCBI NO: 7484897 NR Description: cytochrome P450 homolog F23E13.220 - Arabidopsis >gi|2961392|emb|CAA18139.1| cytochrome P450 like protein
  misc_feature (8)..(313): Homolog of NCBI NO: 15239203 NR Description: cytochrome p450, putative; protein id: supported by cDNA: 36334., supported by cDNA: gi_14596098, by cDNA: gi_15450716, supported by cDNA: gi_17380617, supported
  misc_feature (8)..(313): Homolog of NCBI NO: 9587211 NR Description: cytochrome P450 [Vigna radiata]
  misc_feature (16)..(309): Homolog of NCBI NO: 27127269 NR Description: cytochrome P450 [Oryza sativa (japonica
MNEFWCGQQIVFEILVRGLIGLEAGPEMQQLKHQFQEFIVGLMSLPIKLPGTRLYRSLQAKKRMATLIQGIIQEKRRRRRAALEDGGEGEGEAGPPRDVIDVLISGGDELTDELISDNMIDLMIPAEDSVPVLITLAVKYLSECPLALQQLEEENMQLKRRKTDVGETLQWTDYMSLSFTQHVITETLRMGNIINGIMRKAVRDVEVKGHLIPKGWCVFVYFRSVHLDDKRYDEPYRFNPWRWKEKDTSTMGFTPFGGGQRLCPGLDLARLEASIFLHHLVTSFRWVAEEDHIVNFPTVRLKRGMPVRLTSKD

SEQ ID NO: 6730 - protein, 286 aa, Zea mays subsp. mays
  peptide (1)..(286): Ceres Seq. ID no. 12347500
  misc_feature (1)..(286): Homolog of NCBI NO: 34903584 NR Description: cytochrome P450-like protein [Oryza sativa
  misc_feature (1)..(280): Homolog of NCBI NO: 18400142 NR Description: cytochrome P450, putative; protein id: supported by cDNA: gi_14971016 [Arabidopsis thaliana] CYP90D [Arabidopsis thaliana] >gi|28393374|gb|AAO42111.1|
  misc_feature (1)..(286): Homolog of NCBI NO: 13878393 NR Description: Cytochrome P450 90C1 (ROTUNDIFOLIA3)
  misc_feature (1)..(286): Homolog of NCBI NO: 25282635 NR Description: cytochrome P450 like protein [imported] - thaliana >gi|4006922|emb|CAB16850.1| cytochrome P450 like protein thaliana] >gi|7270586|emb|CAB80304.1| cytochrome P450 like
  misc_feature (1)..(286): Homolog of NCBI NO: 18419825 NR Description: rotundifolia3 (rot3); protein id: At4g36380.1,
  misc_feature (1)..(258): Homolog of NCBI NO: 9294019 NR Description: cytochrome P450-like protein [Arabidopsis
  misc_feature (68)..(286): Homolog of NCBI NO: 7484897 NR Description: cytochrome P450 homolog F23E13.220 - Arabidopsis >gi|2961392|emb|CAA18139.1| cytochrome P450 like protein
  misc_feature (1)..(286): Homolog of NCBI NO: 15239203 NR Description: cytochrome p450, putative; protein id: supported by cDNA: 36334., supported by cDNA: gi_14596098, by cDNA: gi_15450716, supported by cDNA: gi_17380617, supported
  misc_feature (1)..(286): Homolog of NCBI NO: 9587211 NR Description: cytochrome P450 [Vigna radiata]
  misc_feature (1)..(282): Homolog of NCBI NO: 27127269 NR Description: cytochrome P450 [Oryza sativa (japonica
MQQLKHQFQEFIVGLMSLPIKLPGTRLYRSLQAKKRMATLIQGIIQEKRRRRRAALEDGGEGEGEAGPPRDVIDVLISGGDELTDELISDNMIDLMIPAEDSVPVLITLAVKYLSECPLALQQLEEENMQLKRRKTDVGETLQWTDYMSLSFTQHVITETLRMGNIINGIMRKAVRDVEVKGHLIPKGWCVFVYFRSVHLDDKRYDEPYRFNPWRWKEKDTSTMGFTPFGGGQRLCPGLDLARLEASIFLHHLVTSFRWVAEEDHIVNFPTVRLKRGMPVRLTSKD

SEQ ID NO: 6731 - protein, 271 aa, Zea mays subsp. mays
  peptide (1)..(271): Ceres Seq. ID no. 12347501
  misc_feature (1)..(271): Homolog of NCBI NO: 34903584 NR Description: cytochrome P450-like protein [Oryza sativa
  misc_feature (1)..(265): Homolog of NCBI NO: 18400142 NR Description: cytochrome P450, putative; protein id: supported by cDNA: gi_14971016 [Arabidopsis thaliana] CYP90D [Arabidopsis thaliana] >gi|28393374|gb|AAO42111.1|
  misc_feature (1)..(271): Homolog of NCBI NO: 13878393 NR Description: Cytochrome P450 90C1 (ROTUNDIFOLIA3)
  misc_feature (1)..(271): Homolog of NCBI NO: 25282635 NR Description: cytochrome P450 like protein [imported] - thaliana >gi|4006922|emb|CAB16850.1| cytochrome P450 like protein thaliana] >gi|7270586|emb|CAB80304.1| cytochrome P450 like
  misc_feature (1)..(271): Homolog of NCBI NO: 18419825 NR Description: rotundifolia3 (rot3); protein id: At4g36380.1,
  misc_feature (1)..(243): Homolog of NCBI NO: 9294019 NR Description: cytochrome P450-like protein [Arabidopsis
  misc_feature (53)..(271): Homolog of NCBI NO: 7484897 NR Description: cytochrome P450 homolog F23E13.220 - Arabidopsis >gi|2961392|emb|CAA18139.1| cytochrome P450 like protein
  misc_feature (1)..(271): Homolog of NCBI NO: 15239203 NR Description: cytochrome p450, putative; protein id: supported by cDNA: 36334., supported by cDNA: gi_14596098, by cDNA: gi_15450716, supported by cDNA: gi_17380617, supported
  misc_feature (1)..(271): Homolog of NCBI NO: 9587211 NR Description: cytochrome P450 [Vigna radiata]
  misc_feature (1)..(267): Homolog of NCBI NO: 27127269 NR Description: cytochrome P450 [Oryza sativa (japonica
MSLPIKLPGTRLYRSLQAKKRMATLIQGIIQEKRRRRRAALEDGGEGEGEAGPPRDVIDVLISGGDELTDELISDNMIDLMIPAEDSVPVLITLAVKYLSECPLALQQLEEENMQLKRRKTDVGETLQWTDYMSLSFTQHVITETLRMGNIINGIMRKAVRDVEVKGHLIPKGWCVFVYFRSVHLDDKRYDEPYRFNPWRWKEKDTSTMGFTPFGGGQRLCPGLDLARLEASIFLHHLVTSFRWVAEEDHIVNFPTVRLKRGMPVRLTSKD

SEQ ID NO: 6732 - DNA, 1538 bp, Zea mays subsp. mays
  misc_feature (1)..(1538): Ceres Seq. ID no. 12346101
  misc_feature: MA Experiment ID: 108522 Result: Down-regulated in Transcription
  misc_feature: MA Experiment 108522 PARAMETER Experiment Name: Zm_42deg_Heat_P Parameter: Age (day) Value: 8
  misc_feature: MA Experiment 108522 PARAMETER Experiment Name: Zm_42deg_Heat_P Parameter: Organism Value: Zea mays
  misc_feature: MA Experiment 108522 PARAMETER Experiment Name: Zm_42deg_Heat_P Parameter: Plant Line Value: 35A19
  misc_feature: MA Experiment 108522 PARAMETER Experiment Name: Zm_42deg_Heat_P Parameter: Temperature (deg C) Value: 42 vs. 22
  misc_feature: MA Experiment 108522 PARAMETER Experiment Name: Zm_42deg_Heat_P Parameter: Timepoint (hr) Value: 1
  misc_feature: MA Experiment 108522 PARAMETER Experiment Name: Zm_42deg_Heat_P Parameter: Tissue Value: Aerial
  misc_feature: MA Experiment ID: 108528 Result: Up-regulated in Transcription
  misc_feature: MA Experiment 108528 PARAMETER Experiment Name: Zm_Imbibed_Seeds_P Parameter: Age (day) Value: 5 vs. 2
  misc_feature: MA Experiment 108528 PARAMETER Experiment Name: Zm_Imbibed_Seeds_P Parameter: Organism Value: Zea mays
  misc_feature: MA Experiment 108528 PARAMETER Experiment Name: Zm_Imbibed_Seeds_P Parameter: Plant Line Value: 35A19
  misc_feature: MA Experiment 108528 PARAMETER Experiment Name: Zm_Imbibed_Seeds_P Parameter: Tissue Value: Aerial vs. Embryo
  misc_feature: MA Experiment ID: 108530 Result: Up-regulated in Transcription
  misc_feature: MA Experiment 108530 PARAMETER Experiment Name: Zm_Imbibed_Seeds_P Parameter: Age (day) Value: 6 vs. 2
  misc_feature: MA Experiment 108530 PARAMETER Experiment Name: Zm_Imbibed_Seeds_P Parameter: Organism Value: Zea mays
  misc_feature: MA Experiment 108530 PARAMETER Experiment Name: Zm_Imbibed_Seeds_P Parameter: Plant Line Value: 35A19
  misc_feature: MA Experiment 108530 PARAMETER Experiment Name: Zm_Imbibed_Seeds_P Parameter: Tissue Value: Aerial vs. Embryo
  misc_feature: MA Experiment ID: 108534 Result: Up-regulated in Transcription
  misc_feature: MA Experiment 108534 PARAMETER Experiment Name: Zm_4deg_Cold_P Parameter: Age (hr) Value: 8
  misc_feature: MA Experiment 108534 PARAMETER Experiment Name: Zm_4deg_Cold_P Parameter: Organism Value: Zea mays
  misc_feature: MA Experiment 108534 PARAMETER Experiment Name: Zm_4deg_Cold_P Parameter: Plant Line Value: 35A19
  misc_feature: MA Experiment 108534 PARAMETER Experiment Name: Zm_4deg_Cold_P Parameter: Temperature (deg C) Value: 4 vs. 22
  misc_feature: MA Experiment 108534 PARAMETER Experiment Name: Zm_4deg_Cold_P Parameter: Timepoint (hr) Value: 6
  misc_feature: MA Experiment 108534 PARAMETER Experiment Name: Zm_4deg_Cold_P Parameter: Tissue Value: Aerial
  misc_feature: MA Experiment ID: 108536 Result: Down-regulated in Transcription
  misc_feature: MA Experiment 108536 PARAMETER Experiment Name: Zm_Meristem_P Parameter: Age (day) Value: 8
  misc_feature: MA Experiment 108536 PARAMETER Experiment Name: Zm_Meristem_P Parameter: Organism Value: Zea mays
  misc_feature: MA Experiment 108536 PARAMETER Experiment Name: Zm_Meristem_P Parameter: Plant Line Value: 35A19
  misc_feature: MA Experiment 108536 PARAMETER Experiment Name: Zm_Meristem_P Parameter: Tissue Value: Shoot Meristem vs. Above Shoot Meristem
  misc_feature: MA Experiment ID: 108545 Result: Up-regulated in Transcription
  misc_feature: MA Experiment 108545 PARAMETER Experiment Name: Zm_Imbibed_Seeds_P Parameter: Age (day) Value: 3 vs. 2
  misc_feature: MA Experiment 108545 PARAMETER Experiment Name: Zm_Imbibed_Seeds_P Parameter: Organism Value: Zea mays
  misc_feature: MA Experiment 108545 PARAMETER Experiment Name: Zm_Imbibed_Seeds_P Parameter: Plant Line Value: 35A19
  misc_feature: MA Experiment 108545 PARAMETER Experiment Name: Zm_Imbibed_Seeds_P Parameter: Tissue Value: Aerial vs. Embryo
  misc_feature: MA Experiment ID: 108547 Result: Up-regulated in Transcription
  misc_feature: MA Experiment 108547 PARAMETER Experiment Name: Zm_Imbibed_Seeds_P Parameter: Age (day) Value: 4 vs. 2
  misc_feature: MA Experiment 108547 PARAMETER Experiment Name: Zm_Imbibed_Seeds_P Parameter: Organism Value: Zea mays
  misc_feature: MA Experiment 108547 PARAMETER Experiment Name: Zm_Imbibed_Seeds_P Parameter: Plant Line Value: 35A19
  misc_feature: MA Experiment 108547 PARAMETER Experiment Name: Zm_Imbibed_Seeds_P Parameter: Tissue Value: Aerial vs. Embryo
  misc_feature: MA Experiment ID: 108597 Result: Down-regulated in Transcription
  misc_feature: MA Experiment 108597 PARAMETER Experiment Name: Zm_100uM_ABA_P Parameter: Age (day) Value: 9
  misc_feature: MA Experiment 108597 PARAMETER Experiment Name: Zm_100uM_ABA_P Parameter: Organism Value: Zea mays
  misc_feature: MA Experiment 108597 PARAMETER Experiment Name: Zm_100uM_ABA_P Parameter: Plant Line Value: 35A19
  misc_feature: MA Experiment 108597 PARAMETER Experiment Name: Zm_100uM_ABA_P Parameter: Timepoint (hr) Value: 24
  misc_feature: MA Experiment 108597 PARAMETER Experiment Name: Zm_100uM_ABA_P Parameter: Tissue Value: Aerial
  misc_feature: MA Experiment 108597 PARAMETER Experiment Name: Zm_100uM_ABA_P Parameter: Treatment Value: 100uM ABA vs. No Treatment
  misc_feature: MA Experiment ID: 20000478 Result: Down-regulated in Transcription
  misc_feature: MA Experiment 20000478 PARAMETER Experiment Name: Zm_5mM_SA_P Parameter: Age (day) Value: 11
  misc_feature: MA Experiment 20000478 PARAMETER Experiment Name: Zm_5mM_SA_P Parameter: Organism Value: Zea mays
  misc_feature: MA Experiment 20000478 PARAMETER Experiment Name: Zm_5mM_SA_P Parameter: Plant Line Value: 35A19
  misc_feature: MA Experiment 20000478 PARAMETER Experiment Name: Zm_5mM_SA_P Parameter: Timepoint (hr) Value: 72
  misc_feature: MA Experiment 20000478 PARAMETER Experiment Name: Zm_5mM_SA_P Parameter: Tissue Value: Aerial
  misc_feature: MA Experiment 20000478 PARAMETER Experiment Name: Zm_5mM_SA_P Parameter: Treatment Value: 5mM SA vs. No Treatment
  misc_feature: MA Experiment ID: 20000480 Result: Down-regulated in Transcription
  misc_feature: MA Experiment 20000480 PARAMETER Experiment Name: Zm_Drought_P Parameter: Age (day) Value: 11
  misc_feature: MA Experiment 20000480 PARAMETER Experiment Name: Zm_Drought_P Parameter: Organism Value: Zea mays
  misc_feature: MA Experiment 20000480 PARAMETER Experiment Name: Zm_Drought_P Parameter: Plant Line Value: 35A19
  misc_feature: MA Experiment 20000480 PARAMETER Experiment Name: Zm_Drought_P Parameter: Timepoint (hr) Value: 72
  misc_feature: MA Experiment 20000480 PARAMETER Experiment Name: Zm_Drought_P Parameter: Tissue Value: Aerial
  misc_feature: MA Experiment 20000480 PARAMETER Experiment Name: Zm_Drought_P Parameter: Treatment Value: Drought vs. No Drought
  misc_feature: MA Experiment ID: 20000488 Result: Down-regulated in Transcription
  misc_feature: MA Experiment 20000488 PARAMETER Experiment Name: Zm_50mM_NH4NO3_L_to_H_P Parameter: Organism Value: Zea mays
  misc_feature: MA Experiment 20000488 PARAMETER Experiment Name: Zm_50mM_NH4NO3_L_to_H_P Parameter: Timepoint (hr) Value: 8
  misc_feature: MA Experiment 20000488 PARAMETER Experiment Name: Zm_50mM_NH4NO3_L_to_H_P Parameter: Tissue Value: Leaves
  misc_feature: MA Experiment 20000488 PARAMETER Experiment Name: Zm_50mM_NH4NO3_L_to_H_P Parameter: Treatment Value: 50mM NH4NO3 vs. 100mM Mannitol
  misc_feature: MA Experiment ID: 20000626 Result: Down-regulated in Transcription
  misc_feature: MA Experiment 20000626 PARAMETER Experiment Name: Zm_Herbicide-Treatments_P Parameter: Timepoint (hr) Value: 12
  misc_feature: MA Experiment 20000626 PARAMETER Experiment Name: Zm_Herbicide-Treatments_P Parameter: Tissue Value: Aerial
  misc_feature: MA Experiment 20000626 PARAMETER Experiment Name: Zm_Herbicide-Treatments_P Parameter: Treatment Value: Roundup vs. No Treatment
  misc_feature: MA Experiment ID: 20000630 Result: Down-regulated in Transcription
  misc_feature: MA Experiment 20000630 PARAMETER Experiment Name: Zm_Herbicide-Treatments_P Parameter: Timepoint (hr) Value: 4
  misc_feature: MA Experiment 20000630 PARAMETER Experiment Name: Zm_Herbicide-Treatments_P Parameter: Tissue Value: Aerial
  misc_feature: MA Experiment 20000630 PARAMETER Experiment Name: Zm_Herbicide-Treatments_P Parameter: Treatment Value: Roundup vs. No Treatment
atcgtcaaactgcccgcggtccaaaatccaaaccctgcgagtgtatagaagaagaaccccccaccccatcgcaacccgcaatggtcgcggcggaagatccggaacacttcttcgccgcctcgccgccgctgcgcgacgctgccgttgtcgccgccagcctgcaggagttcgtcgcgcgcaattcgcacgcatcatcagacggcgtcgggcggcggcgcatcgtctgcgtcacgtcgggcgggaccacggtgccgctggagcagcgatgcgtgcgctacatcgacaacttcagctccggccaccgcggcgccgcgtccaccgagtatttcttaaaggctggctatgcggtcattttcgtccatcggcgagggagttgccagcctttctccaggttcctgcctgatgactcgtttctccacttctttgatgtcacaacatattcgaaggttcaagtggccgagtcccaggcaacggtggtaaagagagcaattggggattatcgcaaggctactgaaggaggctctctgctgaaactcccattcaccacgatatttgagtatcttcagttactgaagatggttgctacatccatgagctgtgtgggtctccacgggatgttctatctcgctgcagctgtgtctgacttctatgttccatgggatagcatggcaaaacataagatccagtcagccggaggcccactggatatgaagctcagccaggttccaaaaatgctccccgttctgcgcaaccattgggcccccttggccttctgcgtatccttcaagctggagacggatccagacattctagttcagaaagcagagacggctctgagcaagtacaggatggacgttgttgtggccaatctacttgcaacgtacaaggaggaggtcgtcatcatctcgaatggcaaaagcaacaccattcgaaggtgcagcaaaggcgaggatctggaggagcatatcatcaagctcctagagaagagccactccaagtttatttacagcagcacggaagggtgcagtaagaacgactacgaaaagcttataccgttaggcatcaaaagtctggcttaagggaaacattgatcggttctggagctcaaattaatagggaagccccatcagcactcttgtagtgtttggatggatggacgaggaaggatgaagagggatgggataggatcattctaagttgacccatgtttggtttggaggtctagagtcacggtcaaggaatatttttcaaaaatagtggatggggccatcccttaaaaaataagggatggagtcaactcagagttgatcccatcccatctctcgttgacaccgaaccaaacacatcataaagctctacatgcagtgtgtacatttgctggtaatgtatatgtaagcaggactaataggattgttctgttctcacacgcacacaaacacgccaccaaaaaagatggtccaaagttgtatgtatcgtttgctattcacctgttaattaatggctttgtaatcagaaatgattattgttcaaattgtttc

SEQ ID NO: 6733 - protein, 358 aa, Zea mays subsp. mays
  peptide (1)..(358): Ceres Seq. ID no. 12346102
  misc_feature (69)..(313): Pfam Name: DNA / pantothenate metabolism flavoprotein Pfam Description: DNA / pantothenate metabolism flavoprotein
  misc_feature (32)..(343): Homolog of NCBI NO: 40253297 NR Description: putative Chain A, Crystal Structure Of
  misc_feature (36)..(337): Homolog of NCBI NO: 30682728 NR Description: expressed protein [Arabidopsis thaliana]
  misc_feature (173)..(337): Homolog of NCBI NO: 15241677 NR Description: putative protein; protein id: At5g02080.1
  misc_feature (49)..(150): Homolog of NCBI NO: 15241677 NR Description: putative protein; protein id: At5g02080.1
  misc_feature (143)..(337): Homolog of NCBI NO: 8778623 NR Description: F5O11.7 [Arabidopsis thaliana]
  misc_feature (36)..(124): Homolog of NCBI NO: 8778623 NR Description: F5O11.7 [Arabidopsis thaliana]
  misc_feature (50)..(344): Homolog of NCBI NO: 18255582 NR Description: RIKEN cDNA 6330579B17 gene [Mus musculus]
  misc_feature (50)..(334): Homolog of NCBI NO: 34870890 NR Description: similar to RIKEN cDNA 6330579B17 gene [Rattus
  misc_feature (15)..(239): Homolog of NCBI NO: 32422077 NR Description: hypothetical protein [Neurospora crassa]
  misc_feature (234)..(310): Homolog of NCBI NO: 32422077 NR Description: hypothetical protein [Neurospora crassa]
RQTARGPKSKPCECIEEEPPTPSQPAMVAAEDPEHFFAASPPLRDAAVVAASLQEFVARNSHASSDGVGRRRIVCVTSGGTTVPLEQRCVRYIDNFSSGHRGAASTEYFLKAGYAVIFVHRRGSCQPFSRFLPDDSFLHFFDVTTYSKVQVAESQATVVKRAIGDYRKATEGGSLLKLPFTTIFEYLQLLKMVATSMSCVGLHGMFYLAAAVSDFYVPWDSMAKHKIQSAGGPLDMKLSQVPKMLPVLRNHWAPLAFCVSFKLETDPDILVQKAETALSKYRMDVVVANLLATYKEEVVIISNGKSNTIRRCSKGEDLEEHIIKLLEKSHSKFIYSSTEGCSKNDYEKLIPLGIKSLA

SEQ ID NO: 6734 - protein, 332 aa, Zea mays subsp. mays
  peptide (1)..(332): Ceres Seq. ID no. 12346103
  misc_feature (43)..(287): Pfam Name: DNA / pantothenate metabolism flavoprotein Pfam Description: DNA / pantothenate metabolism flavoprotein
  misc_feature (6)..(317): Homolog of NCBI NO: 40253297 NR Description: putative Chain A, Crystal Structure Of
  misc_feature (10)..(311): Homolog of NCBI NO: 30682728 NR Description: expressed protein [Arabidopsis thaliana]
  misc_feature (147)..(311): Homolog of NCBI NO: 15241677 NR Description: putative protein; protein id: At5g02080.1
  misc_feature (23)..(124): Homolog of NCBI NO: 15241677 NR Description: putative protein; protein id: At5g02080.1
  misc_feature (117)..(311): Homolog of NCBI NO: 8778623 NR Description: F5O11.7 [Arabidopsis thaliana]
  misc_feature (10)..(98): Homolog of NCBI NO: 8778623 NR Description: F5O11.7 [Arabidopsis thaliana]
  misc_feature (24)..(318): Homolog of NCBI NO: 18255582 NR Description: RIKEN cDNA 6330579B17 gene [Mus musculus]
  misc_feature (24)..(308): Homolog of NCBI NO: 34870890 NR Description: similar to RIKEN cDNA 6330579B17 gene [Rattus
  misc_feature (1)..(213): Homolog of NCBI NO: 32422077 NR Description: hypothetical protein [Neurospora crassa]
  misc_feature (208)..(284): Homolog of NCBI NO: 32422077 NR Description: hypothetical protein [Neurospora crassa]
MVAAEDPEHFFAASPPLRDAAVVAASLQEFVARNSHASSDGVGRRRIVCVTSGGTTVPLEQRCVRYIDNFSSGHRGAASTEYFLKAGYAVIFVHRRGSCQPFSRFLPDDSFLHFFDVTTYSKVQVAESQATVVKRAIGDYRKATEGGSLLKLPFTTIFEYLQLLKMVATSMSCVGLHGMFYLAAAVSDFYVPWDSMAKHKIQSAGGPLDMKLSQVPKMLPVLRNHWAPLAFCVSFKLETDPDILVQKAETALSKYRMDVVVANLLATYKEEVVIISNGKSNTIRRCSKGEDLEEHIIKLLEKSHSKFIYSSTEGCSKNDYEKLIPLGIKSLA

SEQ ID NO: 6735 - DNA, 1850 bp, Zea mays subsp. mays
  misc_feature (1)..(1850): Ceres Seq. ID no. 12349999
  misc_feature: MA Experiment ID: 108523 Result: Down-regulated in Transcription
  misc_feature: MA Experiment 108523 PARAMETER Experiment Name: Zm_42deg_Heat_P Parameter: Age (day) Value: 8
  misc_feature: MA Experiment 108523 PARAMETER Experiment Name: Zm_42deg_Heat_P Parameter: Organism Value: Zea mays
  misc_feature: MA Experiment 108523 PARAMETER Experiment Name: Zm_42deg_Heat_P Parameter: Plant Line Value: 35A19
  misc_feature: MA Experiment 108523 PARAMETER Experiment Name: Zm_42deg_Heat_P Parameter: Temperature (deg C) Value: 42 vs. 22
  misc_feature: MA Experiment 108523 PARAMETER Experiment Name: Zm_42deg_Heat_P Parameter: Timepoint (hr) Value: 6
  misc_feature: MA Experiment 108523 PARAMETER Experiment Name: Zm_42deg_Heat_P Parameter: Tissue Value: Aerial
  misc_feature: MA Experiment ID: 108527 Result: Down-regulated in Transcription
  misc_feature: MA Experiment 108527 PARAMETER Experiment Name: Zm_5mM_NO_P Parameter: Age (day) Value: 8
  misc_feature: MA Experiment 108527 PARAMETER Experiment Name: Zm_5mM_NO_P Parameter: Organism Value: Zea mays
  misc_feature: MA Experiment 108527 PARAMETER Experiment Name: Zm_5mM_NO_P Parameter: Plant Line Value: 35A19
  misc_feature: MA Experiment 108527 PARAMETER Experiment Name: Zm_5mM_NO_P Parameter: Timepoint (hr) Value: 6
  misc_feature: MA Experiment 108527 PARAMETER Experiment Name: Zm_5mM_NO_P Parameter: Tissue Value: Aerial
  misc_feature: MA Experiment 108527 PARAMETER Experiment Name: Zm_5mM_NO_P Parameter: Treatment Value: 5mM NO vs. No Treatment
  misc_feature: MA Experiment ID: 108529 Result: Up-regulated in Transcription
  misc_feature: MA Experiment 108529 PARAMETER Experiment Name: Zm_Imbibed_Seeds_P Parameter: Age (day) Value: 5 vs. 2
  misc_feature: MA Experiment 108529 PARAMETER Experiment Name: Zm_Imbibed_Seeds_P Parameter: Organism Value: Zea mays
  misc_feature: MA Experiment 108529 PARAMETER Experiment Name: Zm_Imbibed_Seeds_P Parameter: Plant Line Value: 35A19
  misc_feature: MA Experiment 108529 PARAMETER Experiment Name: Zm_Imbibed_Seeds_P Parameter: Tissue Value: Roots vs. Embryo
  misc_feature: MA Experiment ID: 108535 Result: Down-regulated in Transcription
  misc_feature: MA Experiment 108535 PARAMETER Experiment Name: Zm_Meristem_P Parameter: Age (day) Value: 8
  misc_feature: MA Experiment 108535 PARAMETER Experiment Name: Zm_Meristem_P Parameter: Organism Value: Zea mays
  misc_feature: MA Experiment 108535 PARAMETER Experiment Name: Zm_Meristem_P Parameter: Plant Line Value: 35A19
  misc_feature: MA Experiment 108535 PARAMETER Experiment Name: Zm_Meristem_P Parameter: Tissue Value: Root Meristem vs. Above Root Meristem
  misc_feature: MA Experiment ID: 108543 Result: Up-regulated in Transcription
  misc_feature: MA Experiment ID: 108545 Result: Down-regulated in Transcription
  misc_feature: MA Experiment 108545 PARAMETER Experiment Name: Zm_Imbibed_Seeds_P Parameter: Age (day) Value: 3 vs. 2
  misc_feature: MA Experiment 108545 PARAMETER Experiment Name: Zm_Imbibed_Seeds_P Parameter: Organism Value: Zea mays
  misc_feature: MA Experiment 108545 PARAMETER Experiment Name: Zm_Imbibed_Seeds_P Parameter: Plant Line Value: 35A19
  misc_feature: MA Experiment 108545 PARAMETER Experiment Name: Zm_Imbibed_Seeds_P Parameter: Tissue Value: Aerial vs. Embryo
  misc_feature: MA Experiment ID: 108546 Result: Up-regulated in Transcription
  misc_feature: MA Experiment 108546 PARAMETER Experiment Name: Zm_Imbibed_Seeds_P Parameter: Age (day) Value: 3 vs. 2
  misc_feature: MA Experiment 108546 PARAMETER Experiment Name: Zm_Imbibed_Seeds_P Parameter: Organism Value: Zea mays
  misc_feature: MA Experiment 108546 PARAMETER Experiment Name: Zm_Imbibed_Seeds_P Parameter: Plant Line Value: 35A19
  misc_feature: MA Experiment 108546 PARAMETER Experiment Name: Zm_Imbibed_Seeds_P Parameter: Tissue Value: Roots vs. Embryo
  misc_feature: MA Experiment ID: 108559 Result: Down-regulated in Transcription
  misc_feature: MA Experiment 108559 PARAMETER Experiment Name: Zm_5mM_NO_P Parameter: Age (day) Value: 8
  misc_feature: MA Experiment 108559 PARAMETER Experiment Name: Zm_5mM_NO_P Parameter: Organism Value: Zea mays
  misc_feature: MA Experiment 108559 PARAMETER Experiment Name: Zm_5mM_NO_P Parameter: Plant Line Value: 35A19
  misc_feature: MA Experiment 108559 PARAMETER Experiment Name: Zm_5mM_NO_P Parameter: Timepoint (hr) Value: 12
  misc_feature: MA Experiment 108559 PARAMETER Experiment Name: Zm_5mM_NO_P Parameter: Tissue Value: Aerial
  misc_feature: MA Experiment 108559 PARAMETER Experiment Name: Zm_5mM_NO_P Parameter: Treatment Value: 5mM NO vs. No Treatment
  misc_feature: MA Experiment ID: 108688 Result: Down-regulated in Transcription
  misc_feature: MA Experiment 108688 PARAMETER Experiment Name: Zm_Embryos-Flowers__P Parameter: Tissue Value: Immature Flowers vs. Aerial+
  misc_feature: MA Experiment ID: 20000108 Result: Down-regulated in Transcription
  misc_feature: MA Experiment 20000108 PARAMETER Experiment Name: Zm_Root-Tips_P Parameter: Age (day) Value: 12
  misc_feature: MA Experiment 20000108 PARAMETER Experiment Name: Zm_Root-Tips_P Parameter: Organism Value: Zea mays
  misc_feature: MA Experiment 20000108 PARAMETER Experiment Name: Zm_Root-Tips_P Parameter: Tissue Value: Root tips vs. Root mid region    35
  misc_feature: MA Experiment 20000108 PARAMETER Experiment Name: Zm_Root-Tips_P Parameter: Tissue Value: Root tips vs. Root mid region   Sequence Listing-Misc Features (4)
  misc_feature: MA Experiment ID: 20000477 Result: Down-regulated in Transcription
  misc_feature: MA Experiment 20000477 PARAMETER Experiment Name: Zm_5mM_SA_P Parameter: Age (day) Value: 10
  misc_feature: MA Experiment 20000477 PARAMETER Experiment Name: Zm_5mM_SA_P Parameter: Organism Value: Zea mays
  misc_feature: MA Experiment 20000477 PARAMETER Experiment Name: Zm_5mM_SA_P Parameter: Plant Line Value: 35A19
  misc_feature: MA Experiment 20000477 PARAMETER Experiment Name: Zm_5mM_SA_P Parameter: Timepoint (hr) Value: 48
  misc_feature: MA Experiment 20000477 PARAMETER Experiment Name: Zm_5mM_SA_P Parameter: Tissue Value: Aerial
  misc_feature: MA Experiment 20000477 PARAMETER Experiment Name: Zm_5mM_SA_P Parameter: Treatment Value: 5mM SA vs. No Treatment
  misc_feature: MA Experiment ID: 20000478 Result: Down-regulated in Transcription
  misc_feature: MA Experiment 20000478 PARAMETER Experiment Name: Zm_5mM_SA_P Parameter: Age (day) Value: 11
  misc_feature: MA Experiment 20000478 PARAMETER Experiment Name: Zm_5mM_SA_P Parameter: Organism Value: Zea mays
  misc_feature: MA Experiment 20000478 PARAMETER Experiment Name: Zm_5mM_SA_P Parameter: Plant Line Value: 35A19
  misc_feature: MA Experiment 20000478 PARAMETER Experiment Name: Zm_5mM_SA_P Parameter: Timepoint (hr) Value: 72
  misc_feature: MA Experiment 20000478 PARAMETER Experiment Name: Zm_5mM_SA_P Parameter: Tissue Value: Aerial
  misc_feature: MA Experiment 20000478 PARAMETER Experiment Name: Zm_5mM_SA_P Parameter: Treatment Value: 5mM SA vs. No Treatment
  misc_feature: MA Experiment ID: 20000479 Result: Down-regulated in Transcription
  misc_feature: MA Experiment 20000479 PARAMETER Experiment Name: Zm_Drought_P Parameter: Age (day) Value: 10
  misc_feature: MA Experiment 20000479 PARAMETER Experiment Name: Zm_Drought_P Parameter: Organism Value: Zea mays
  misc_feature: MA Experiment 20000479 PARAMETER Experiment Name: Zm_Drought_P Parameter: Plant Line Value: 35A19
  misc_feature: MA Experiment 20000479 PARAMETER Experiment Name: Zm_Drought_P Parameter: Timepoint (hr) Value: 48
  misc_feature: MA Experiment 20000479 PARAMETER Experiment Name: Zm_Drought_P Parameter: Tissue Value: Aerial
  misc_feature: MA Experiment 20000479 PARAMETER Experiment Name: Zm_Drought_P Parameter: Treatment Value: Drought vs. No Drought
  misc_feature: MA Experiment ID: 20000480 Result: Down-regulated in Transcription
  misc_feature: MA Experiment 20000480 PARAMETER Experiment Name: Zm_Drought_P Parameter: Age (day) Value: 11
  misc_feature: MA Experiment 20000480 PARAMETER Experiment Name: Zm_Drought_P Parameter: Organism Value: Zea mays
  misc_feature: MA Experiment 20000480 PARAMETER Experiment Name: Zm_Drought_P Parameter: Plant Line Value: 35A19
  misc_feature: MA Experiment 20000480 PARAMETER Experiment Name: Zm_Drought_P Parameter: Timepoint (hr) Value: 72
  misc_feature: MA Experiment 20000480 PARAMETER Experiment Name: Zm_Drought_P Parameter: Tissue Value: Aerial
  misc_feature: MA Experiment 20000480 PARAMETER Experiment Name: Zm_Drought_P Parameter: Treatment Value: Drought vs. No Drought
  misc_feature: MA Experiment ID: 20000492 Result: Down-regulated in Transcription
  misc_feature: MA Experiment 20000492 PARAMETER Experiment Name: Zm_Hybrid_Seed_Dev_P Parameter: DAP Value: 12
  misc_feature: MA Experiment 20000492 PARAMETER Experiment Name: Zm_Hybrid_Seed_Dev_P Parameter: Organism Value: Zea mays
  misc_feature: MA Experiment 20000492 PARAMETER Experiment Name: Zm_Hybrid_Seed_Dev_P Parameter: Plant Line Value: 35A19
  misc_feature: MA Experiment 20000492 PARAMETER Experiment Name: Zm_Hybrid_Seed_Dev_P Parameter: Tissue Value: Fert Kernel vs. Unfert Floret
  misc_feature: MA Experiment ID: 20000534 Result: Down-regulated in Transcription
  misc_feature: MA Experiment 20000534 PARAMETER Experiment Name: Zm_Hybrid_Pollen_P Parameter: Age (day) Value: 8
  misc_feature: MA Experiment 20000534 PARAMETER Experiment Name: Zm_Hybrid_Pollen_P Parameter: Organism Value: Zea mays
  misc_feature: MA Experiment 20000534 PARAMETER Experiment Name: Zm_Hybrid_Pollen_P Parameter: Plant Line Value: 35A19
  misc_feature: MA Experiment 20000534 PARAMETER Experiment Name: Zm_Hybrid_Pollen_P Parameter: Tissue Value: Pollen vs. Aerial
  misc_feature: MA Experiment ID: 20000535 Result: Down-regulated in Transcription
  misc_feature: MA Experiment 20000535 PARAMETER Experiment Name: Zm_Hybrid_Seed_Dev_P Parameter: DAP Value: 30 vs. 12
  misc_feature: MA Experiment 20000535 PARAMETER Experiment Name: Zm_Hybrid_Seed_Dev_P Parameter: Organism Value: Zea mays
  misc_feature: MA Experiment 20000535 PARAMETER Experiment Name: Zm_Hybrid_Seed_Dev_P Parameter: Plant Line Value: 35A19
  misc_feature: MA Experiment 20000535 PARAMETER Experiment Name: Zm_Hybrid_Seed_Dev_P Parameter: Tissue Value: Embryo vs. Unfert Floret
actttatttctcgcactgcacctgcacgcaacagagacgtactcattcaggcgatcgaatccatggagctcgtgctcactacacctgatctcccaaccccgctgctgctctccaccttaacgatagtgtccgtggtcgtatgctatgtcctcttctggaagcagcaggcggcggcgaggcgagcgccgctgccgcccgggccgaggggctggcccgtgctgggcaacctaccgcagctgggcgggaagactcaccagacgctgcacgagatgaccaaggtgtacggcccgctgctgcggctgcggttcggcagctccaccgtggtggtggccgggtcggcggccgtggcgcagcagttcctccgcgcccacgacgccaacttcagcagccgcccgcccaactccggcggcgagctcatggcgtacaactaccaggacgtggtgttcgcgccctacgggccccggtggcgcgcgatgcgcaaggtgtgcgccgtgaacctcttctccgcgcgcgcgctcgacgacgtccgcggcgtccgggagcgcgaggcggcgctcatggtgaggtcgctcgcggagcaggcccacggcggcctcgacgcgccgccggcggcggtgccggttggcaaggccatcaacgtgtgcacgacgaacgcgctctcgcgggcggccgttgggcggcgggtgttcgctgccgccggcggcgacgggggcgcgagggagttcaaggagatcgtgctcgaggtgatgcaggtgggcggggtgctcaacgtcggcgacttcgtgccggcgctccggtggctcgacccgcagggcgtggcggccaagatgaagaagctgcaccgccggttcgacgacatgatggacgagatcattgcaggttatagggaggccaggagggttgcggcagacggagaggagagcaaggatttgcttggcttgctgctgtcgatggttgacgagcggccgttcgacagcggggaagaagtcaggatcaccgaaaccgatgtcaaggcactcattttgaacctgttcgtggcagggaccgacacgacgtcgaccatagtggagtggtctctcgcagagctgatccgccacccggaaatcctgaggcaagcgcaggaggagatggacgcggtggccgggcgcgggaggctggtcacggagtcggacctccgaagcctcaccttcttcaacgcggtcatcaaggagacgttccgcctgcacccgtcgacgccgctctccctaccgcgcatggccgccgaggagtgcgaggtcgcgggctaccgcgtccccaggggctcggagctgctggtcaacgtgtggggcatcgcccgcgacccggcgctgtggcctgacccgctggagttccggccggccaggttcctgccgggcgggtcgcatgcggacgtggacgtcaaaggcgccgacttcgggctcatcccgttcggcgccggccggaggatctgcgccggcctcagctgggggctgcggatggtcacgctcaccagcgccaccctggtgcacgcgttcgactgggagttgccggcagggcagacgccggacaagctgaacatggaggaggccttcaccctcctgctgcagcgggctgttccgttagtggctcgtccagtacccaggctgctgccgtcggcgtatgagatcgcataggaaggctcgctcaagggcctcagcttggctgtatcaagcacgtacaatggcgtgaaagacgacgtgtgtatgtattgttgttcactttgttgacttttgtaaacactagtaaatgttcttgctatggctaatatctgtaacgaatttttatattttgacatgattacgcttctggcttgt

SEQ ID NO: 6736 - protein, 555 aa, Zea mays subsp. mays
  peptide (1)..(555): Ceres Seq. ID no. 12350000
  misc_feature (64)..(540): Pfam Name: Cytochrome P450 Pfam Description: Cytochrome P450
  misc_feature (29)..(555): Homolog of NCBI NO: 37532594 NR Description: putative cytochrome 450 [Oryza sativa (japonica group)] >gi|21672032|gb|AAM74394.1| Putative cytochrome 450
  misc_feature (40)..(553): Homolog of NCBI NO: 12231880 NR Description: putative flavonoid 3'-hydroxylase [Callistephus
  misc_feature (38)..(552): Homolog of NCBI NO: 27151498 NR Description: Flavonoid 3'-monooxygenase (Flavonoid
FISRTAPARNRDVLIQAIESMELVLTTPDLPTPLLLSTLTIVSVVVCYVLFWKQQAAARRAPLPPGPRGWPVLGNLPQLGGKTHQTLHEMTKVYGPLLRLRFGSSTVVVAGSAAVAQQFLRAHDANFSSRPPNSGGELMAYNYQDVVFAPYGPRWRAMRKVCAVNLFSARALDDVRGVREREAALMVRSLAEQAHGGLDAPPAAVPVGKAINVCTTNALSRAAVGRRVFAAAGGDGGAREFKEIVLEVMQVGGVLNVGDFVPALRWLDPQGVAAKMKKLHRRFDDMMDEIIAGYREARRVAADGEESKDLLGLLLSMVDERPFDSGEEVRITETDVKALILNLFVAGTDTTSTIVEWSLAELIRHPEILRQAQEEMDAVAGRGRLVTESDLRSLTFFNAVIKETFRLHPSTPLSLPRMAAEECEVAGYRVPRGSELLVNVWGIARDPALWPDPLEFRPARFLPGGSHADVDVKGADFGLIPFGAGRRICAGLSWGLRMVTLTSATLVHAFDWELPAGQTPDKLNMEEAFTLLLQRAVPLVARPVPRLLPSAYEIA

SEQ ID NO: 6737 - protein, 535 aa, Zea mays subsp. mays
  peptide (1)..(535): Ceres Seq. ID no. 12350001
  misc_feature (44)..(520): Pfam Name: Cytochrome P450 Pfam Description: Cytochrome P450
  misc_feature (9)..(535): Homolog of NCBI NO: 37532594 NR Description: putative cytochrome 450 [Oryza sativa (japonica group)] >gi|21672032|gb|AAM74394.1| Putative cytochrome 450
  misc_feature (20)..(533): Homolog of NCBI NO: 12231880 NR Description: putative flavonoid 3'-hydroxylase [Callistephus
  misc_feature (18)..(532): Homolog of NCBI NO: 27151498 NR Description: Flavonoid 3'-monooxygenase (Flavonoid
MELVLTTPDLPTPLLLSTLTIVSVVVCYVLFWKQQAAARRAPLPPGPRGWPVLGNLPQLGGKTHQTLHEMTKVYGPLLRLRFGSSTVVVAGSAAVAQQFLRAHDANFSSRPPNSGGELMAYNYQDVVFAPYGPRWRAMRKVCAVNLFSARALDDVRGVREREAALMVRSLAEQAHGGLDAPPAAVPVGKAINVCTTNALSRAAVGRRVFAAAGGDGGAREFKEIVLEVMQVGGVLNVGDFVPALRWLDPQGVAAKMKKLHRRFDDMMDEIIAGYREARRVAADGEESKDLLGLLLSMVDERPFDSGEEVRITETDVKALILNLFVAGTDTTSTIVEWSLAELIRHPEILRQAQEEMDAVAGRGRLVTESDLRSLTFFNAVIKETFRLHPSTPLSLPRMAAEECEVAGYRVPRGSELLVNVWGIARDPALWPDPLEFRPARFLPGGSHADVDVKGADFGLIPFGAGRRICAGLSWGLRMVTLTSATLVHAFDWELPAGQTPDKLNMEEAFTLLLQRAVPLVARPVPRLLPSAYEIA

SEQ ID NO: 6738 - protein, 466 aa, Zea mays subsp. mays
  peptide (1)..(466): Ceres Seq. ID no. 12350002
  misc_feature (1)..(451): Pfam Name: Cytochrome P450 Pfam Description: Cytochrome P450
  misc_feature (1)..(466): Homolog of NCBI NO: 37532594 NR Description: putative cytochrome 450 [Oryza sativa (japonica group)] >gi|21672032|gb|AAM74394.1| Putative cytochrome 450
  misc_feature (1)..(464): Homolog of NCBI NO: 12231880 NR Description: putative flavonoid 3'-hydroxylase [Callistephus
  misc_feature (1)..(463): Homolog of NCBI NO: 27151498 NR Description: Flavonoid 3'-monooxygenase (Flavonoid
MTKVYGPLLRLRFGSSTVVVAGSAAVAQQFLRAHDANFSSRPPNSGGELMAYNYQDVVFAPYGPRWRAMRKVCAVNLFSARALDDVRGVREREAALMVRSLAEQAHGGLDAPPAAVPVGKAINVCTTNALSRAAVGRRVFAAAGGDGGAREFKEIVLEVMQVGGVLNVGDFVPALRWLDPQGVAAKMKKLHRRFDDMMDEIIAGYREARRVAADGEESKDLLGLLLSMVDERPFDSGEEVRITETDVKALILNLFVAGTDTTSTIVEWSLAELIRHPEILRQAQEEMDAVAGRGRLVTESDLRSLTFFNAVIKETFRLHPSTPLSLPRMAAEECEVAGYRVPRGSELLVNVWGIARDPALWPDPLEFRPARFLPGGSHADVDVKGADFGLIPFGAGRRICAGLSWGLRMVTLTSATLVHAFDWELPAGQTPDKLNMEEAFTLLLQRAVPLVARPVPRLLPSAYEIA

SEQ ID NO: 6739 - DNA, 1488 bp, Zea mays subsp. mays
  misc_feature (1)..(1488): Ceres Seq. ID no. 12373586
  misc_feature: MA Experiment ID: 108504 Result: Up-regulated in Transcription
  misc_feature: MA Experiment 108504 PARAMETER Experiment Name: Zm_Drought_P Parameter: Age (day) Value: 8
  misc_feature: MA Experiment 108504 PARAMETER Experiment Name: Zm_Drought_P Parameter: Organism Value: Zea mays
  misc_feature: MA Experiment 108504 PARAMETER Experiment Name: Zm_Drought_P Parameter: Plant Line Value: 35A19
  misc_feature: MA Experiment 108504 PARAMETER Experiment Name: Zm_Drought_P Parameter: Timepoint (hr) Value: 12
  misc_feature: MA Experiment 108504 PARAMETER Experiment Name: Zm_Drought_P Parameter: Tissue Value: Aerial
  misc_feature: MA Experiment 108504 PARAMETER Experiment Name: Zm_Drought_P Parameter: Treatment Value: Drought vs. No Drought
  misc_feature: MA Experiment ID: 108522 Result: Up-regulated in Transcription
  misc_feature: MA Experiment 108522 PARAMETER Experiment Name: Zm_42deg_Heat_P Parameter: Age (day) Value: 8
  misc_feature: MA Experiment 108522 PARAMETER Experiment Name: Zm_42deg_Heat_P Parameter: Organism Value: Zea mays
  misc_feature: MA Experiment 108522 PARAMETER Experiment Name: Zm_42deg_Heat_P Parameter: Plant Line Value: 35A19
  misc_feature: MA Experiment 108522 PARAMETER Experiment Name: Zm_42deg_Heat_P Parameter: Temperature (deg C) Value: 42 vs. 22
  misc_feature: MA Experiment 108522 PARAMETER Experiment Name: Zm_42deg_Heat_P Parameter: Timepoint (hr) Value: 1
  misc_feature: MA Experiment 108522 PARAMETER Experiment Name: Zm_42deg_Heat_P Parameter: Tissue Value: Aerial
  misc_feature: MA Experiment ID: 108535 Result: Up-regulated in Transcription
  misc_feature: MA Experiment 108535 PARAMETER Experiment Name: Zm_Meristem_P Parameter: Age (day) Value: 8
  misc_feature: MA Experiment 108535 PARAMETER Experiment Name: Zm_Meristem_P Parameter: Organism Value: Zea mays
  misc_feature: MA Experiment 108535 PARAMETER Experiment Name: Zm_Meristem_P Parameter: Plant Line Value: 35A19
  misc_feature: MA Experiment 108535 PARAMETER Experiment Name: Zm_Meristem_P Parameter: Tissue Value: Root Meristem vs. Above Root Meristem
  misc_feature: MA Experiment ID: 108543 Result: Up-regulated in Transcription
  misc_feature: MA Experiment ID: 108547 Result: Down-regulated in Transcription
  misc_feature: MA Experiment 108547 PARAMETER Experiment Name: Zm_Imbibed_Seeds_P Parameter: Age (day) Value: 4 vs. 2
  misc_feature: MA Experiment 108547 PARAMETER Experiment Name: Zm_Imbibed_Seeds_P Parameter: Organism Value: Zea mays
  misc_feature: MA Experiment 108547 PARAMETER Experiment Name: Zm_Imbibed_Seeds_P Parameter: Plant Line Value: 35A19
  misc_feature: MA Experiment 108547 PARAMETER Experiment Name: Zm_Imbibed_Seeds_P Parameter: Tissue Value: Aerial vs. Embryo
  misc_feature: MA Experiment ID: 108556 Result: Up-regulated in Transcription
  misc_feature: MA Experiment 108556 PARAMETER Experiment Name: Zm_Drought_P Parameter: Age (day) Value: 9
  misc_feature: MA Experiment 108556 PARAMETER Experiment Name: Zm_Drought_P Parameter: Organism Value: Zea mays
  misc_feature: MA Experiment 108556 PARAMETER Experiment Name: Zm_Drought_P Parameter: Plant Line Value: 35A19
  misc_feature: MA Experiment 108556 PARAMETER Experiment Name: Zm_Drought_P Parameter: Timepoint (hr) Value: 24
  misc_feature: MA Experiment 108556 PARAMETER Experiment Name: Zm_Drought_P Parameter: Tissue Value: Aerial
  misc_feature: MA Experiment 108556 PARAMETER Experiment Name: Zm_Drought_P Parameter: Treatment Value: Drought vs. No Drought
  misc_feature: MA Experiment ID: 108689 Result: Up-regulated in Transcription
  misc_feature: MA Experiment 108689 PARAMETER Experiment Name: Zm_Drought_Roots_P Parameter: Age (day) Value: 9
  misc_feature: MA Experiment 108689 PARAMETER Experiment Name: Zm_Drought_Roots_P Parameter: Organism Value: Zea mays
  misc_feature: MA Experiment 108689 PARAMETER Experiment Name: Zm_Drought_Roots_P Parameter: Plant Line Value: 35A19
  misc_feature: MA Experiment 108689 PARAMETER Experiment Name: Zm_Drought_Roots_P Parameter: Timepoint (hr) Value: 24
  misc_feature: MA Experiment 108689 PARAMETER Experiment Name: Zm_Drought_Roots_P Parameter: Tissue Value: Roots
  misc_feature: MA Experiment 108689 PARAMETER Experiment Name: Zm_Drought_Roots_P Parameter: Treatment Value: Drought vs. No Drought
  misc_feature: MA Experiment ID: 20000478 Result: Up-regulated in Transcription
  misc_feature: MA Experiment 20000478 PARAMETER Experiment Name: Zm_5mM_SA_P Parameter: Age (day) Value: 11
  misc_feature: MA Experiment 20000478 PARAMETER Experiment Name: Zm_5mM_SA_P Parameter: Organism Value: Zea mays
  misc_feature: MA Experiment 20000478 PARAMETER Experiment Name: Zm_5mM_SA_P Parameter: Plant Line Value: 35A19
  misc_feature: MA Experiment 20000478 PARAMETER Experiment Name: Zm_5mM_SA_P Parameter: Timepoint (hr) Value: 72
  misc_feature: MA Experiment 20000478 PARAMETER Experiment Name: Zm_5mM_SA_P Parameter: Tissue Value: Aerial
  misc_feature: MA Experiment 20000478 PARAMETER Experiment Name: Zm_5mM_SA_P Parameter: Treatment Value: 5mM SA vs. No Treatment
  misc_feature: MA Experiment ID: 20000479 Result: Up-regulated in Transcription
  misc_feature: MA Experiment 20000479 PARAMETER Experiment Name: Zm_Drought_P Parameter: Age (day) Value: 10
  misc_feature: MA Experiment 20000479 PARAMETER Experiment Name: Zm_Drought_P Parameter: Organism Value: Zea mays
  misc_feature: MA Experiment 20000479 PARAMETER Experiment Name: Zm_Drought_P Parameter: Plant Line Value: 35A19
  misc_feature: MA Experiment 20000479 PARAMETER Experiment Name: Zm_Drought_P Parameter: Timepoint (hr) Value: 48
  misc_feature: MA Experiment 20000479 PARAMETER Experiment Name: Zm_Drought_P Parameter: Tissue Value: Aerial
  misc_feature: MA Experiment 20000479 PARAMETER Experiment Name: Zm_Drought_P Parameter: Treatment Value: Drought vs. No Drought
  misc_feature: MA Experiment ID: 20000480 Result: Up-regulated in Transcription
  misc_feature: MA Experiment 20000480 PARAMETER Experiment Name: Zm_Drought_P Parameter: Age (day) Value: 11
  misc_feature: MA Experiment 20000480 PARAMETER Experiment Name: Zm_Drought_P Parameter: Organism Value: Zea mays
  misc_feature: MA Experiment 20000480 PARAMETER Experiment Name: Zm_Drought_P Parameter: Plant Line Value: 35A19
  misc_feature: MA Experiment 20000480 PARAMETER Experiment Name: Zm_Drought_P Parameter: Timepoint (hr) Value: 72
  misc_feature: MA Experiment 20000480 PARAMETER Experiment Name: Zm_Drought_P Parameter: Tissue Value: Aerial
  misc_feature: MA Experiment 20000480 PARAMETER Experiment Name: Zm_Drought_P Parameter: Treatment Value: Drought vs. No Drought
  misc_feature: MA Experiment ID: 20000492 Result: Down-regulated in Transcription
  misc_feature: MA Experiment 20000492 PARAMETER Experiment Name: Zm_Hybrid_Seed_Dev_P Parameter: DAP Value: 12
  misc_feature: MA Experiment 20000492 PARAMETER Experiment Name: Zm_Hybrid_Seed_Dev_P Parameter: Organism Value: Zea mays
  misc_feature: MA Experiment 20000492 PARAMETER Experiment Name: Zm_Hybrid_Seed_Dev_P Parameter: Plant Line Value: 35A19
  misc_feature: MA Experiment 20000492 PARAMETER Experiment Name: Zm_Hybrid_Seed_Dev_P Parameter: Tissue Value: Fert Kernel vs. Unfert Floret
  misc_feature: MA Experiment ID: 20000626 Result: Down-regulated in Transcription
  misc_feature: MA Experiment 20000626 PARAMETER Experiment Name: Zm_Herbicide-Treatments_P Parameter: Timepoint (hr) Value: 12
  misc_feature: MA Experiment 20000626 PARAMETER Experiment Name: Zm_Herbicide-Treatments_P Parameter: Tissue Value: Aerial
  misc_feature: MA Experiment 20000626 PARAMETER Experiment Name: Zm_Herbicide-Treatments_P Parameter: Treatment Value: Roundup vs. No Treatment
  misc_feature: MA Experiment ID: 20000629 Result: Down-regulated in Transcription
  misc_feature: MA Experiment 20000629 PARAMETER Experiment Name: Zm_Herbicide-Treatments_P Parameter: Timepoint (hr) Value: 12
  misc_feature: MA Experiment 20000629 PARAMETER Experiment Name: Zm_Herbicide-Treatments_P Parameter: Tissue Value: Aerial
  misc_feature: MA Experiment 20000629 PARAMETER Experiment Name: Zm_Herbicide-Treatments_P Parameter: Treatment Value: Trimec vs. No Treatment
gcccttctcccctcccctcgtgcgttgacaaaaaagaaagtgaagtgaagaatcaaccaacaatggccggcggaatccaccgaccacaatgctgattttgtttgagccatctggactggactggaccctataaaaaacagatcagatctcccccaccctcgcttccccagcctgcaggttgtcgtcgccctcttcctcctccttcgctgttgctgttgctgttgcttccgcttccgccgccgccgccgcggaaatcaaactaatctgatcgagaccacaccgttccagagagatcccccaaacaaaaaaagagcacgggatcgaaatggagctcgacggcaagtacagcaaggaccagagcctcaaatgcgaatgcctcctcttcgacctcgatgacacactatacccgttcaactccggcattgctgccgacataaagaagaacatccaagactatatggtgcacaagctcggcgttgacgaggccataagcttggacctatgcgtcctcctctacaagcagtacggaaccaccatggctggcttgagggctgttgggtaccagtttgattacgatgactaccacagctttgttcatgggaggttgtcttatgacaaaatcaagcctgatcctgtgcttaggaacatcctcctcagcttacccattcgcaaacttgtgttcacaaacggtgacagaacacatgcttcaagggccctcaagaggcttggcattgaggattgtttcgaaggagtcgtgtgctttgagacactgaacccgacatctcctcctcctcctgtcccagctcaggaacttgaaatctttgatctaatgaagcatctggctcatccacagcccgcggtgcagctaccaaaatcacctatcctatgcaaaccgtcaagggaggccatgctgcaggctctcaaggtcgcctccattaatccacagacaactatattgttcgatgacagcttcaggaacattgaagctgcaaagcaaattggaatgtgtactgtcctggttggaacatctgagcggaaaaagggtgctgaccatgccttggaaagcctccacaacatgaaggaagcactgccggagctgtgggaggaagctgagaaggatgaagatgtgaggaattcgagcaaagccggaatcgagacatctgtgatcgcgtaatcttttttgttccttggttacaaatgtagccccttctgttttccttggaggacaacacgaggtggtggtgtatgaaaaaagaggagacctcctcaaggggtgggggggactgactgatactacgaccactgatgttacaccccgtaaactattactatccaataagaatgttttcttcttcaactatctaggatggtcattttgttggtgtttagttaaagcagctatccaatatttttttggatccaaatgtgtatgtcctcgctacttggttcttcatgcttatgaatgtggagtgatgatgtcctgttgcc

SEQ ID NO: 6740 - protein, 282 aa, Zea mays subsp. mays
  peptide (1)..(282): Ceres Seq. ID no. 12373587
  misc_feature (16)..(235): Pfam Name: haloacid dehalogenase-like hydrolase Pfam Description: haloacid dehalogenase-like hydrolase
  misc_feature (1)..(154): Homolog of NCBI NO: 34906034 NR Description: P0518C01.30 [Oryza sativa (japonica
  misc_feature (181)..(282): Homolog of NCBI NO: 34906034 NR Description: P0518C01.30 [Oryza sativa (japonica
  misc_feature (1)..(152): Homolog of NCBI NO: 7406669 NR Description: putative ripening-related protein [Vitis vinifera]
  misc_feature (141)..(282): Homolog of NCBI NO: 7406669 NR Description: putative ripening-related protein [Vitis vinifera]
  misc_feature (1)..(282): Homolog of NCBI NO: 15241720 NR Description: putative protein; protein id: At5g02230.1, by cDNA: 36724. [Arabidopsis thaliana] >gi|11358409|pir||T48244
  misc_feature (1)..(282): Homolog of NCBI NO: 21593165 NR Description: unknown [Arabidopsis thaliana]
  misc_feature (1)..(278): Homolog of NCBI NO: 30697234 NR Description: haloacid dehalogenase-like hydrolase family
  misc_feature (1)..(278): Homolog of NCBI NO: 30697236 NR Description: haloacid dehalogenase-like hydrolase family
  misc_feature (1)..(278): Homolog of NCBI NO: 21618155 NR Description: putative ripening-related protein-like
  misc_feature (14)..(282): Homolog of NCBI NO: 40714684 NR Description: expressed protein [Oryza sativa (japonica
MELDGKYSKDQSLKCECLLFDLDDTLYPFNSGIAADIKKNIQDYMVHKLGVDEAISLDLCVLLYKQYGTTMAGLRAVGYQFDYDDYHSFVHGRLSYDKIKPDPVLRNILLSLPIRKLVFTNGDRTHASRALKRLGIEDCFEGVVCFETLNPTSPPPPVPAQELEIFDLMKHLAHPQPAVQLPKSPILCKPSREAMLQALKVASINPQTTILFDDSFRNIEAAKQIGMCTVLVGTSERKKGADHALESLHNMKEALPELWEEAEKDEDVRNSSKAGIETSVIA

SEQ ID NO: 6741 - protein, 238 aa, Zea mays subsp. mays
  peptide (1)..(238): Ceres Seq. ID no. 12373588
  misc_feature (1)..(191): Pfam Name: haloacid dehalogenase-like hydrolase Pfam Description: haloacid dehalogenase-like hydrolase
  misc_feature (1)..(110): Homolog of NCBI NO: 34906034 NR Description: P0518C01.30 [Oryza sativa (japonica
  misc_feature (137)..(238): Homolog of NCBI NO: 34906034 NR Description: P0518C01.30 [Oryza sativa (japonica
  misc_feature (1)..(108): Homolog of NCBI NO: 7406669 NR Description: putative ripening-related protein [Vitis vinifera]
  misc_feature (97)..(238): Homolog of NCBI NO: 7406669 NR Description: putative ripening-related protein [Vitis vinifera]
  misc_feature (1)..(238): Homolog of NCBI NO: 15241720 NR Description: putative protein; protein id: At5g02230.1, by cDNA: 36724. [Arabidopsis thaliana] >gi|11358409|pir||T48244
  misc_feature (1)..(238): Homolog of NCBI NO: 21593165 NR Description: unknown [Arabidopsis thaliana]
  misc_feature (1)..(234): Homolog of NCBI NO: 30697234 NR Description: haloacid dehalogenase-like hydrolase family
  misc_feature (1)..(234): Homolog of NCBI NO: 30697236 NR Description: haloacid dehalogenase-like hydrolase family
  misc_feature (1)..(234): Homolog of NCBI NO: 21618155 NR Description: putative ripening-related protein-like
  misc_feature (1)..(238): Homolog of NCBI NO: 40714684 NR Description: expressed protein [Oryza sativa (japonica
MVHKLGVDEAISLDLCVLLYKQYGTTMAGLRAVGYQFDYDDYHSFVHGRLSYDKIKPDPVLRNILLSLPIRKLVFTNGDRTHASRALKRLGIEDCFEGVVCFETLNPTSPPPPVPAQELEIFDLMKHLAHPQPAVQLPKSPILCKPSREAMLQALKVASINPQTTILFDDSFRNIEAAKQIGMCTVLVGTSERKKGADHALESLHNMKEALPELWEEAEKDEDVRNSSKAGIETSVIA

SEQ ID NO: 6742 - protein, 212 aa, Zea mays subsp. mays
  peptide (1)..(212): Ceres Seq. ID no. 12373589
  misc_feature (1)..(165): Pfam Name: haloacid dehalogenase-like hydrolase Pfam Description: haloacid dehalogenase-like hydrolase
  misc_feature (1)..(84): Homolog of NCBI NO: 34906034 NR Description: P0518C01.30 [Oryza sativa (japonica
  misc_feature (111)..(212): Homolog of NCBI NO: 34906034 NR Description: P0518C01.30 [Oryza sativa (japonica
  misc_feature (1)..(82): Homolog of NCBI NO: 7406669 NR Description: putative ripening-related protein [Vitis vinifera]
  misc_feature (71)..(212): Homolog of NCBI NO: 7406669 NR Description: putative ripening-related protein [Vitis vinifera]
  misc_feature (1)..(212): Homolog of NCBI NO: 15241720 NR Description: putative protein; protein id: At5g02230.1, by cDNA: 36724. [Arabidopsis thaliana] >gi|11358409|pir||T48244
  misc_feature (1)..(212): Homolog of NCBI NO: 21593165 NR Description: unknown [Arabidopsis thaliana]
  misc_feature (1)..(208): Homolog of NCBI NO: 30697234 NR Description: haloacid dehalogenase-like hydrolase family
  misc_feature (1)..(208): Homolog of NCBI NO: 30697236 NR Description: haloacid dehalogenase-like hydrolase family
  misc_feature (1)..(208): Homolog of NCBI NO: 21618155 NR Description: putative ripening-related protein-like
  misc_feature (1)..(212): Homolog of NCBI NO: 40714684 NR Description: expressed protein [Oryza sativa (japonica
MAGLRAVGYQFDYDDYHSFVHGRLSYDKIKPDPVLRNILLSLPIRKLVFTNGDRTHASRALKRLGIEDCFEGVVCFETLNPTSPPPPVPAQELEIFDLMKHLAHPQPAVQLPKSPILCKPSREAMLQALKVASINPQTTILFDDSFRNIEAAKQIGMCTVLVGTSERKKGADHALESLHNMKEALPELWEEAEKDEDVRNSSKAGIETSVIA

SEQ ID NO: 6743 - DNA, 1301 bp, Zea mays subsp. mays
  misc_feature (1)..(1301): Ceres Seq. ID no. 12350982
  misc_feature: MA Experiment ID: 108535 Result: Up-regulated in Transcription
  misc_feature: MA Experiment 108535 PARAMETER Experiment Name: Zm_Meristem_P Parameter: Age (day) Value: 8
  misc_feature: MA Experiment 108535 PARAMETER Experiment Name: Zm_Meristem_P Parameter: Organism Value: Zea mays
  misc_feature: MA Experiment 108535 PARAMETER Experiment Name: Zm_Meristem_P Parameter: Plant Line Value: 35A19
  misc_feature: MA Experiment 108535 PARAMETER Experiment Name: Zm_Meristem_P Parameter: Tissue Value: Root Meristem vs. Above Root Meristem
  misc_feature: MA Experiment ID: 20000492 Result: Up-regulated in Transcription
  misc_feature: MA Experiment 20000492 PARAMETER Experiment Name: Zm_Hybrid_Seed_Dev_P Parameter: DAP Value: 12
  misc_feature: MA Experiment 20000492 PARAMETER Experiment Name: Zm_Hybrid_Seed_Dev_P Parameter: Organism Value: Zea mays
  misc_feature: MA Experiment 20000492 PARAMETER Experiment Name: Zm_Hybrid_Seed_Dev_P Parameter: Plant Line Value: 35A19
  misc_feature: MA Experiment 20000492 PARAMETER Experiment Name: Zm_Hybrid_Seed_Dev_P Parameter: Tissue Value: Fert Kernel vs. Unfert Floret
ttgatggagtaccaaatttgccatacgtcgctccattttcctcctctgttcccaatgcttgtcgtattgtgcgttctttcatcgaggagttggtcagctacttgtcactcagcggtggcgtaaacgtctatgatgtggtgaaaagctacttagacaagttcttgattgagacgttgaatgatggttttctgaagctgatacatggtggatccctggaatttccacaggtggtgcagatcgcaggaaatatcgccgttctcgagcggtcctgcgacatgttcctttggcacgccgctcgactttgtggtgtccctaggtgcctcctcgagaagccccattctggattgagtgccagagctgtgctcaaagcctcccagaatgcagcatacaacggatcggttactttggtgaattccaagatcgacgagttcatgctgcagctgactagcatcaactggaccccggacgaagctccagagcacgccaacgactacatgaacgaggtgatcatctaccttcacgaggtggtctcttccgggcagcaggccgtgccaagggacgccctgttcaaggttgtatctggcgcgctgagccacatctcggactctatgacgacggtccttctcagtgaccgggtgaaaaggttcaacgcgaacgccgttgctagcatcgacgtcgatctgagggcgctggaggggttcgctgacgacacgtaccgcgtggccgggtttctggacctgagaaagggaaccagtttcagagagtgtctagccgaagtaaggcagctaacaaaccttctgctgagcaaccagcctgagagcttcgcgaaccctgcaacccgggagcagagctacggagccttagaccacaagaaggtggcgataatttgcgacaagttcaaggatgcccccgacagcctgtttgggagcctctcaggccggggcacggtgcagagcgcccggaagaagtccctggatgtgctgaagagaaggctaaaggattttagctagctggtgaactagatcatttagacaagctagtagcctagtacccctgttttagtgccagtcgtatccatttaaaatttcttttccgtctttctttattccctctttaatcgacttcccgtcccgtttcatgcgccgaagagaaggctgaaggattttagctggggttagctggtcgagctagatcgttaaataagctagtgctctgtttagggaagaagacaagtggttcggtgtgtaaagccatttcaaatttctttccatccttatttttactcccttaatctgcttcct

SEQ ID NO: 6744 - protein, 335 aa, Zea mays subsp. mays
  peptide (1)..(335): Ceres Seq. ID no. 12350983
  misc_feature (1)..(335): Pfam Name: Exocyst complex subunit Sec15-like Pfam Description: Exocyst complex subunit Sec15-like
  misc_feature (3)..(335): Homolog of NCBI NO: 37534338 NR Description: unknown protein [Oryza sativa (japonica
  misc_feature (1)..(335): Homolog of NCBI NO: 34902596 NR Description: Unknown protein [Oryza sativa (japonica
  misc_feature (1)..(335): Homolog of NCBI NO: 15228982 NR Description: putative protein; protein id: At3g56640.1 thaliana] >gi|24418676|sp|Q9LXX6|SC15_ARATH Probable exocyst
  misc_feature (3)..(335): Homolog of NCBI NO: 18411920 NR Description: hypothetical protein; protein id: At4g02350.1
  misc_feature (1)..(335): Homolog of NCBI NO: 34895194 NR Description: B1051E10.38 [Oryza sativa (japonica
  misc_feature (7)..(288): Homolog of NCBI NO: 40738643 NR Description: hypothetical protein AN6493.2 [Aspergillus
  misc_feature (41)..(298): Homolog of NCBI NO: 32403180 NR Description: hypothetical protein [Neurospora crassa]
DGVPNLPYVAPFSSSVPNACRIVRSFIEELVSYLSLSGGVNVYDVVKSYLDKFLIETLNDGFLKLIHGGSLEFPQVVQIAGNIAVLERSCDMFLWHAARLCGVPRCLLEKPHSGLSARAVLKASQNAAYNGSVTLVNSKIDEFMLQLTSINWTPDEAPEHANDYMNEVIIYLHEVVSSGQQAVPRDALFKVVSGALSHISDSMTTVLLSDRVKRFNANAVASIDVDLRALEGFADDTYRVAGFLDLRKGTSFRECLAEVRQLTNLLLSNQPESFANPATREQSYGALDHKKVAIICDKFKDAPDSLFGSLSGRGTVQSARKKSLDVLKRRLKDFS

SEQ ID NO: 6745 - protein, 244 aa, Zea mays subsp. mays
  peptide (1)..(244): Ceres Seq. ID no. 12350984
  misc_feature (1)..(244): Pfam Name: Exocyst complex subunit Sec15-like Pfam Description: Exocyst complex subunit Sec15-like
  misc_feature (1)..(244): Homolog of NCBI NO: 37534338 NR Description: unknown protein [Oryza sativa (japonica
  misc_feature (1)..(244): Homolog of NCBI NO: 34902596 NR Description: Unknown protein [Oryza sativa (japonica
  misc_feature (1)..(244): Homolog of NCBI NO: 15228982 NR Description: putative protein; protein id: At3g56640.1 thaliana] >gi|24418676|sp|Q9LXX6|SC15_ARATH Probable exocyst
  misc_feature (1)..(244): Homolog of NCBI NO: 18411920 NR Description: hypothetical protein; protein id: At4g02350.1
  misc_feature (1)..(244): Homolog of NCBI NO: 34895194 NR Description: B1051E10.38 [Oryza sativa (japonica
  misc_feature (1)..(197): Homolog of NCBI NO: 40738643 NR Description: hypothetical protein AN6493.2 [Aspergillus
  misc_feature (1)..(207): Homolog of NCBI NO: 32403180 NR Description: hypothetical protein [Neurospora crassa]
MFLWHAARLCGVPRCLLEKPHSGLSARAVLKASQNAAYNGSVTLVNSKIDEFMLQLTSINWTPDEAPEHANDYMNEVIIYLHEVVSSGQQAVPRDALFKVVSGALSHISDSMTTVLLSDRVKRFNANAVASIDVDLRALEGFADDTYRVAGFLDLRKGTSFRECLAEVRQLTNLLLSNQPESFANPATREQSYGALDHKKVAIICDKFKDAPDSLFGSLSGRGTVQSARKKSLDVLKRRLKDFS

SEQ ID NO: 6746 - protein, 192 aa, Zea mays subsp. mays
  peptide (1)..(192): Ceres Seq. ID no. 12350985
  misc_feature (1)..(192): Pfam Name: Exocyst complex subunit Sec15-like Pfam Description: Exocyst complex subunit Sec15-like
  misc_feature (1)..(192): Homolog of NCBI NO: 15228982 NR Description: putative protein; protein id: At3g56640.1 thaliana] >gi|24418676|sp|Q9LXX6|SC15_ARATH Probable exocyst
  misc_feature (1)..(192): Homolog of NCBI NO: 18411920 NR Description: hypothetical protein; protein id: At4g02350.1
  misc_feature (1)..(192): Homolog of NCBI NO: 34895194 NR Description: B1051E10.38 [Oryza sativa (japonica
  misc_feature (1)..(192): Homolog of NCBI NO: 34902596 NR Description: Unknown protein [Oryza sativa (japonica
  misc_feature (1)..(192): Homolog of NCBI NO: 37534338 NR Description: unknown protein [Oryza sativa (japonica
  misc_feature (1)..(145): Homolog of NCBI NO: 40738643 NR Description: hypothetical protein AN6493.2 [Aspergillus
  misc_feature (1)..(155): Homolog of NCBI NO: 32403180 NR Description: hypothetical protein [Neurospora crassa]
MLQLTSINWTPDEAPEHANDYMNEVIIYLHEVVSSGQQAVPRDALFKVVSGALSHISDSMTTVLLSDRVKRFNANAVASIDVDLRALEGFADDTYRVAGFLDLRKGTSFRECLAEVRQLTNLLLSNQPESFANPATREQSYGALDHKKVAIICDKFKDAPDSLFGSLSGRGTVQSARKKSLDVLKRRLKDFS

SEQ ID NO: 6747 - DNA, 939 bp, Zea mays subsp. mays
  misc_feature (1)..(939): Ceres Seq. ID no. 12408448
  misc_feature: MA Experiment ID: 108535 Result: Up-regulated in Transcription
  misc_feature: MA Experiment 108535 PARAMETER Experiment Name: Zm_Meristem_P Parameter: Age (day) Value: 8
  misc_feature: MA Experiment 108535 PARAMETER Experiment Name: Zm_Meristem_P Parameter: Organism Value: Zea mays
  misc_feature: MA Experiment 108535 PARAMETER Experiment Name: Zm_Meristem_P Parameter: Plant Line Value: 35A19
  misc_feature: MA Experiment 108535 PARAMETER Experiment Name: Zm_Meristem_P Parameter: Tissue Value: Root Meristem vs. Above Root Meristem
  misc_feature: MA Experiment ID: 20000108 Result: Up-regulated in Transcription
  misc_feature: MA Experiment 20000108 PARAMETER Experiment Name: Zm_Root-Tips_P Parameter: Age (day) Value: 12
  misc_feature: MA Experiment 20000108 PARAMETER Experiment Name: Zm_Root-Tips_P Parameter: Organism Value: Zea mays
  misc_feature: MA Experiment 20000108 PARAMETER Experiment Name: Zm_Root-Tips_P Parameter: Tissue Value: Root tips vs. Root mid region    35
  misc_feature: MA Experiment 20000108 PARAMETER Experiment Name: Zm_Root-Tips_P Parameter: Tissue Value: Root tips vs. Root mid region   Sequence Listing-Misc Features (4)
  misc_feature: MA Experiment ID: 20000492 Result: Up-regulated in Transcription
  misc_feature: MA Experiment 20000492 PARAMETER Experiment Name: Zm_Hybrid_Seed_Dev_P Parameter: DAP Value: 12
  misc_feature: MA Experiment 20000492 PARAMETER Experiment Name: Zm_Hybrid_Seed_Dev_P Parameter: Organism Value: Zea mays
  misc_feature: MA Experiment 20000492 PARAMETER Experiment Name: Zm_Hybrid_Seed_Dev_P Parameter: Plant Line Value: 35A19
  misc_feature: MA Experiment 20000492 PARAMETER Experiment Name: Zm_Hybrid_Seed_Dev_P Parameter: Tissue Value: Fert Kernel vs. Unfert Floret
agttccatcttccgctcactcccttcatcgcgctcggcacacaggcgacggcggcggagctcatgctagggctctcagcgaaggcatcagctgcttcccctcccgcctctcgccaatcgcctcccgtcctccgcacaccggccggtgatcctgcgtcttttcattcgtaaatcatactccaggtatctgcatcgcaggggaaatggcaagcaaagcaggtggtgatggcaaagaagccataaacgagcaagtagttgccaacacttatgccaacatgcgtaccgaaatgaaccagctctataccaagatcacagagctggagatggaggtcagtgagcactccctcgtgattggtgcgatcgagccgctggacccctcaaggcgctgttacaggatgattggtggggtcctggttgaaaggaccatcaaggaagtcctgcctgctgtgaagcgcaacaaggagggccttgaagaagtgattgctcgcatgcatgaggcactggagaggaagaagaaagagatcaccgagtttgagcttaagtacaagatcaggatccggaaggctgacaatgacgcagaggacgaaggcggcaagaaggaaggcactgcacagggagtccttgttgggcctgctggacagtaaaacttaattagatggattttgtgtaaaagatgaggaccgatgtgaactgaagtagtttctttgttacctcttcgggtgctgcagcaatccaagtttctgtttgttattgatgacacatcgcaaatctcccaggactagaatctctgttcgtgattccttttactatattctcaaaataattgtggattagtcatctgcatgacttcatttcaactgatgctgaaatattgtggtgcttggtggctggtaaattcctgtaattgagctgtttcaatggcataccagcttgttgttcc

SEQ ID NO: 6748 - protein, 146 aa, Zea mays subsp. mays
  peptide (1)..(146): Ceres Seq. ID no. 12408449
  misc_feature (15)..(122): Pfam Name: KE2 family protein Pfam Description: KE2 family protein
  misc_feature (1)..(144): Homolog of NCBI NO: 15228766 NR Description: prefoldin-like protein; protein id: At3g22480.1, by cDNA: 264413., supported by cDNA: gi_14334457 [Arabidopsis >gi|12230458|sp|Q9LJ98|PFD2_ARATH Probable prefoldin prefoldin
  misc_feature (3)..(141): Homolog of NCBI NO: 28189659 NR Description: similar to prefoldin subunit 2 [Bos taurus]
  misc_feature (3)..(141): Homolog of NCBI NO: 12408675 NR Description: prefoldin 2 [Homo sapiens] Prefoldin subunit 2 (HSPC231) prefoldin subunit 2 [Homo sapiens]
  misc_feature (15)..(141): Homolog of NCBI NO: 5690431 NR Description: prefoldin subunit 2 [Homo sapiens]
  misc_feature (41)..(141): Homolog of NCBI NO: 7106852 NR Description: HSPC231 [Homo sapiens]
  misc_feature (10)..(141): Homolog of NCBI NO: 24662461 NR Description: CG6302-PA [Drosophila melanogaster]
  misc_feature (11)..(118): Homolog of NCBI NO: 39595088 NR Description: Hypothetical protein CBG03668 [Caenorhabditis
MASKAGGDGKEAINEQVVANTYANMRTEMNQLYTKITELEMEVSEHSLVIGAIEPLDPSRRCYRMIGGVLVERTIKEVLPAVKRNKEGLEEVIARMHEALERKKKEITEFELKYKIRIRKADNDAEDEGGKKEGTAQGVLVGPAGQ

SEQ ID NO: 6749 - protein, 122 aa, Zea mays subsp. mays
  peptide (1)..(122): Ceres Seq. ID no. 12408450
  misc_feature (1)..(98): Pfam Name: KE2 family protein Pfam Description: KE2 family protein
  misc_feature (1)..(120): Homolog of NCBI NO: 15228766 NR Description: prefoldin-like protein; protein id: At3g22480.1, by cDNA: 264413., supported by cDNA: gi_14334457 [Arabidopsis >gi|12230458|sp|Q9LJ98|PFD2_ARATH Probable prefoldin prefoldin
  misc_feature (1)..(117): Homolog of NCBI NO: 28189659 NR Description: similar to prefoldin subunit 2 [Bos taurus]
  misc_feature (1)..(117): Homolog of NCBI NO: 12408675 NR Description: prefoldin 2 [Homo sapiens] Prefoldin subunit 2 (HSPC231) prefoldin subunit 2 [Homo sapiens]
  misc_feature (1)..(117): Homolog of NCBI NO: 5690431 NR Description: prefoldin subunit 2 [Homo sapiens]
  misc_feature (17)..(117): Homolog of NCBI NO: 7106852 NR Description: HSPC231 [Homo sapiens]
  misc_feature (1)..(117): Homolog of NCBI NO: 24662461 NR Description: CG6302-PA [Drosophila melanogaster]
  misc_feature (1)..(94): Homolog of NCBI NO: 39595088 NR Description: Hypothetical protein CBG03668 [Caenorhabditis
MRTEMNQLYTKITELEMEVSEHSLVIGAIEPLDPSRRCYRMIGGVLVERTIKEVLPAVKRNKEGLEEVIARMHEALERKKKEITEFELKYKIRIRKADNDAEDEGGKKEGTAQGVLVGPAGQ

SEQ ID NO: 6750 - protein, 118 aa, Zea mays subsp. mays
  peptide (1)..(118): Ceres Seq. ID no. 12408451
  misc_feature (1)..(94): Pfam Name: KE2 family protein Pfam Description: KE2 family protein
  misc_feature (1)..(116): Homolog of NCBI NO: 15228766 NR Description: prefoldin-like protein; protein id: At3g22480.1, by cDNA: 264413., supported by cDNA: gi_14334457 [Arabidopsis >gi|12230458|sp|Q9LJ98|PFD2_ARATH Probable prefoldin prefoldin
  misc_feature (1)..(113): Homolog of NCBI NO: 28189659 NR Description: similar to prefoldin subunit 2 [Bos taurus]
  misc_feature (1)..(113): Homolog of NCBI NO: 12408675 NR Description: prefoldin 2 [Homo sapiens] Prefoldin subunit 2 (HSPC231) prefoldin subunit 2 [Homo sapiens]
  misc_feature (1)..(113): Homolog of NCBI NO: 5690431 NR Description: prefoldin subunit 2 [Homo sapiens]
  misc_feature (13)..(113): Homolog of NCBI NO: 7106852 NR Description: HSPC231 [Homo sapiens]
  misc_feature (1)..(113): Homolog of NCBI NO: 24662461 NR Description: CG6302-PA [Drosophila melanogaster]
  misc_feature (1)..(90): Homolog of NCBI NO: 39595088 NR Description: Hypothetical protein CBG03668 [Caenorhabditis
MNQLYTKITELEMEVSEHSLVIGAIEPLDPSRRCYRMIGGVLVERTIKEVLPAVKRNKEGLEEVIARMHEALERKKKEITEFELKYKIRIRKADNDAEDEGGKKEGTAQGVLVGPAGQ

SEQ ID NO: 6751 - DNA, 1864 bp, Zea mays subsp. mays
  misc_feature (1)..(1864): Ceres Seq. ID no. 12407713
  misc_feature: MA Experiment ID: 108504 Result: Down-regulated in Transcription
  misc_feature: MA Experiment 108504 PARAMETER Experiment Name: Zm_Drought_P Parameter: Age (day) Value: 8
  misc_feature: MA Experiment 108504 PARAMETER Experiment Name: Zm_Drought_P Parameter: Organism Value: Zea mays
  misc_feature: MA Experiment 108504 PARAMETER Experiment Name: Zm_Drought_P Parameter: Plant Line Value: 35A19
  misc_feature: MA Experiment 108504 PARAMETER Experiment Name: Zm_Drought_P Parameter: Timepoint (hr) Value: 12
  misc_feature: MA Experiment 108504 PARAMETER Experiment Name: Zm_Drought_P Parameter: Tissue Value: Aerial
  misc_feature: MA Experiment 108504 PARAMETER Experiment Name: Zm_Drought_P Parameter: Treatment Value: Drought vs. No Drought
  misc_feature: MA Experiment ID: 108523 Result: Down-regulated in Transcription
  misc_feature: MA Experiment 108523 PARAMETER Experiment Name: Zm_42deg_Heat_P Parameter: Age (day) Value: 8
  misc_feature: MA Experiment 108523 PARAMETER Experiment Name: Zm_42deg_Heat_P Parameter: Organism Value: Zea mays
  misc_feature: MA Experiment 108523 PARAMETER Experiment Name: Zm_42deg_Heat_P Parameter: Plant Line Value: 35A19
  misc_feature: MA Experiment 108523 PARAMETER Experiment Name: Zm_42deg_Heat_P Parameter: Temperature (deg C) Value: 42 vs. 22
  misc_feature: MA Experiment 108523 PARAMETER Experiment Name: Zm_42deg_Heat_P Parameter: Timepoint (hr) Value: 6
  misc_feature: MA Experiment 108523 PARAMETER Experiment Name: Zm_42deg_Heat_P Parameter: Tissue Value: Aerial
  misc_feature: MA Experiment ID: 108527 Result: Down-regulated in Transcription
  misc_feature: MA Experiment 108527 PARAMETER Experiment Name: Zm_5mM_NO_P Parameter: Age (day) Value: 8
  misc_feature: MA Experiment 108527 PARAMETER Experiment Name: Zm_5mM_NO_P Parameter: Organism Value: Zea mays
  misc_feature: MA Experiment 108527 PARAMETER Experiment Name: Zm_5mM_NO_P Parameter: Plant Line Value: 35A19
  misc_feature: MA Experiment 108527 PARAMETER Experiment Name: Zm_5mM_NO_P Parameter: Timepoint (hr) Value: 6
  misc_feature: MA Experiment 108527 PARAMETER Experiment Name: Zm_5mM_NO_P Parameter: Tissue Value: Aerial
  misc_feature: MA Experiment 108527 PARAMETER Experiment Name: Zm_5mM_NO_P Parameter: Treatment Value: 5mM NO vs. No Treatment
  misc_feature: MA Experiment ID: 108528 Result: Up-regulated in Transcription
  misc_feature: MA Experiment 108528 PARAMETER Experiment Name: Zm_Imbibed_Seeds_P Parameter: Age (day) Value: 5 vs. 2
  misc_feature: MA Experiment 108528 PARAMETER Experiment Name: Zm_Imbibed_Seeds_P Parameter: Organism Value: Zea mays
  misc_feature: MA Experiment 108528 PARAMETER Experiment Name: Zm_Imbibed_Seeds_P Parameter: Plant Line Value: 35A19
  misc_feature: MA Experiment 108528 PARAMETER Experiment Name: Zm_Imbibed_Seeds_P Parameter: Tissue Value: Aerial vs. Embryo
  misc_feature: MA Experiment ID: 108530 Result: Up-regulated in Transcription
  misc_feature: MA Experiment 108530 PARAMETER Experiment Name: Zm_Imbibed_Seeds_P Parameter: Age (day) Value: 6 vs. 2
  misc_feature: MA Experiment 108530 PARAMETER Experiment Name: Zm_Imbibed_Seeds_P Parameter: Organism Value: Zea mays
  misc_feature: MA Experiment 108530 PARAMETER Experiment Name: Zm_Imbibed_Seeds_P Parameter: Plant Line Value: 35A19
  misc_feature: MA Experiment 108530 PARAMETER Experiment Name: Zm_Imbibed_Seeds_P Parameter: Tissue Value: Aerial vs. Embryo
  misc_feature: MA Experiment ID: 108534 Result: Down-regulated in Transcription
  misc_feature: MA Experiment 108534 PARAMETER Experiment Name: Zm_4deg_Cold_P Parameter: Age (hr) Value: 8
  misc_feature: MA Experiment 108534 PARAMETER Experiment Name: Zm_4deg_Cold_P Parameter: Organism Value: Zea mays
  misc_feature: MA Experiment 108534 PARAMETER Experiment Name: Zm_4deg_Cold_P Parameter: Plant Line Value: 35A19
  misc_feature: MA Experiment 108534 PARAMETER Experiment Name: Zm_4deg_Cold_P Parameter: Temperature (deg C) Value: 4 vs. 22
  misc_feature: MA Experiment 108534 PARAMETER Experiment Name: Zm_4deg_Cold_P Parameter: Timepoint (hr) Value: 6
  misc_feature: MA Experiment 108534 PARAMETER Experiment Name: Zm_4deg_Cold_P Parameter: Tissue Value: Aerial
  misc_feature: MA Experiment ID: 108535 Result: Down-regulated in Transcription
  misc_feature: MA Experiment 108535 PARAMETER Experiment Name: Zm_Meristem_P Parameter: Age (day) Value: 8
  misc_feature: MA Experiment 108535 PARAMETER Experiment Name: Zm_Meristem_P Parameter: Organism Value: Zea mays
  misc_feature: MA Experiment 108535 PARAMETER Experiment Name: Zm_Meristem_P Parameter: Plant Line Value: 35A19
  misc_feature: MA Experiment 108535 PARAMETER Experiment Name: Zm_Meristem_P Parameter: Tissue Value: Root Meristem vs. Above Root Meristem
  misc_feature: MA Experiment ID: 108536 Result: Down-regulated in Transcription
  misc_feature: MA Experiment 108536 PARAMETER Experiment Name: Zm_Meristem_P Parameter: Age (day) Value: 8
  misc_feature: MA Experiment 108536 PARAMETER Experiment Name: Zm_Meristem_P Parameter: Organism Value: Zea mays
  misc_feature: MA Experiment 108536 PARAMETER Experiment Name: Zm_Meristem_P Parameter: Plant Line Value: 35A19
  misc_feature: MA Experiment 108536 PARAMETER Experiment Name: Zm_Meristem_P Parameter: Tissue Value: Shoot Meristem vs. Above Shoot Meristem
  misc_feature: MA Experiment ID: 108545 Result: Up-regulated in Transcription
  misc_feature: MA Experiment 108545 PARAMETER Experiment Name: Zm_Imbibed_Seeds_P Parameter: Age (day) Value: 3 vs. 2
  misc_feature: MA Experiment 108545 PARAMETER Experiment Name: Zm_Imbibed_Seeds_P Parameter: Organism Value: Zea mays
  misc_feature: MA Experiment 108545 PARAMETER Experiment Name: Zm_Imbibed_Seeds_P Parameter: Plant Line Value: 35A19
  misc_feature: MA Experiment 108545 PARAMETER Experiment Name: Zm_Imbibed_Seeds_P Parameter: Tissue Value: Aerial vs. Embryo
  misc_feature: MA Experiment ID: 108546 Result: Down-regulated in Transcription
  misc_feature: MA Experiment 108546 PARAMETER Experiment Name: Zm_Imbibed_Seeds_P Parameter: Age (day) Value: 3 vs. 2
  misc_feature: MA Experiment 108546 PARAMETER Experiment Name: Zm_Imbibed_Seeds_P Parameter: Organism Value: Zea mays
  misc_feature: MA Experiment 108546 PARAMETER Experiment Name: Zm_Imbibed_Seeds_P Parameter: Plant Line Value: 35A19
  misc_feature: MA Experiment 108546 PARAMETER Experiment Name: Zm_Imbibed_Seeds_P Parameter: Tissue Value: Roots vs. Embryo
  misc_feature: MA Experiment ID: 108556 Result: Down-regulated in Transcription
  misc_feature: MA Experiment 108556 PARAMETER Experiment Name: Zm_Drought_P Parameter: Age (day) Value: 9
  misc_feature: MA Experiment 108556 PARAMETER Experiment Name: Zm_Drought_P Parameter: Organism Value: Zea mays
  misc_feature: MA Experiment 108556 PARAMETER Experiment Name: Zm_Drought_P Parameter: Plant Line Value: 35A19
  misc_feature: MA Experiment 108556 PARAMETER Experiment Name: Zm_Drought_P Parameter: Timepoint (hr) Value: 24
  misc_feature: MA Experiment 108556 PARAMETER Experiment Name: Zm_Drought_P Parameter: Tissue Value: Aerial
  misc_feature: MA Experiment 108556 PARAMETER Experiment Name: Zm_Drought_P Parameter: Treatment Value: Drought vs. No Drought
  misc_feature: MA Experiment ID: 108597 Result: Down-regulated in Transcription
  misc_feature: MA Experiment 108597 PARAMETER Experiment Name: Zm_100uM_ABA_P Parameter: Age (day) Value: 9
  misc_feature: MA Experiment 108597 PARAMETER Experiment Name: Zm_100uM_ABA_P Parameter: Organism Value: Zea mays
  misc_feature: MA Experiment 108597 PARAMETER Experiment Name: Zm_100uM_ABA_P Parameter: Plant Line Value: 35A19
  misc_feature: MA Experiment 108597 PARAMETER Experiment Name: Zm_100uM_ABA_P Parameter: Timepoint (hr) Value: 24
  misc_feature: MA Experiment 108597 PARAMETER Experiment Name: Zm_100uM_ABA_P Parameter: Tissue Value: Aerial
  misc_feature: MA Experiment 108597 PARAMETER Experiment Name: Zm_100uM_ABA_P Parameter: Treatment Value: 100uM ABA vs. No Treatment
  misc_feature: MA Experiment ID: 108689 Result: Up-regulated in Transcription
  misc_feature: MA Experiment 108689 PARAMETER Experiment Name: Zm_Drought_Roots_P Parameter: Age (day) Value: 9
  misc_feature: MA Experiment 108689 PARAMETER Experiment Name: Zm_Drought_Roots_P Parameter: Organism Value: Zea mays
  misc_feature: MA Experiment 108689 PARAMETER Experiment Name: Zm_Drought_Roots_P Parameter: Plant Line Value: 35A19
  misc_feature: MA Experiment 108689 PARAMETER Experiment Name: Zm_Drought_Roots_P Parameter: Timepoint (hr) Value: 24
  misc_feature: MA Experiment 108689 PARAMETER Experiment Name: Zm_Drought_Roots_P Parameter: Tissue Value: Roots
  misc_feature: MA Experiment 108689 PARAMETER Experiment Name: Zm_Drought_Roots_P Parameter: Treatment Value: Drought vs. No Drought
  misc_feature: MA Experiment ID: 20000477 Result: Down-regulated in Transcription
  misc_feature: MA Experiment 20000477 PARAMETER Experiment Name: Zm_5mM_SA_P Parameter: Age (day) Value: 10
  misc_feature: MA Experiment 20000477 PARAMETER Experiment Name: Zm_5mM_SA_P Parameter: Organism Value: Zea mays
  misc_feature: MA Experiment 20000477 PARAMETER Experiment Name: Zm_5mM_SA_P Parameter: Plant Line Value: 35A19
  misc_feature: MA Experiment 20000477 PARAMETER Experiment Name: Zm_5mM_SA_P Parameter: Timepoint (hr) Value: 48
  misc_feature: MA Experiment 20000477 PARAMETER Experiment Name: Zm_5mM_SA_P Parameter: Tissue Value: Aerial
  misc_feature: MA Experiment 20000477 PARAMETER Experiment Name: Zm_5mM_SA_P Parameter: Treatment Value: 5mM SA vs. No Treatment
  misc_feature: MA Experiment ID: 20000478 Result: Down-regulated in Transcription
  misc_feature: MA Experiment 20000478 PARAMETER Experiment Name: Zm_5mM_SA_P Parameter: Age (day) Value: 11
  misc_feature: MA Experiment 20000478 PARAMETER Experiment Name: Zm_5mM_SA_P Parameter: Organism Value: Zea mays
  misc_feature: MA Experiment 20000478 PARAMETER Experiment Name: Zm_5mM_SA_P Parameter: Plant Line Value: 35A19
  misc_feature: MA Experiment 20000478 PARAMETER Experiment Name: Zm_5mM_SA_P Parameter: Timepoint (hr) Value: 72
  misc_feature: MA Experiment 20000478 PARAMETER Experiment Name: Zm_5mM_SA_P Parameter: Tissue Value: Aerial
  misc_feature: MA Experiment 20000478 PARAMETER Experiment Name: Zm_5mM_SA_P Parameter: Treatment Value: 5mM SA vs. No Treatment
  misc_feature: MA Experiment ID: 20000479 Result: Down-regulated in Transcription
  misc_feature: MA Experiment 20000479 PARAMETER Experiment Name: Zm_Drought_P Parameter: Age (day) Value: 10
  misc_feature: MA Experiment 20000479 PARAMETER Experiment Name: Zm_Drought_P Parameter: Organism Value: Zea mays
  misc_feature: MA Experiment 20000479 PARAMETER Experiment Name: Zm_Drought_P Parameter: Plant Line Value: 35A19
  misc_feature: MA Experiment 20000479 PARAMETER Experiment Name: Zm_Drought_P Parameter: Timepoint (hr) Value: 48
  misc_feature: MA Experiment 20000479 PARAMETER Experiment Name: Zm_Drought_P Parameter: Tissue Value: Aerial
  misc_feature: MA Experiment 20000479 PARAMETER Experiment Name: Zm_Drought_P Parameter: Treatment Value: Drought vs. No Drought
  misc_feature: MA Experiment ID: 20000480 Result: Down-regulated in Transcription
  misc_feature: MA Experiment 20000480 PARAMETER Experiment Name: Zm_Drought_P Parameter: Age (day) Value: 11
  misc_feature: MA Experiment 20000480 PARAMETER Experiment Name: Zm_Drought_P Parameter: Organism Value: Zea mays
  misc_feature: MA Experiment 20000480 PARAMETER Experiment Name: Zm_Drought_P Parameter: Plant Line Value: 35A19
  misc_feature: MA Experiment 20000480 PARAMETER Experiment Name: Zm_Drought_P Parameter: Timepoint (hr) Value: 72
  misc_feature: MA Experiment 20000480 PARAMETER Experiment Name: Zm_Drought_P Parameter: Tissue Value: Aerial
  misc_feature: MA Experiment 20000480 PARAMETER Experiment Name: Zm_Drought_P Parameter: Treatment Value: Drought vs. No Drought
  misc_feature: MA Experiment ID: 20000488 Result: Down-regulated in Transcription
  misc_feature: MA Experiment 20000488 PARAMETER Experiment Name: Zm_50mM_NH4NO3_L_to_H_P Parameter: Organism Value: Zea mays
  misc_feature: MA Experiment 20000488 PARAMETER Experiment Name: Zm_50mM_NH4NO3_L_to_H_P Parameter: Timepoint (hr) Value: 8
  misc_feature: MA Experiment 20000488 PARAMETER Experiment Name: Zm_50mM_NH4NO3_L_to_H_P Parameter: Tissue Value: Leaves
  misc_feature: MA Experiment 20000488 PARAMETER Experiment Name: Zm_50mM_NH4NO3_L_to_H_P Parameter: Treatment Value: 50mM NH4NO3 vs. 100mM Mannitol
  misc_feature: MA Experiment ID: 20000626 Result: Down-regulated in Transcription
  misc_feature: MA Experiment 20000626 PARAMETER Experiment Name: Zm_Herbicide-Treatments_P Parameter: Timepoint (hr) Value: 12
  misc_feature: MA Experiment 20000626 PARAMETER Experiment Name: Zm_Herbicide-Treatments_P Parameter: Tissue Value: Aerial
  misc_feature: MA Experiment 20000626 PARAMETER Experiment Name: Zm_Herbicide-Treatments_P Parameter: Treatment Value: Roundup vs. No Treatment
atcgtcattgcttgctccatgtggagtcactttattactgcattacactagctagctagctagccacagccagcttcatcttcacgtcgattcgatccatcggtgctgtgtgtaccgtacgccagcttgctgatccatcgccggccgacgatggaggtgagcacgtgggtgatgctggtggcggccgccgccgcggtacatggcgtggttctggcggctgtcgcgggggctcagcgggccgcgggtgtggccggtgctcggcagcctgccggggctggtgcagcacgccgaggacatgcacgagtggatcgtgggcaacctgcgccgcacgggaggcacctaccagacctgcatcttcgcggtgcccggggtggctcgccgcgggcgggctggtcacggtcacgtgcgaccctcgcaacctggagcacgtcctcaaggcgcgcttcgacaactaccccaagggccccttctggcacgccgtcttccgggacctgctcggcgacggcatcttcaactccgacggcgacacgtgggtggcgcagcgcaagacggccgcgctcgagttcaccacgcgcacgctacgcacggccatgtcccgctgggtgtcgcgctccatccacctcaggctgctgcccatcctggacgaggcggccaccgagaagacgcacgtcgacctccaggacctcctcctccgcctcaccttcgacaacatctgcggcctcgcgttcggcaaggaccccgagacgctcgcgccgggcctgccggagaacgcattcgccacggcgttcgaccgcgccacggaggcgacgctcaaccggttcatattccccgagtgcctgtggcggtgcaagaagtggctgggcctcggcatggagagcacgctggccccgcagcgtcgcgcacgtggaccagtacctcgccgccgtcatcaaggcgcgcaagcttgagctcgccggcaacggcaagtgcgacgcgccggcgcacgacgacctgctgtctcggttcatgcgcaagggctcctattcggacgagtcgctgcagcacgtggcgctcaacttcatcctcgccggccgcgacacctcctccgtggcgctctcctggttcttctggctcgtgtccacgcacccggacgtggagcgccagatcgtactcgagctgtgcgccgcgctcgccgcgtcccgcggctcccacgacccggcattgtggctggcgtcgccactcacgttcgaggagctggaccgcctggtctacctcaaggcggcgctctcggagaccctgcgcctgtacccgtccgttcccgaggactccaagcacgtcgtggccgacgactacctccccgacggcacgttcgtccccggcggggtcgtcggtgacctactccatctactcggccgggcgcatgaagacggtgtggggggaggactgcctcgagttccgccccgagcggtggttgtccgccgacggcacccggttcgagccgcacgactcgtaccggttcgtggcgttcaacgccgggccgaggatctgcctcggtaaggacctcgcgtacctgcagatgaagaacatcgccggcagcgtgctcctgcgccaccgcctggccgtcgcgcggggccaccgcgtggagcagaagatgtcgctgacgctgttcatgaagcacgggctccggatggaggtgcacccgcgcgacctggccccggtcatcgatgagctccgtggcgcgggcgcggcaaggccggccatggcgccatgctgcgcgtagaagatcccccctccgtgctgcgggggagacgctgggaattcaatgtgtagataagcgtacaagtacaagacaggagtaaagtaaaaattaaatgggtttggtgag

SEQ ID NO: 6752 - protein, 519 aa, Zea mays subsp. mays
  peptide (1)..(519): Ceres Seq. ID no. 12407714
  misc_feature (11)..(62): Pfam Name: Cytochrome P450 Pfam Description: Cytochrome P450
  misc_feature (364)..(519): Homolog of NCBI NO: 10442763 NR Description: cytochrome P450 [Triticum aestivum]
  misc_feature (1)..(62): Homolog of NCBI NO: 10442763 NR Description: cytochrome P450 [Triticum aestivum]
  misc_feature (364)..(517): Homolog of NCBI NO: 38345840 NR Description: OSJNBa0084K11.4 [Oryza sativa (japonica
  misc_feature (364)..(504): Homolog of NCBI NO: 15236789 NR Description: cytochrome p450, putative; protein id: supported by cDNA: gi_18650606 [Arabidopsis thaliana]
  misc_feature (1)..(61): Homolog of NCBI NO: 15236789 NR Description: cytochrome p450, putative; protein id: supported by cDNA: gi_18650606 [Arabidopsis thaliana]
  misc_feature (364)..(504): Homolog of NCBI NO: 18650607 NR Description: AT4g00360/A_IG005I10_21 [Arabidopsis thaliana]
  misc_feature (1)..(61): Homolog of NCBI NO: 18650607 NR Description: AT4g00360/A_IG005I10_21 [Arabidopsis thaliana]
  misc_feature (364)..(504): Homolog of NCBI NO: 15223436 NR Description: cytochrome P450, putative; protein id: [Arabidopsis thaliana] >gi|25282633|pir||G86146 hypothetical
  misc_feature (1)..(61): Homolog of NCBI NO: 15223436 NR Description: cytochrome P450, putative; protein id: [Arabidopsis thaliana] >gi|25282633|pir||G86146 hypothetical
  misc_feature (364)..(504): Homolog of NCBI NO: 26449891 NR Description: unknown protein [Arabidopsis thaliana]
MAWFWRLSRGLSGPRVWPVLGSLPGLVQHAEDMHEWIVGNLRRTGGTYQTCIFAVPGVARRGRAGHGHVRPSQPGARPQGALRQLPQGPLLARRLPGPARRRHLQLRRRHVGGAAQDGRARVHHAHATHGHVPLGVALHPPQAAAHPGRGGHREDARRPPGPPPPPHLRQHLRPRVRQGPRDARAGPAGERIRHGVRPRHGGDAQPVHIPRVPVAVQEVAGPRHGEHAGPAASRTWTSTSPPSSRRASLSSPATASATRRRTTTCCLGSCARAPIRTSRCSTWRSTSSSPAATPPPWRSPGSSGSCPRTRTWSARSYSSCAPRSPRPAAPTTRHCGWRRHSRSRSWTAWSTSRRRSRRPCACTRPFPRTPSTSWPTTTSPTARSSPAGSSVTYSIYSAGRMKTVWGEDCLEFRPERWLSADGTRFEPHDSYRFVAFNAGPRICLGKDLAYLQMKNIAGSVLLRHRLAVARGHRVEQKMSLTLFMKHGLRMEVHPRDLAPVIDELRGAGAARPAMAPCCA

SEQ ID NO: 6753 - protein, 487 aa, Zea mays subsp. mays
  peptide (1)..(487): Ceres Seq. ID no. 12407715
  misc_feature (332)..(460): Pfam Name: Cytochrome P450 Pfam Description: Cytochrome P450
  misc_feature (332)..(487): Homolog of NCBI NO: 10442763 NR Description: cytochrome P450 [Triticum aestivum]
  misc_feature (1)..(30): Homolog of NCBI NO: 10442763 NR Description: cytochrome P450 [Triticum aestivum]
  misc_feature (332)..(485): Homolog of NCBI NO: 38345840 NR Description: OSJNBa0084K11.4 [Oryza sativa (japonica
  misc_feature (332)..(472): Homolog of NCBI NO: 15236789 NR Description: cytochrome p450, putative; protein id: supported by cDNA: gi_18650606 [Arabidopsis thaliana]
  misc_feature (1)..(29): Homolog of NCBI NO: 15236789 NR Description: cytochrome p450, putative; protein id: supported by cDNA: gi_18650606 [Arabidopsis thaliana]
  misc_feature (332)..(472): Homolog of NCBI NO: 18650607 NR Description: AT4g00360/A_IG005I10_21 [Arabidopsis thaliana]
  misc_feature (1)..(29): Homolog of NCBI NO: 18650607 NR Description: AT4g00360/A_IG005I10_21 [Arabidopsis thaliana]
  misc_feature (332)..(472): Homolog of NCBI NO: 15223436 NR Description: cytochrome P450, putative; protein id: [Arabidopsis thaliana] >gi|25282633|pir||G86146 hypothetical
  misc_feature (1)..(29): Homolog of NCBI NO: 15223436 NR Description: cytochrome P450, putative; protein id: [Arabidopsis thaliana] >gi|25282633|pir||G86146 hypothetical
  misc_feature (332)..(472): Homolog of NCBI NO: 26449891 NR Description: unknown protein [Arabidopsis thaliana]
MHEWIVGNLRRTGGTYQTCIFAVPGVARRGRAGHGHVRPSQPGARPQGALRQLPQGPLLARRLPGPARRRHLQLRRRHVGGAAQDGRARVHHAHATHGHVPLGVALHPPQAAAHPGRGGHREDARRPPGPPPPPHLRQHLRPRVRQGPRDARAGPAGERIRHGVRPRHGGDAQPVHIPRVPVAVQEVAGPRHGEHAGPAASRTWTSTSPPSSRRASLSSPATASATRRRTTTCCLGSCARAPIRTSRCSTWRSTSSSPAATPPPWRSPGSSGSCPRTRTWSARSYSSCAPRSPRPAAPTTRHCGWRRHSRSRSWTAWSTSRRRSRRPCACTRPFPRTPSTSWPTTTSPTARSSPAGSSVTYSIYSAGRMKTVWGEDCLEFRPERWLSADGTRFEPHDSYRFVAFNAGPRICLGKDLAYLQMKNIAGSVLLRHRLAVARGHRVEQKMSLTLFMKHGLRMEVHPRDLAPVIDELRGAGAARPAMAPCCA

SEQ ID NO: 6754 - protein, 461 aa, Zea mays subsp. mays
  peptide (1)..(461): Ceres Seq. ID no. 12407716
  misc_feature (248)..(404): Pfam Name: Cytochrome P450 Pfam Description: Cytochrome P450
  misc_feature (248)..(404): Homolog of NCBI NO: 10442763 NR Description: cytochrome P450 [Triticum aestivum]
  misc_feature (247)..(404): Homolog of NCBI NO: 38345840 NR Description: OSJNBa0084K11.4 [Oryza sativa (japonica
  misc_feature (247)..(404): Homolog of NCBI NO: 15236789 NR Description: cytochrome p450, putative; protein id: supported by cDNA: gi_18650606 [Arabidopsis thaliana]
  misc_feature (247)..(404): Homolog of NCBI NO: 18650607 NR Description: AT4g00360/A_IG005I10_21 [Arabidopsis thaliana]
  misc_feature (247)..(404): Homolog of NCBI NO: 15223436 NR Description: cytochrome P450, putative; protein id: [Arabidopsis thaliana] >gi|25282633|pir||G86146 hypothetical
  misc_feature (247)..(404): Homolog of NCBI NO: 26449891 NR Description: unknown protein [Arabidopsis thaliana]
  misc_feature (247)..(404): Homolog of NCBI NO: 15225914 NR Description: cytochrome P450, putative; protein id: supported by cDNA: gi_17473519 [Arabidopsis thaliana]
  misc_feature (247)..(404): Homolog of NCBI NO: 15222515 NR Description: cytochrome P450, putative; protein id: supported by cDNA: 37538. [Arabidopsis thaliana]
  misc_feature (247)..(404): Homolog of NCBI NO: 21593258 NR Description: putative cytochrome P450 [Arabidopsis thaliana]
  misc_feature (247)..(415): Homolog of NCBI NO: 15237768 NR Description: cytochrome p450 family; protein id: At5g58860.1, by cDNA: gi_19698838 [Arabidopsis thaliana]
MEVSTWVMLVAAAAAVHGVVLAAVAGAQRAAGVAGARQPAGAGAARRGHARVDRGQPAPHGRHLPDLHLRGARGGSPRAGWSRSRATLATWSTSSRRASTTTPRAPSGTPSSGTCSATASSTPTATRGWRSARRPRSSSPRARYARPCPAGCRAPSTSGCCPSWTRRPPRRRTSTSRTSSSASPSTTSAASRSARTPRRSRRACRRTHSPRRSTAPRRRRSTGSYSPSACGGARSGWASAWRARWPRSVAHVDQYLAAVIKARKLELAGNGKCDAPAHDDLLSRFMRKGSYSDESLQHVALNFILAGRDTSSVALSWFFWLVSTHPDVERQIVLELCAALAASRGSHDPALWLASPLTFEELDRLVYLKAALSETLRLYPSVPEDSKHVVADDYLPDGTFVPGGVVGDLLHLLGRAHEDGVGGGLPRVPPRAVVVRRRHPVRAARLVPVRGVQRRAEDLPR

SEQ ID NO: 6755 - DNA, 1234 bp, Zea mays subsp. mays
  misc_feature (1)..(1234): Ceres Seq. ID no. 12340896
  misc_feature: MA Experiment ID: 108535 Result: Up-regulated in Transcription
  misc_feature: MA Experiment 108535 PARAMETER Experiment Name: Zm_Meristem_P Parameter: Age (day) Value: 8
  misc_feature: MA Experiment 108535 PARAMETER Experiment Name: Zm_Meristem_P Parameter: Organism Value: Zea mays
  misc_feature: MA Experiment 108535 PARAMETER Experiment Name: Zm_Meristem_P Parameter: Plant Line Value: 35A19
  misc_feature: MA Experiment 108535 PARAMETER Experiment Name: Zm_Meristem_P Parameter: Tissue Value: Root Meristem vs. Above Root Meristem
  misc_feature: MA Experiment ID: 108540 Result: Up-regulated in Transcription
  misc_feature: MA Experiment 108540 PARAMETER Experiment Name: Zm_20percent_PEG_P Parameter: Age (day) Value: 8
  misc_feature: MA Experiment 108540 PARAMETER Experiment Name: Zm_20percent_PEG_P Parameter: Organism Value: Zea mays
  misc_feature: MA Experiment 108540 PARAMETER Experiment Name: Zm_20percent_PEG_P Parameter: Plant Line Value: 35A19
  misc_feature: MA Experiment 108540 PARAMETER Experiment Name: Zm_20percent_PEG_P Parameter: Timepoint (hr) Value: 6
  misc_feature: MA Experiment 108540 PARAMETER Experiment Name: Zm_20percent_PEG_P Parameter: Tissue Value: Aerial
  misc_feature: MA Experiment 108540 PARAMETER Experiment Name: Zm_20percent_PEG_P Parameter: Treatment Value: 20percent PEG vs. No Treatment
accgcttccggttccggatccgaatctcgccctcccctctctttcttgcctccaggtccggccgtccgggcggcgccgggaggagagaatggcctccacggcgtcgccgccggtgttcgagagggtggccgggatccgagccattgccgagtccggccgcttcaaggcatggttgctggaccagtttggcgttcttcatgacgggaagaagccgtaccccggcgccattctggcattggagaagctagcggagaatggggcaaagatggtgataatcagcaattcctctaggcggtcatctgtgacaatgaagaagctcaagagcctggggttcgacacgtcctgtttcctcgcgaccatcaccagtggggagctcacacatcagcaccttcagaagagagacgacccatggtttgctgctcttggaaggaagtgtatccatatcacttgggacgatcgaggggcaatttctctcgagggccttggtttgcaagttgtgaacaatgttgatgatgcagagttcatattagcccacggtactgaagctcttggctcaccttctggtgttcctcttcccaaaagtcttgaggagcttgagcaggttctaatgcttggcatagaaaagcgacttccaatggtggtagctaatccagattatgtcactgtcgaagctcgagatctccgtgtcatgcctggcactctggcagctaaatatgagagtcttggtggtgaagtgaaatggatggggaagcctgataaggtgatctatacatcagcgatgtccctagcgggcgttgatgcccgtgaatgtatcatggtgggtgattcgctgcaccacgacatcaaaggagccaatgcgtcagggatggcatccgcgttcgtcactggaggggtccatgcggacgaacttggactcggtgaatttggagaaactgctggggaggatgctgtcagttcgctgtgcagcaagcacggatcgtacccttcttatgttctgccttcattcgcgtggtagagatgcggcctagattttttttttttgttttaggtgcacgggaaagtgattttaggcagatattgttgttatggaaataagtgccacgcaatgatcaagccgctggaggtgtcattcttcttaataaataataagtgacacgcaatgctcaagccgctggaggcagatttgtatttgcatttgtagtgtgtgtgtgtctatatatgctgcctgtggtgt

SEQ ID NO: 6756 - protein, 337 aa, Zea mays subsp. mays
  peptide (1)..(337): Ceres Seq. ID no. 12340897
  misc_feature (54)..(297): Pfam Name: haloacid dehalogenase-like hydrolase Pfam Description: haloacid dehalogenase-like hydrolase
  misc_feature (44)..(337): Homolog of NCBI NO: 19310550 NR Description: unknown protein [Arabidopsis thaliana]
  misc_feature (103)..(335): Homolog of NCBI NO: 15238168 NR Description: putative protein; protein id: At5g10460.1
  misc_feature (41)..(337): Homolog of NCBI NO: 23014406 NR Description: hypothetical protein [Magnetospirillum
  misc_feature (30)..(337): Homolog of NCBI NO: 22968911 NR Description: hypothetical protein [Rhodospirillum rubrum]
  misc_feature (35)..(301): Homolog of NCBI NO: 13473111 NR Description: hypothetical protein [Mesorhizobium loti]
  misc_feature (38)..(298): Homolog of NCBI NO: 15965982 NR Description: CONSERVED HYPOTHETICAL PROTEIN [Sinorhizobium >gi|15075252|emb|CAC46808.1| CONSERVED HYPOTHETICAL PROTEIN
  misc_feature (42)..(302): Homolog of NCBI NO: 36958658 NR Description: HAD superfamily protein involved in
  misc_feature (152)..(336): Homolog of NCBI NO: 15964548 NR Description: CONSERVED HYPOTHETICAL PROTEIN [Sinorhizobium >gi|15073726|emb|CAC45367.1| CONSERVED HYPOTHETICAL PROTEIN
  misc_feature (41)..(179): Homolog of NCBI NO: 15964548 NR Description: CONSERVED HYPOTHETICAL PROTEIN [Sinorhizobium >gi|15073726|emb|CAC45367.1| CONSERVED HYPOTHETICAL PROTEIN
  misc_feature (58)..(307): Homolog of NCBI NO: 27382589 NR Description: blr7478 [Bradyrhizobium japonicum]
PLPVPDPNLALPSLSCLQVRPSGRRREERMASTASPPVFERVAGIRAIAESGRFKAWLLDQFGVLHDGKKPYPGAILALEKLAENGAKMVIISNSSRRSSVTMKKLKSLGFDTSCFLATITSGELTHQHLQKRDDPWFAALGRKCIHITWDDRGAISLEGLGLQVVNNVDDAEFILAHGTEALGSPSGVPLPKSLEELEQVLMLGIEKRLPMVVANPDYVTVEARDLRVMPGTLAAKYESLGGEVKWMGKPDKVIYTSAMSLAGVDARECIMVGDSLHHDIKGANASGMASAFVTGGVHADELGLGEFGETAGEDAVSSLCSKHGSYPSYVLPSFAW

SEQ ID NO: 6757 - protein, 308 aa, Zea mays subsp. mays
  peptide (1)..(308): Ceres Seq. ID no. 12340898
  misc_feature (25)..(268): Pfam Name: haloacid dehalogenase-like hydrolase Pfam Description: haloacid dehalogenase-like hydrolase
  misc_feature (15)..(308): Homolog of NCBI NO: 19310550 NR Description: unknown protein [Arabidopsis thaliana]
  misc_feature (74)..(306): Homolog of NCBI NO: 15238168 NR Description: putative protein; protein id: At5g10460.1
  misc_feature (12)..(308): Homolog of NCBI NO: 23014406 NR Description: hypothetical protein [Magnetospirillum
  misc_feature (1)..(308): Homolog of NCBI NO: 22968911 NR Description: hypothetical protein [Rhodospirillum rubrum]
  misc_feature (6)..(272): Homolog of NCBI NO: 13473111 NR Description: hypothetical protein [Mesorhizobium loti]
  misc_feature (9)..(269): Homolog of NCBI NO: 15965982 NR Description: CONSERVED HYPOTHETICAL PROTEIN [Sinorhizobium >gi|15075252|emb|CAC46808.1| CONSERVED HYPOTHETICAL PROTEIN
  misc_feature (13)..(273): Homolog of NCBI NO: 36958658 NR Description: HAD superfamily protein involved in
  misc_feature (123)..(307): Homolog of NCBI NO: 15964548 NR Description: CONSERVED HYPOTHETICAL PROTEIN [Sinorhizobium >gi|15073726|emb|CAC45367.1| CONSERVED HYPOTHETICAL PROTEIN
  misc_feature (12)..(150): Homolog of NCBI NO: 15964548 NR Description: CONSERVED HYPOTHETICAL PROTEIN [Sinorhizobium >gi|15073726|emb|CAC45367.1| CONSERVED HYPOTHETICAL PROTEIN
  misc_feature (29)..(278): Homolog of NCBI NO: 27382589 NR Description: blr7478 [Bradyrhizobium japonicum]
MASTASPPVFERVAGIRAIAESGRFKAWLLDQFGVLHDGKKPYPGAILALEKLAENGAKMVIISNSSRRSSVTMKKLKSLGFDTSCFLATITSGELTHQHLQKRDDPWFAALGRKCIHITWDDRGAISLEGLGLQVVNNVDDAEFILAHGTEALGSPSGVPLPKSLEELEQVLMLGIEKRLPMVVANPDYVTVEARDLRVMPGTLAAKYESLGGEVKWMGKPDKVIYTSAMSLAGVDARECIMVGDSLHHDIKGANASGMASAFVTGGVHADELGLGEFGETAGEDAVSSLCSKHGSYPSYVLPSFAW

SEQ ID NO: 6758 - protein, 249 aa, Zea mays subsp. mays
  peptide (1)..(249): Ceres Seq. ID no. 12340899
  misc_feature (1)..(209): Pfam Name: haloacid dehalogenase-like hydrolase Pfam Description: haloacid dehalogenase-like hydrolase
  misc_feature (1)..(249): Homolog of NCBI NO: 19310550 NR Description: unknown protein [Arabidopsis thaliana]
  misc_feature (15)..(247): Homolog of NCBI NO: 15238168 NR Description: putative protein; protein id: At5g10460.1
  misc_feature (1)..(249): Homolog of NCBI NO: 23014406 NR Description: hypothetical protein [Magnetospirillum
  misc_feature (1)..(249): Homolog of NCBI NO: 22968911 NR Description: hypothetical protein [Rhodospirillum rubrum]
  misc_feature (1)..(213): Homolog of NCBI NO: 13473111 NR Description: hypothetical protein [Mesorhizobium loti]
  misc_feature (1)..(210): Homolog of NCBI NO: 15965982 NR Description: CONSERVED HYPOTHETICAL PROTEIN [Sinorhizobium >gi|15075252|emb|CAC46808.1| CONSERVED HYPOTHETICAL PROTEIN
  misc_feature (1)..(214): Homolog of NCBI NO: 36958658 NR Description: HAD superfamily protein involved in
  misc_feature (64)..(248): Homolog of NCBI NO: 15964548 NR Description: CONSERVED HYPOTHETICAL PROTEIN [Sinorhizobium >gi|15073726|emb|CAC45367.1| CONSERVED HYPOTHETICAL PROTEIN
  misc_feature (1)..(91): Homolog of NCBI NO: 15964548 NR Description: CONSERVED HYPOTHETICAL PROTEIN [Sinorhizobium >gi|15073726|emb|CAC45367.1| CONSERVED HYPOTHETICAL PROTEIN
  misc_feature (1)..(219): Homolog of NCBI NO: 27382589 NR Description: blr7478 [Bradyrhizobium japonicum]
MVIISNSSRRSSVTMKKLKSLGFDTSCFLATITSGELTHQHLQKRDDPWFAALGRKCIHITWDDRGAISLEGLGLQVVNNVDDAEFILAHGTEALGSPSGVPLPKSLEELEQVLMLGIEKRLPMVVANPDYVTVEARDLRVMPGTLAAKYESLGGEVKWMGKPDKVIYTSAMSLAGVDARECIMVGDSLHHDIKGANASGMASAFVTGGVHADELGLGEFGETAGEDAVSSLCSKHGSYPSYVLPSFAW

SEQ ID NO: 6759 - DNA, 380 bp, Zea mays subsp. mays
  misc_feature (1)..(380): Ceres Seq. ID no. 12387203
  misc_feature: MA Experiment ID: 20000108 Result: Up-regulated in Transcription
  misc_feature: MA Experiment 20000108 PARAMETER Experiment Name: Zm_Root-Tips_P Parameter: Age (day) Value: 12
  misc_feature: MA Experiment 20000108 PARAMETER Experiment Name: Zm_Root-Tips_P Parameter: Organism Value: Zea mays
  misc_feature: MA Experiment 20000108 PARAMETER Experiment Name: Zm_Root-Tips_P Parameter: Tissue Value: Root tips vs. Root mid region    35
  misc_feature: MA Experiment 20000108 PARAMETER Experiment Name: Zm_Root-Tips_P Parameter: Tissue Value: Root tips vs. Root mid region   Sequence Listing-Misc Features (4)
gagcttgcgaccccaccgacacacacagcagggaagcgaggggaaggagaggcaaggcggcgcggccagcggcccaggatatctgcgcgtgcgatcccgaggaggcgtcggcgaggtgggatgatatcgcagttcttcgttctgtcgcagcgcggcgaccacatcgtcttccgcgactatcgcggcgaggtgcccaagggaagcgcggagatcttcttccggaaggtcaagttctggaacgacgacgaggcagaggaggcgcccccggtcttcaatgtcgatggggttaactatattcatgtcaaagtcgctggactattttttgtggtaaccacaatggttaatgtctccccatcccttctcttggagcttcttcaaag

SEQ ID NO: 6760 - protein, 126 aa, Zea mays subsp. mays
  peptide (1)..(126): Ceres Seq. ID no. 12387204
  misc_feature (41)..(125): Homolog of NCBI NO: 33146629 NR Description: putative clathrin-adaptor medium chain apm 4
  misc_feature (41)..(125): Homolog of NCBI NO: 34906796 NR Description: contains EST D40457(S2456)~similar to clathrin
  misc_feature (41)..(125): Homolog of NCBI NO: 15233859 NR Description: clathrin coat assembly like protein; protein id:
  misc_feature (41)..(125): Homolog of NCBI NO: 30686572 NR Description: clathrin coat assembly like protein [Arabidopsis
  misc_feature (41)..(125): Homolog of NCBI NO: 23508393 NR Description: clathrin coat assembly protein, putative falciparum 3D7] >gi|23496125|gb|AAN35786.1|AE014838_64 clathrin
  misc_feature (41)..(125): Homolog of NCBI NO: 23481746 NR Description: clathrin coat assembly like protein [Plasmodium
  misc_feature (41)..(125): Homolog of NCBI NO: 12000361 NR Description: clathrin-adaptor medium chain apm 4
  misc_feature (41)..(125): Homolog of NCBI NO: 5442366 NR Description: adaptor-related protein complex AP-4 mu4 subunit
  misc_feature (41)..(125): Homolog of NCBI NO: 13431270 NR Description: Adapter-related protein complex 4 mu 1 subunit
  misc_feature (41)..(125): Homolog of NCBI NO: 14917111 NR Description: adaptor-related protein complex 4, mu 1 subunit;
ELATPPTHTAGKRGEGEARRRGQRPRISARAIPRRRRRGGMISQFFVLSQRGDHIVFRDYRGEVPKGSAEIFFRKVKFWNDDEAEEAPPVFNVDGVNYIHVKVAGLFFVVTTMVNVSPSLLLELLQ

SEQ ID NO: 6761 - protein, 95 aa, Zea mays subsp. mays
  peptide (1)..(95): Ceres Seq. ID no. 12387205
ACDPTDTHSREARGRRGKAARPAAQDICACDPEEASARWDDIAVLRSVAARRPHRLPRLSRRGAQGKRGDLLPEGQVLERRRGRGGAPGLQCRWG

SEQ ID NO: 6762 - protein, 86 aa, Zea mays subsp. mays
  peptide (1)..(86): Ceres Seq. ID no. 12387206
  misc_feature (1)..(85): Homolog of NCBI NO: 14917111 NR Description: adaptor-related protein complex 4, mu 1 subunit;
  misc_feature (1)..(85): Homolog of NCBI NO: 33146629 NR Description: putative clathrin-adaptor medium chain apm 4
  misc_feature (1)..(85): Homolog of NCBI NO: 34906796 NR Description: contains EST D40457(S2456)~similar to clathrin
  misc_feature (1)..(85): Homolog of NCBI NO: 15233859 NR Description: clathrin coat assembly like protein; protein id:
  misc_feature (1)..(85): Homolog of NCBI NO: 30686572 NR Description: clathrin coat assembly like protein [Arabidopsis
  misc_feature (1)..(85): Homolog of NCBI NO: 23508393 NR Description: clathrin coat assembly protein, putative falciparum 3D7] >gi|23496125|gb|AAN35786.1|AE014838_64 clathrin
  misc_feature (1)..(85): Homolog of NCBI NO: 23481746 NR Description: clathrin coat assembly like protein [Plasmodium
  misc_feature (1)..(85): Homolog of NCBI NO: 12000361 NR Description: clathrin-adaptor medium chain apm 4
  misc_feature (1)..(85): Homolog of NCBI NO: 5442366 NR Description: adaptor-related protein complex AP-4 mu4 subunit
  misc_feature (1)..(85): Homolog of NCBI NO: 13431270 NR Description: Adapter-related protein complex 4 mu 1 subunit
MISQFFVLSQRGDHIVFRDYRGEVPKGSAEIFFRKVKFWNDDEAEEAPPVFNVDGVNYIHVKVAGLFFVVTTMVNVSPSLLLELLQ

SEQ ID NO: 6763 - DNA, 1591 bp, Zea mays subsp. mays
  misc_feature (1)..(1591): Ceres Seq. ID no. 12595094
  misc_feature: MA Experiment ID: 108504 Result: Down-regulated in Transcription
  misc_feature: MA Experiment 108504 PARAMETER Experiment Name: Zm_Drought_P Parameter: Age (day) Value: 8
  misc_feature: MA Experiment 108504 PARAMETER Experiment Name: Zm_Drought_P Parameter: Organism Value: Zea mays
  misc_feature: MA Experiment 108504 PARAMETER Experiment Name: Zm_Drought_P Parameter: Plant Line Value: 35A19
  misc_feature: MA Experiment 108504 PARAMETER Experiment Name: Zm_Drought_P Parameter: Timepoint (hr) Value: 12
  misc_feature: MA Experiment 108504 PARAMETER Experiment Name: Zm_Drought_P Parameter: Tissue Value: Aerial
  misc_feature: MA Experiment 108504 PARAMETER Experiment Name: Zm_Drought_P Parameter: Treatment Value: Drought vs. No Drought
  misc_feature: MA Experiment ID: 108523 Result: Down-regulated in Transcription
  misc_feature: MA Experiment 108523 PARAMETER Experiment Name: Zm_42deg_Heat_P Parameter: Age (day) Value: 8
  misc_feature: MA Experiment 108523 PARAMETER Experiment Name: Zm_42deg_Heat_P Parameter: Organism Value: Zea mays
  misc_feature: MA Experiment 108523 PARAMETER Experiment Name: Zm_42deg_Heat_P Parameter: Plant Line Value: 35A19
  misc_feature: MA Experiment 108523 PARAMETER Experiment Name: Zm_42deg_Heat_P Parameter: Temperature (deg C) Value: 42 vs. 22
  misc_feature: MA Experiment 108523 PARAMETER Experiment Name: Zm_42deg_Heat_P Parameter: Timepoint (hr) Value: 6
  misc_feature: MA Experiment 108523 PARAMETER Experiment Name: Zm_42deg_Heat_P Parameter: Tissue Value: Aerial
  misc_feature: MA Experiment ID: 108535 Result: Up-regulated in Transcription
  misc_feature: MA Experiment 108535 PARAMETER Experiment Name: Zm_Meristem_P Parameter: Age (day) Value: 8
  misc_feature: MA Experiment 108535 PARAMETER Experiment Name: Zm_Meristem_P Parameter: Organism Value: Zea mays
  misc_feature: MA Experiment 108535 PARAMETER Experiment Name: Zm_Meristem_P Parameter: Plant Line Value: 35A19
  misc_feature: MA Experiment 108535 PARAMETER Experiment Name: Zm_Meristem_P Parameter: Tissue Value: Root Meristem vs. Above Root Meristem
  misc_feature: MA Experiment ID: 108544 Result: Down-regulated in Transcription
  misc_feature: MA Experiment ID: 108556 Result: Down-regulated in Transcription
  misc_feature: MA Experiment 108556 PARAMETER Experiment Name: Zm_Drought_P Parameter: Age (day) Value: 9
  misc_feature: MA Experiment 108556 PARAMETER Experiment Name: Zm_Drought_P Parameter: Organism Value: Zea mays
  misc_feature: MA Experiment 108556 PARAMETER Experiment Name: Zm_Drought_P Parameter: Plant Line Value: 35A19
  misc_feature: MA Experiment 108556 PARAMETER Experiment Name: Zm_Drought_P Parameter: Timepoint (hr) Value: 24
  misc_feature: MA Experiment 108556 PARAMETER Experiment Name: Zm_Drought_P Parameter: Tissue Value: Aerial
  misc_feature: MA Experiment 108556 PARAMETER Experiment Name: Zm_Drought_P Parameter: Treatment Value: Drought vs. No Drought
  misc_feature: MA Experiment ID: 20000478 Result: Down-regulated in Transcription
  misc_feature: MA Experiment 20000478 PARAMETER Experiment Name: Zm_5mM_SA_P Parameter: Age (day) Value: 11
  misc_feature: MA Experiment 20000478 PARAMETER Experiment Name: Zm_5mM_SA_P Parameter: Organism Value: Zea mays
  misc_feature: MA Experiment 20000478 PARAMETER Experiment Name: Zm_5mM_SA_P Parameter: Plant Line Value: 35A19
  misc_feature: MA Experiment 20000478 PARAMETER Experiment Name: Zm_5mM_SA_P Parameter: Timepoint (hr) Value: 72
  misc_feature: MA Experiment 20000478 PARAMETER Experiment Name: Zm_5mM_SA_P Parameter: Tissue Value: Aerial
  misc_feature: MA Experiment 20000478 PARAMETER Experiment Name: Zm_5mM_SA_P Parameter: Treatment Value: 5mM SA vs. No Treatment
  misc_feature: MA Experiment ID: 20000626 Result: Down-regulated in Transcription
  misc_feature: MA Experiment 20000626 PARAMETER Experiment Name: Zm_Herbicide-Treatments_P Parameter: Timepoint (hr) Value: 12
  misc_feature: MA Experiment 20000626 PARAMETER Experiment Name: Zm_Herbicide-Treatments_P Parameter: Tissue Value: Aerial
  misc_feature: MA Experiment 20000626 PARAMETER Experiment Name: Zm_Herbicide-Treatments_P Parameter: Treatment Value: Roundup vs. No Treatment
  misc_feature: Phenotype: WHOLE PLANT Size-Small
  misc_feature: Phenotype: ROSETTE LEAVES Disorganized Rosette-Disorganized Rosette
  misc_feature: Phenotype: ROSETTE LEAVES Other
  misc_feature: Phenotype: WHOLE PLANT Size-Small
  misc_feature: Phenotype: SILIQUES Other
  misc_feature: Phenotype: FERTILITY Fertility-Reduced
  misc_feature: Phenotype: WHOLE PLANT Size-Small
  misc_feature: Phenotype: SILIQUES Other
  misc_feature: Phenotype: WHOLE PLANT Size-Small
  misc_feature: Phenotype: INFLORESCENCE Other
  misc_feature: Phenotype: SILIQUES Other
tcattcggcctatcacaaccacttactctcgtgcgctctccgtgggagcgaggactcgcggccggcggcagcggcaggttctcctagatctccggcatcatcagtaacaaatggctgacggtgaggacattcagccccttgtttgtgacaatggaactggcatggtcaaggctggttttgctggtgacgatgcgccaagggctgttttcccaagcattgtcggacgcccccgtcacactggtgtgatggttggcatggggcagaaggatgcgtatgttggtgacgaggcccagtccaagaggggtatcctgactttgaagtaccccatcgaacatggtattgttagcaattgggatgacatggagaagatctggcaccacaccttctataatgaactccgtgtggcgcctgaagagcaccctgtgctgctgacggaagccccactcaaccccaaagctaacagggagaagatgacccaaatcatgtttgagaccttcaatgttcctgccatgtatgtcgccatccaggctgtgctttccctgtacgccagtgggcgtacaactggtattgtgttggactctggtgatggtgtcagccacaccgtgccaatctacgaaggttatgcccttcctcatgccatcctgcgtcttgaccttgctgggcgtgacctgactgacagcctgatgaagatcctcaccgagagaggttactccttcaccaccacggccgaacgggaaatcgtacgggacatcaaggaaaagcttgcatacgtggctcttgactatgatcaggagctggagaacgccaagagcagctcatctgtggagaagagctacgagctgcctgatggccaggtgatcaccattggggcggagaggttccgatgccccgaggtcctcttccagccttccttcattggtatggaagctcctggcatccatgagaccacctacaactccatcatgaaatgcgacgtggatatcaggaaggacttgtatggtaacattgttctcagtggtggcacaaccatgttccctggcatcgctgaccgtatgagcaaggagatcaccgcccttgccccgagcagcatgaaaatcaaggtggtggctccacccgagaggaaatacagtgtctggataggagggtccatccttgcctccctgagcaccttccaacagatgtggatctcaaaggctgagtacgatgagtcaggaccagcgattgttcaccggaagtgcttctaagctcaagggcccccttcgtccccattctatgtattcctttccttgagtgcttttcttataagctactatgtttgagattgccggcctttgagcaggcaatgttgttggatctgtatcttgtggatcactacaatgcatgcgttgctccatcttcttttcatgccaagtttgctgtcatacttgctagtggggaaaacaacaatgacaacagtggtgagaacagcaaccacaaaaaaagagaggatggaaattattgaagttcctaggatcgtattgtaactgtacttgtgcgagtaacattattggttctctttgtatatccatctctgagacatgcaattcttttt

SEQ ID NO: 6764 - protein, 377 aa, Zea mays subsp. mays
  peptide (1)..(377): Ceres Seq. ID no. 12595095
  misc_feature (1)..(377): Pfam Name: Actin Pfam Description: Actin
  misc_feature (1)..(377): Homolog of NCBI NO: 9965319 NR Description: actin [Setaria italica]
  misc_feature (1)..(377): Homolog of NCBI NO: 15076949 NR Description: actin [Musa x paradisiaca]
  misc_feature (1)..(377): Homolog of NCBI NO: 15242516 NR Description: ACTIN 2/7 (sp|P53492); protein id: At5g09810.1, by cDNA: gi_1049306, supported by cDNA: gi_17065251, supported by gi_17381047, supported by cDNA: gi_20465864 [Arabidopsis
  misc_feature (1)..(377): Homolog of NCBI NO: 24496452 NR Description: actin [Hordeum vulgare]
  misc_feature (1)..(377): Homolog of NCBI NO: 37535954 NR Description: actin [Oryza sativa (japonica cultivar-group)]
  misc_feature (1)..(377): Homolog of NCBI NO: 11276972 NR Description: actin [imported] - rape
  misc_feature (1)..(377): Homolog of NCBI NO: 7960247 NR Description: actin-like protein [Phalaenopsis sp. 'True Lady']
  misc_feature (1)..(377): Homolog of NCBI NO: 28301928 NR Description: actin [Oryza sativa (japonica cultivar-group)]
  misc_feature (1)..(377): Homolog of NCBI NO: 11276968 NR Description: actin [imported] - Picea rubens
  misc_feature (1)..(362): Homolog of NCBI NO: 11276980 NR Description: actin (ACT3) - Arabidopsis thaliana
MADGEDIQPLVCDNGTGMVKAGFAGDDAPRAVFPSIVGRPRHTGVMVGMGQKDAYVGDEAQSKRGILTLKYPIEHGIVSNWDDMEKIWHHTFYNELRVAPEEHPVLLTEAPLNPKANREKMTQIMFETFNVPAMYVAIQAVLSLYASGRTTGIVLDSGDGVSHTVPIYEGYALPHAILRLDLAGRDLTDSLMKILTERGYSFTTTAEREIVRDIKEKLAYVALDYDQELENAKSSSSVEKSYELPDGQVITIGAERFRCPEVLFQPSFIGMEAPGIHETTYNSIMKCDVDIRKDLYGNIVLSGGTTMFPGIADRMSKEITALAPSSMKIKVVAPPERKYSVWIGGSILASLSTFQQMWISKAEYDESGPAIVHRKCF

SEQ ID NO: 6765 - protein, 360 aa, Zea mays subsp. mays
  peptide (1)..(360): Ceres Seq. ID no. 12595096
  misc_feature (1)..(360): Pfam Name: Actin Pfam Description: Actin
  misc_feature (1)..(360): Homolog of NCBI NO: 9965319 NR Description: actin [Setaria italica]
  misc_feature (1)..(360): Homolog of NCBI NO: 15076949 NR Description: actin [Musa x paradisiaca]
  misc_feature (1)..(360): Homolog of NCBI NO: 15242516 NR Description: ACTIN 2/7 (sp|P53492); protein id: At5g09810.1, by cDNA: gi_1049306, supported by cDNA: gi_17065251, supported by gi_17381047, supported by cDNA: gi_20465864 [Arabidopsis
  misc_feature (1)..(360): Homolog of NCBI NO: 24496452 NR Description: actin [Hordeum vulgare]
  misc_feature (1)..(360): Homolog of NCBI NO: 37535954 NR Description: actin [Oryza sativa (japonica cultivar-group)]
  misc_feature (1)..(360): Homolog of NCBI NO: 11276972 NR Description: actin [imported] - rape
  misc_feature (1)..(360): Homolog of NCBI NO: 7960247 NR Description: actin-like protein [Phalaenopsis sp. 'True Lady']
  misc_feature (1)..(360): Homolog of NCBI NO: 11276968 NR Description: actin [imported] - Picea rubens
  misc_feature (1)..(360): Homolog of NCBI NO: 28301928 NR Description: actin [Oryza sativa (japonica cultivar-group)]
  misc_feature (1)..(345): Homolog of NCBI NO: 11276980 NR Description: actin (ACT3) - Arabidopsis thaliana
MVKAGFAGDDAPRAVFPSIVGRPRHTGVMVGMGQKDAYVGDEAQSKRGILTLKYPIEHGIVSNWDDMEKIWHHTFYNELRVAPEEHPVLLTEAPLNPKANREKMTQIMFETFNVPAMYVAIQAVLSLYASGRTTGIVLDSGDGVSHTVPIYEGYALPHAILRLDLAGRDLTDSLMKILTERGYSFTTTAEREIVRDIKEKLAYVALDYDQELENAKSSSSVEKSYELPDGQVITIGAERFRCPEVLFQPSFIGMEAPGIHETTYNSIMKCDVDIRKDLYGNIVLSGGTTMFPGIADRMSKEITALAPSSMKIKVVAPPERKYSVWIGGSILASLSTFQQMWISKAEYDESGPAIVHRKCF

SEQ ID NO: 6766 - protein, 332 aa, Zea mays subsp. mays
  peptide (1)..(332): Ceres Seq. ID no. 12595097
  misc_feature (1)..(332): Pfam Name: Actin Pfam Description: Actin
  misc_feature (1)..(332): Homolog of NCBI NO: 9965319 NR Description: actin [Setaria italica]
  misc_feature (1)..(332): Homolog of NCBI NO: 15076949 NR Description: actin [Musa x paradisiaca]
  misc_feature (1)..(332): Homolog of NCBI NO: 15242516 NR Description: ACTIN 2/7 (sp|P53492); protein id: At5g09810.1, by cDNA: gi_1049306, supported by cDNA: gi_17065251, supported by gi_17381047, supported by cDNA: gi_20465864 [Arabidopsis
  misc_feature (1)..(332): Homolog of NCBI NO: 24496452 NR Description: actin [Hordeum vulgare]
  misc_feature (1)..(332): Homolog of NCBI NO: 37535954 NR Description: actin [Oryza sativa (japonica cultivar-group)]
  misc_feature (1)..(332): Homolog of NCBI NO: 11276972 NR Description: actin [imported] - rape
  misc_feature (1)..(332): Homolog of NCBI NO: 7960247 NR Description: actin-like protein [Phalaenopsis sp. 'True Lady']
  misc_feature (1)..(332): Homolog of NCBI NO: 11276968 NR Description: actin [imported] - Picea rubens
  misc_feature (1)..(332): Homolog of NCBI NO: 28301928 NR Description: actin [Oryza sativa (japonica cultivar-group)]
  misc_feature (1)..(317): Homolog of NCBI NO: 11276980 NR Description: actin (ACT3) - Arabidopsis thaliana
MVGMGQKDAYVGDEAQSKRGILTLKYPIEHGIVSNWDDMEKIWHHTFYNELRVAPEEHPVLLTEAPLNPKANREKMTQIMFETFNVPAMYVAIQAVLSLYASGRTTGIVLDSGDGVSHTVPIYEGYALPHAILRLDLAGRDLTDSLMKILTERGYSFTTTAEREIVRDIKEKLAYVALDYDQELENAKSSSSVEKSYELPDGQVITIGAERFRCPEVLFQPSFIGMEAPGIHETTYNSIMKCDVDIRKDLYGNIVLSGGTTMFPGIADRMSKEITALAPSSMKIKVVAPPERKYSVWIGGSILASLSTFQQMWISKAEYDESGPAIVHRKCF

SEQ ID NO: 6767 - DNA, 725 bp, Zea mays subsp. mays
  misc_feature (1)..(725): Ceres Seq. ID no. 12403489
  misc_feature: MA Experiment ID: 108528 Result: Up-regulated in Transcription
  misc_feature: MA Experiment 108528 PARAMETER Experiment Name: Zm_Imbibed_Seeds_P Parameter: Age (day) Value: 5 vs. 2
  misc_feature: MA Experiment 108528 PARAMETER Experiment Name: Zm_Imbibed_Seeds_P Parameter: Organism Value: Zea mays
  misc_feature: MA Experiment 108528 PARAMETER Experiment Name: Zm_Imbibed_Seeds_P Parameter: Plant Line Value: 35A19
  misc_feature: MA Experiment 108528 PARAMETER Experiment Name: Zm_Imbibed_Seeds_P Parameter: Tissue Value: Aerial vs. Embryo
  misc_feature: MA Experiment ID: 108529 Result: Down-regulated in Transcription
  misc_feature: MA Experiment 108529 PARAMETER Experiment Name: Zm_Imbibed_Seeds_P Parameter: Age (day) Value: 5 vs. 2
  misc_feature: MA Experiment 108529 PARAMETER Experiment Name: Zm_Imbibed_Seeds_P Parameter: Organism Value: Zea mays
  misc_feature: MA Experiment 108529 PARAMETER Experiment Name: Zm_Imbibed_Seeds_P Parameter: Plant Line Value: 35A19
  misc_feature: MA Experiment 108529 PARAMETER Experiment Name: Zm_Imbibed_Seeds_P Parameter: Tissue Value: Roots vs. Embryo
  misc_feature: MA Experiment ID: 108530 Result: Up-regulated in Transcription
  misc_feature: MA Experiment 108530 PARAMETER Experiment Name: Zm_Imbibed_Seeds_P Parameter: Age (day) Value: 6 vs. 2
  misc_feature: MA Experiment 108530 PARAMETER Experiment Name: Zm_Imbibed_Seeds_P Parameter: Organism Value: Zea mays
  misc_feature: MA Experiment 108530 PARAMETER Experiment Name: Zm_Imbibed_Seeds_P Parameter: Plant Line Value: 35A19
  misc_feature: MA Experiment 108530 PARAMETER Experiment Name: Zm_Imbibed_Seeds_P Parameter: Tissue Value: Aerial vs. Embryo
  misc_feature: MA Experiment ID: 108536 Result: Down-regulated in Transcription
  misc_feature: MA Experiment 108536 PARAMETER Experiment Name: Zm_Meristem_P Parameter: Age (day) Value: 8
  misc_feature: MA Experiment 108536 PARAMETER Experiment Name: Zm_Meristem_P Parameter: Organism Value: Zea mays
  misc_feature: MA Experiment 108536 PARAMETER Experiment Name: Zm_Meristem_P Parameter: Plant Line Value: 35A19
  misc_feature: MA Experiment 108536 PARAMETER Experiment Name: Zm_Meristem_P Parameter: Tissue Value: Shoot Meristem vs. Above Shoot Meristem
  misc_feature: MA Experiment ID: 108545 Result: Up-regulated in Transcription
  misc_feature: MA Experiment 108545 PARAMETER Experiment Name: Zm_Imbibed_Seeds_P Parameter: Age (day) Value: 3 vs. 2
  misc_feature: MA Experiment 108545 PARAMETER Experiment Name: Zm_Imbibed_Seeds_P Parameter: Organism Value: Zea mays
  misc_feature: MA Experiment 108545 PARAMETER Experiment Name: Zm_Imbibed_Seeds_P Parameter: Plant Line Value: 35A19
  misc_feature: MA Experiment 108545 PARAMETER Experiment Name: Zm_Imbibed_Seeds_P Parameter: Tissue Value: Aerial vs. Embryo
  misc_feature: MA Experiment ID: 108546 Result: Down-regulated in Transcription
  misc_feature: MA Experiment 108546 PARAMETER Experiment Name: Zm_Imbibed_Seeds_P Parameter: Age (day) Value: 3 vs. 2
  misc_feature: MA Experiment 108546 PARAMETER Experiment Name: Zm_Imbibed_Seeds_P Parameter: Organism Value: Zea mays
  misc_feature: MA Experiment 108546 PARAMETER Experiment Name: Zm_Imbibed_Seeds_P Parameter: Plant Line Value: 35A19
  misc_feature: MA Experiment 108546 PARAMETER Experiment Name: Zm_Imbibed_Seeds_P Parameter: Tissue Value: Roots vs. Embryo
  misc_feature: MA Experiment ID: 108547 Result: Up-regulated in Transcription
  misc_feature: MA Experiment 108547 PARAMETER Experiment Name: Zm_Imbibed_Seeds_P Parameter: Age (day) Value: 4 vs. 2
  misc_feature: MA Experiment 108547 PARAMETER Experiment Name: Zm_Imbibed_Seeds_P Parameter: Organism Value: Zea mays
  misc_feature: MA Experiment 108547 PARAMETER Experiment Name: Zm_Imbibed_Seeds_P Parameter: Plant Line Value: 35A19
  misc_feature: MA Experiment 108547 PARAMETER Experiment Name: Zm_Imbibed_Seeds_P Parameter: Tissue Value: Aerial vs. Embryo
  misc_feature: MA Experiment ID: 20000488 Result: Up-regulated in Transcription
  misc_feature: MA Experiment 20000488 PARAMETER Experiment Name: Zm_50mM_NH4NO3_L_to_H_P Parameter: Organism Value: Zea mays
  misc_feature: MA Experiment 20000488 PARAMETER Experiment Name: Zm_50mM_NH4NO3_L_to_H_P Parameter: Timepoint (hr) Value: 8
  misc_feature: MA Experiment 20000488 PARAMETER Experiment Name: Zm_50mM_NH4NO3_L_to_H_P Parameter: Tissue Value: Leaves
  misc_feature: MA Experiment 20000488 PARAMETER Experiment Name: Zm_50mM_NH4NO3_L_to_H_P Parameter: Treatment Value: 50mM NH4NO3 vs. 100mM Mannitol
  misc_feature: MA Experiment ID: 20000626 Result: Down-regulated in Transcription
  misc_feature: MA Experiment 20000626 PARAMETER Experiment Name: Zm_Herbicide-Treatments_P Parameter: Timepoint (hr) Value: 12
  misc_feature: MA Experiment 20000626 PARAMETER Experiment Name: Zm_Herbicide-Treatments_P Parameter: Tissue Value: Aerial
  misc_feature: MA Experiment 20000626 PARAMETER Experiment Name: Zm_Herbicide-Treatments_P Parameter: Treatment Value: Roundup vs. No Treatment
  misc_feature: MA Experiment ID: 20001608 Result: Up-regulated in Transcription
  misc_feature: MA Experiment 20001608 PARAMETER Experiment Name: Zm_50ppm_KNO3_L-to-H_P Parameter: Age (day) Value: 21
  misc_feature: MA Experiment 20001608 PARAMETER Experiment Name: Zm_50ppm_KNO3_L-to-H_P Parameter: Organism Value: Zea mays
  misc_feature: MA Experiment 20001608 PARAMETER Experiment Name: Zm_50ppm_KNO3_L-to-H_P Parameter: Plant Line Value: 35A19
  misc_feature: MA Experiment 20001608 PARAMETER Experiment Name: Zm_50ppm_KNO3_L-to-H_P Parameter: Timepoint (hr) Value: 48
  misc_feature: MA Experiment 20001608 PARAMETER Experiment Name: Zm_50ppm_KNO3_L-to-H_P Parameter: Tissue Value: Shoots
  misc_feature: MA Experiment 20001608 PARAMETER Experiment Name: Zm_50ppm_KNO3_L-to-H_P Parameter: Treatment Value: 50ppm KNO3 vs. 50ppm KCl
aaaccaacatctgggcaaggaacagataaggactgcaaaccttgtcagggcttcggggacagccaaagaagacggacggacccagtgaggcgagcacgggcgctcaccggcgatggcgacgagggcatgggtggccgcggcggtggccttgaaccctcaactgctgcctctccgctcctgctcgcccacgcagtcggtctccccagcgcagcgctcgccgtcgatggggctccggctgcgcagcggccggccgtgcctggggaagttcgtgtgccgccgcgccaagaacgcgggatacgaggactacaagttcccggaccccatcccggagttcgccgagcaggagacgagcaagttcagggagcacatggcgtggcggctggagcagaagaaagaggactacttcggggaccatgtcgaggagatcgttgacgtctgcaccgagatcttggggacattcctggagaacgattaccgtggaccagggacgctcctggttcacccgttcctggacatgaagggcgagatcaaggagagggggctccccggcgcacctcaggcggcacgggcggcgatagcatgggccgaaaagaacgtggataaggactggaaggcctggactggggaatactagcactagttatgttgtttgacgttcccagcagctagctattgtgacacaaaattttgtccgcttcaaatgttcctctgtctgtcgtcatgcc

SEQ ID NO: 6768 - protein, 173 aa, Zea mays subsp. mays
  peptide (1)..(173): Ceres Seq. ID no. 12403490
  misc_feature (52)..(171): Homolog of NCBI NO: 18391169 NR Description: Expressed protein; protein id: At1g10522.1, by cDNA: 264189. [Arabidopsis thaliana] T10O24.14 [Arabidopsis thaliana] >gi|21554792|gb|AAM63692.1|
MATRAWVAAAVALNPQLLPLRSCSPTQSVSPAQRSPSMGLRLRSGRPCLGKFVCRRAKNAGYEDYKFPDPIPEFAEQETSKFREHMAWRLEQKKEDYFGDHVEEIVDVCTEILGTFLENDYRGPGTLLVHPFLDMKGEIKERGLPGAPQAARAAIAWAEKNVDKDWKAWTGEY

SEQ ID NO: 6769 - protein, 143 aa, Zea mays subsp. mays
  peptide (1)..(143): Ceres Seq. ID no. 12403491
KPTSGQGTDKDCKPCQGFGDSQRRRTDPVRRARALTGDGDEGMGGRGGGLEPSTAASPLLLAHAVGLPSAALAVDGAPAAQRPAVPGEVRVPPRQERGIRGLQVPGPHPGVRRAGDEQVQGAHGVAAGAEERGLLRGPCRGDR

SEQ ID NO: 6770 - protein, 136 aa, Zea mays subsp. mays
  peptide (1)..(136): Ceres Seq. ID no. 12403492
  misc_feature (15)..(134): Homolog of NCBI NO: 18391169 NR Description: Expressed protein; protein id: At1g10522.1, by cDNA: 264189. [Arabidopsis thaliana] T10O24.14 [Arabidopsis thaliana] >gi|21554792|gb|AAM63692.1|
MGLRLRSGRPCLGKFVCRRAKNAGYEDYKFPDPIPEFAEQETSKFREHMAWRLEQKKEDYFGDHVEEIVDVCTEILGTFLENDYRGPGTLLVHPFLDMKGEIKERGLPGAPQAARAAIAWAEKNVDKDWKAWTGEY

SEQ ID NO: 6771 - DNA, 1033 bp, Zea mays subsp. mays
  misc_feature (1)..(1033): Ceres Seq. ID no. 12401239
  misc_feature: MA Experiment ID: 108544 Result: Down-regulated in Transcription
  misc_feature: MA Experiment ID: 108688 Result: Down-regulated in Transcription
  misc_feature: MA Experiment 108688 PARAMETER Experiment Name: Zm_Embryos-Flowers__P Parameter: Tissue Value: Immature Flowers vs. Aerial+
  misc_feature: MA Experiment ID: 20000534 Result: Down-regulated in Transcription
  misc_feature: MA Experiment 20000534 PARAMETER Experiment Name: Zm_Hybrid_Pollen_P Parameter: Age (day) Value: 8
  misc_feature: MA Experiment 20000534 PARAMETER Experiment Name: Zm_Hybrid_Pollen_P Parameter: Organism Value: Zea mays
  misc_feature: MA Experiment 20000534 PARAMETER Experiment Name: Zm_Hybrid_Pollen_P Parameter: Plant Line Value: 35A19
  misc_feature: MA Experiment 20000534 PARAMETER Experiment Name: Zm_Hybrid_Pollen_P Parameter: Tissue Value: Pollen vs. Aerial
  misc_feature: MA Experiment ID: 20000535 Result: Up-regulated in Transcription
  misc_feature: MA Experiment 20000535 PARAMETER Experiment Name: Zm_Hybrid_Seed_Dev_P Parameter: DAP Value: 30 vs. 12
  misc_feature: MA Experiment 20000535 PARAMETER Experiment Name: Zm_Hybrid_Seed_Dev_P Parameter: Organism Value: Zea mays
  misc_feature: MA Experiment 20000535 PARAMETER Experiment Name: Zm_Hybrid_Seed_Dev_P Parameter: Plant Line Value: 35A19
  misc_feature: MA Experiment 20000535 PARAMETER Experiment Name: Zm_Hybrid_Seed_Dev_P Parameter: Tissue Value: Embryo vs. Unfert Floret
gaatgaaggtctgaaaaaaatcacagaactcactcgaacgacggtgccgccgcttgcctcgcctgaccatggccgctgtgccgtcgaggttcctcctcgtcactggcccgccgggcgtggggaagacgacgctggtcatgcgggtgtttgaaaccctcagaggctcccacccgaacctcaacattcgcggattctatacccgagaggtgagagagggcggagaaaggataggattcgaggttgtcacgctagacggtagaactggaccactttcctcatgcaaggtttccagcccggagtctgttagatggcctaccgtcgggaaatacaaagtagacgtagcatccttggaatcattagcagtacctgagctgcaggttaaggaagaaacagatctcttcatcattgacgaagtgggtaaaatggagctgttcagttcagcatttttccctgcggtaatgagagttattgaatccaatataccagtgttggccaccataccgattcctaggcagggccgggacattccaggagttgcgaggttgcggaatcatcctggagcagctgttttcaccttagacactggtaacagagatacgatgagagatactatctgcagtcagttaaggagtttgttgcagaagaggtgatctgctagcctcccttcgtctctgcggccgctgctttgtctgacataacacacatacgataaagagtagaagttttctctcagcatgatctcatattctgcaacagaacatgcggtcgagtcttctggtgcagtacctgaaatacctgttttaaagcttaccgagcagtgaatggcaggcagattactatgttgctgtgctcagatggttagctctggatgaacaataagcatgtcgtccagtttgttctgagttacgtatgtgtggctattcagtcatgtatttgcattcggtgggggcaaggttttattgccacaataactctcgcttgtatggatgcggttagcatgtagtgactctacaacaggtatcacatgatttgc

SEQ ID NO: 6772 - protein, 193 aa, Zea mays subsp. mays
  peptide (1)..(193): Ceres Seq. ID no. 12401240
  misc_feature (47)..(192): Pfam Name: Protein of unknown function, DUF265 Pfam Description: Protein of unknown function, DUF265
  misc_feature (14)..(193): Homolog of NCBI NO: 6063556 NR Description: similar to Aquifex aeolicus section 65 of 109 of complete genome; hypothetical protein. (AE000733) [Oryza sativa
  misc_feature (47)..(193): Homolog of NCBI NO: 20503005 NR Description: Unknown protein [Oryza sativa (japonica
  misc_feature (6)..(188): Homolog of NCBI NO: 14150100 NR Description: hypothetical protein MGC13186 [Homo sapiens] Similar to RIKEN cDNA 2310079N02 gene [Homo sapiens]
  misc_feature (6)..(188): Homolog of NCBI NO: 13385098 NR Description: RIKEN cDNA 2310079N02 [Mus musculus] unnamed protein product [Mus musculus] unnamed protein product [Mus musculus]
  misc_feature (6)..(188): Homolog of NCBI NO: 12859618 NR Description: unnamed protein product [Mus musculus]
  misc_feature (6)..(188): Homolog of NCBI NO: 34851911 NR Description: similar to RIKEN cDNA 2310079N02 [Rattus
  misc_feature (9)..(187): Homolog of NCBI NO: 15642811 NR Description: conserved hypothetical protein [Thermotoga
  misc_feature (9)..(186): Homolog of NCBI NO: 15606506 NR Description: hypothetical protein [Aquifex aeolicus]
  misc_feature (9)..(189): Homolog of NCBI NO: 20092214 NR Description: conserved hypothetical protein [Methanosarcina str. C2A] >gi|19917446|gb|AAM06769.1| conserved hypothetical
  misc_feature (9)..(189): Homolog of NCBI NO: 23049827 NR Description: hypothetical protein [Methanosarcina barkeri]
MAAVPSRFLLVTGPPGVGKTTLVMRVFETLRGSHPNLNIRGFYTREVREGGERIGFEVVTLDGRTGPLSSCKVSSPESVRWPTVGKYKVDVASLESLAVPELQVKEETDLFIIDEVGKMELFSSAFFPAVMRVIESNIPVLATIPIPRQGRDIPGVARLRNHPGAAVFTLDTGNRDTMRDTICSQLRSLLQKR

SEQ ID NO: 6773 - protein, 170 aa, Zea mays subsp. mays
  peptide (1)..(170): Ceres Seq. ID no. 12401241
  misc_feature (24)..(169): Pfam Name: Protein of unknown function, DUF265 Pfam Description: Protein of unknown function, DUF265
  misc_feature (1)..(170): Homolog of NCBI NO: 6063556 NR Description: similar to Aquifex aeolicus section 65 of 109 of complete genome; hypothetical protein. (AE000733) [Oryza sativa
  misc_feature (24)..(170): Homolog of NCBI NO: 20503005 NR Description: Unknown protein [Oryza sativa (japonica
  misc_feature (1)..(165): Homolog of NCBI NO: 14150100 NR Description: hypothetical protein MGC13186 [Homo sapiens] Similar to RIKEN cDNA 2310079N02 gene [Homo sapiens]
  misc_feature (1)..(165): Homolog of NCBI NO: 13385098 NR Description: RIKEN cDNA 2310079N02 [Mus musculus] unnamed protein product [Mus musculus] unnamed protein product [Mus musculus]
  misc_feature (1)..(165): Homolog of NCBI NO: 12859618 NR Description: unnamed protein product [Mus musculus]
  misc_feature (1)..(165): Homolog of NCBI NO: 34851911 NR Description: similar to RIKEN cDNA 2310079N02 [Rattus
  misc_feature (1)..(164): Homolog of NCBI NO: 15642811 NR Description: conserved hypothetical protein [Thermotoga
  misc_feature (1)..(163): Homolog of NCBI NO: 15606506 NR Description: hypothetical protein [Aquifex aeolicus]
  misc_feature (1)..(166): Homolog of NCBI NO: 20092214 NR Description: conserved hypothetical protein [Methanosarcina str. C2A] >gi|19917446|gb|AAM06769.1| conserved hypothetical
  misc_feature (1)..(166): Homolog of NCBI NO: 23049827 NR Description: hypothetical protein [Methanosarcina barkeri]
MRVFETLRGSHPNLNIRGFYTREVREGGERIGFEVVTLDGRTGPLSSCKVSSPESVRWPTVGKYKVDVASLESLAVPELQVKEETDLFIIDEVGKMELFSSAFFPAVMRVIESNIPVLATIPIPRQGRDIPGVARLRNHPGAAVFTLDTGNRDTMRDTICSQLRSLLQKR

SEQ ID NO: 6774 - DNA, 997 bp, Zea mays subsp. mays
  misc_feature (1)..(997): Ceres Seq. ID no. 12404376
  misc_feature: MA Experiment ID: 108504 Result: Up-regulated in Transcription
  misc_feature: MA Experiment 108504 PARAMETER Experiment Name: Zm_Drought_P Parameter: Age (day) Value: 8
  misc_feature: MA Experiment 108504 PARAMETER Experiment Name: Zm_Drought_P Parameter: Organism Value: Zea mays
  misc_feature: MA Experiment 108504 PARAMETER Experiment Name: Zm_Drought_P Parameter: Plant Line Value: 35A19
  misc_feature: MA Experiment 108504 PARAMETER Experiment Name: Zm_Drought_P Parameter: Timepoint (hr) Value: 12
  misc_feature: MA Experiment 108504 PARAMETER Experiment Name: Zm_Drought_P Parameter: Tissue Value: Aerial
  misc_feature: MA Experiment 108504 PARAMETER Experiment Name: Zm_Drought_P Parameter: Treatment Value: Drought vs. No Drought
  misc_feature: MA Experiment ID: 108523 Result: Down-regulated in Transcription
  misc_feature: MA Experiment 108523 PARAMETER Experiment Name: Zm_42deg_Heat_P Parameter: Age (day) Value: 8
  misc_feature: MA Experiment 108523 PARAMETER Experiment Name: Zm_42deg_Heat_P Parameter: Organism Value: Zea mays
  misc_feature: MA Experiment 108523 PARAMETER Experiment Name: Zm_42deg_Heat_P Parameter: Plant Line Value: 35A19
  misc_feature: MA Experiment 108523 PARAMETER Experiment Name: Zm_42deg_Heat_P Parameter: Temperature (deg C) Value: 42 vs. 22
  misc_feature: MA Experiment 108523 PARAMETER Experiment Name: Zm_42deg_Heat_P Parameter: Timepoint (hr) Value: 6
  misc_feature: MA Experiment 108523 PARAMETER Experiment Name: Zm_42deg_Heat_P Parameter: Tissue Value: Aerial
  misc_feature: MA Experiment ID: 108527 Result: Down-regulated in Transcription
  misc_feature: MA Experiment 108527 PARAMETER Experiment Name: Zm_5mM_NO_P Parameter: Age (day) Value: 8
  misc_feature: MA Experiment 108527 PARAMETER Experiment Name: Zm_5mM_NO_P Parameter: Organism Value: Zea mays
  misc_feature: MA Experiment 108527 PARAMETER Experiment Name: Zm_5mM_NO_P Parameter: Plant Line Value: 35A19
  misc_feature: MA Experiment 108527 PARAMETER Experiment Name: Zm_5mM_NO_P Parameter: Timepoint (hr) Value: 6
  misc_feature: MA Experiment 108527 PARAMETER Experiment Name: Zm_5mM_NO_P Parameter: Tissue Value: Aerial
  misc_feature: MA Experiment 108527 PARAMETER Experiment Name: Zm_5mM_NO_P Parameter: Treatment Value: 5mM NO vs. No Treatment
  misc_feature: MA Experiment ID: 108532 Result: Down-regulated in Transcription
  misc_feature: MA Experiment 108532 PARAMETER Experiment Name: Zm_20uM_KNO3_H-to-L_P Parameter: Age (day) Value: 11
  misc_feature: MA Experiment 108532 PARAMETER Experiment Name: Zm_20uM_KNO3_H-to-L_P Parameter: Organism Value: Zea mays
  misc_feature: MA Experiment 108532 PARAMETER Experiment Name: Zm_20uM_KNO3_H-to-L_P Parameter: Plant Line Value: 35A19
  misc_feature: MA Experiment 108532 PARAMETER Experiment Name: Zm_20uM_KNO3_H-to-L_P Parameter: Timepoint (hr) Value: 16
  misc_feature: MA Experiment 108532 PARAMETER Experiment Name: Zm_20uM_KNO3_H-to-L_P Parameter: Tissue Value: Roots
  misc_feature: MA Experiment 108532 PARAMETER Experiment Name: Zm_20uM_KNO3_H-to-L_P Parameter: Treatment Value: 20uM KNO3 vs. 60mM KNO3
  misc_feature: MA Experiment ID: 108534 Result: Down-regulated in Transcription
  misc_feature: MA Experiment 108534 PARAMETER Experiment Name: Zm_4deg_Cold_P Parameter: Age (hr) Value: 8
  misc_feature: MA Experiment 108534 PARAMETER Experiment Name: Zm_4deg_Cold_P Parameter: Organism Value: Zea mays
  misc_feature: MA Experiment 108534 PARAMETER Experiment Name: Zm_4deg_Cold_P Parameter: Plant Line Value: 35A19
  misc_feature: MA Experiment 108534 PARAMETER Experiment Name: Zm_4deg_Cold_P Parameter: Temperature (deg C) Value: 4 vs. 22
  misc_feature: MA Experiment 108534 PARAMETER Experiment Name: Zm_4deg_Cold_P Parameter: Timepoint (hr) Value: 6
  misc_feature: MA Experiment 108534 PARAMETER Experiment Name: Zm_4deg_Cold_P Parameter: Tissue Value: Aerial
  misc_feature: MA Experiment ID: 108535 Result: Down-regulated in Transcription
  misc_feature: MA Experiment 108535 PARAMETER Experiment Name: Zm_Meristem_P Parameter: Age (day) Value: 8
  misc_feature: MA Experiment 108535 PARAMETER Experiment Name: Zm_Meristem_P Parameter: Organism Value: Zea mays
  misc_feature: MA Experiment 108535 PARAMETER Experiment Name: Zm_Meristem_P Parameter: Plant Line Value: 35A19
  misc_feature: MA Experiment 108535 PARAMETER Experiment Name: Zm_Meristem_P Parameter: Tissue Value: Root Meristem vs. Above Root Meristem
  misc_feature: MA Experiment ID: 108536 Result: Down-regulated in Transcription
  misc_feature: MA Experiment 108536 PARAMETER Experiment Name: Zm_Meristem_P Parameter: Age (day) Value: 8
  misc_feature: MA Experiment 108536 PARAMETER Experiment Name: Zm_Meristem_P Parameter: Organism Value: Zea mays
  misc_feature: MA Experiment 108536 PARAMETER Experiment Name: Zm_Meristem_P Parameter: Plant Line Value: 35A19
  misc_feature: MA Experiment 108536 PARAMETER Experiment Name: Zm_Meristem_P Parameter: Tissue Value: Shoot Meristem vs. Above Shoot Meristem
  misc_feature: MA Experiment ID: 108543 Result: Up-regulated in Transcription
  misc_feature: MA Experiment ID: 108544 Result: Up-regulated in Transcription
  misc_feature: MA Experiment ID: 108545 Result: Up-regulated in Transcription
  misc_feature: MA Experiment 108545 PARAMETER Experiment Name: Zm_Imbibed_Seeds_P Parameter: Age (day) Value: 3 vs. 2
  misc_feature: MA Experiment 108545 PARAMETER Experiment Name: Zm_Imbibed_Seeds_P Parameter: Organism Value: Zea mays
  misc_feature: MA Experiment 108545 PARAMETER Experiment Name: Zm_Imbibed_Seeds_P Parameter: Plant Line Value: 35A19
  misc_feature: MA Experiment 108545 PARAMETER Experiment Name: Zm_Imbibed_Seeds_P Parameter: Tissue Value: Aerial vs. Embryo
  misc_feature: MA Experiment ID: 108556 Result: Up-regulated in Transcription
  misc_feature: MA Experiment 108556 PARAMETER Experiment Name: Zm_Drought_P Parameter: Age (day) Value: 9
  misc_feature: MA Experiment 108556 PARAMETER Experiment Name: Zm_Drought_P Parameter: Organism Value: Zea mays
  misc_feature: MA Experiment 108556 PARAMETER Experiment Name: Zm_Drought_P Parameter: Plant Line Value: 35A19
  misc_feature: MA Experiment 108556 PARAMETER Experiment Name: Zm_Drought_P Parameter: Timepoint (hr) Value: 24
  misc_feature: MA Experiment 108556 PARAMETER Experiment Name: Zm_Drought_P Parameter: Tissue Value: Aerial
  misc_feature: MA Experiment 108556 PARAMETER Experiment Name: Zm_Drought_P Parameter: Treatment Value: Drought vs. No Drought
  misc_feature: MA Experiment ID: 108559 Result: Down-regulated in Transcription
  misc_feature: MA Experiment 108559 PARAMETER Experiment Name: Zm_5mM_NO_P Parameter: Age (day) Value: 8
  misc_feature: MA Experiment 108559 PARAMETER Experiment Name: Zm_5mM_NO_P Parameter: Organism Value: Zea mays
  misc_feature: MA Experiment 108559 PARAMETER Experiment Name: Zm_5mM_NO_P Parameter: Plant Line Value: 35A19
  misc_feature: MA Experiment 108559 PARAMETER Experiment Name: Zm_5mM_NO_P Parameter: Timepoint (hr) Value: 12
  misc_feature: MA Experiment 108559 PARAMETER Experiment Name: Zm_5mM_NO_P Parameter: Tissue Value: Aerial
  misc_feature: MA Experiment 108559 PARAMETER Experiment Name: Zm_5mM_NO_P Parameter: Treatment Value: 5mM NO vs. No Treatment
  misc_feature: MA Experiment ID: 108597 Result: Up-regulated in Transcription
  misc_feature: MA Experiment 108597 PARAMETER Experiment Name: Zm_100uM_ABA_P Parameter: Age (day) Value: 9
  misc_feature: MA Experiment 108597 PARAMETER Experiment Name: Zm_100uM_ABA_P Parameter: Organism Value: Zea mays
  misc_feature: MA Experiment 108597 PARAMETER Experiment Name: Zm_100uM_ABA_P Parameter: Plant Line Value: 35A19
  misc_feature: MA Experiment 108597 PARAMETER Experiment Name: Zm_100uM_ABA_P Parameter: Timepoint (hr) Value: 24
  misc_feature: MA Experiment 108597 PARAMETER Experiment Name: Zm_100uM_ABA_P Parameter: Tissue Value: Aerial
  misc_feature: MA Experiment 108597 PARAMETER Experiment Name: Zm_100uM_ABA_P Parameter: Treatment Value: 100uM ABA vs. No Treatment
  misc_feature: MA Experiment ID: 108689 Result: Up-regulated in Transcription
  misc_feature: MA Experiment 108689 PARAMETER Experiment Name: Zm_Drought_Roots_P Parameter: Age (day) Value: 9
  misc_feature: MA Experiment 108689 PARAMETER Experiment Name: Zm_Drought_Roots_P Parameter: Organism Value: Zea mays
  misc_feature: MA Experiment 108689 PARAMETER Experiment Name: Zm_Drought_Roots_P Parameter: Plant Line Value: 35A19
  misc_feature: MA Experiment 108689 PARAMETER Experiment Name: Zm_Drought_Roots_P Parameter: Timepoint (hr) Value: 24
  misc_feature: MA Experiment 108689 PARAMETER Experiment Name: Zm_Drought_Roots_P Parameter: Tissue Value: Roots
  misc_feature: MA Experiment 108689 PARAMETER Experiment Name: Zm_Drought_Roots_P Parameter: Treatment Value: Drought vs. No Drought
  misc_feature: MA Experiment ID: 20000479 Result: Up-regulated in Transcription
  misc_feature: MA Experiment 20000479 PARAMETER Experiment Name: Zm_Drought_P Parameter: Age (day) Value: 10
  misc_feature: MA Experiment 20000479 PARAMETER Experiment Name: Zm_Drought_P Parameter: Organism Value: Zea mays
  misc_feature: MA Experiment 20000479 PARAMETER Experiment Name: Zm_Drought_P Parameter: Plant Line Value: 35A19
  misc_feature: MA Experiment 20000479 PARAMETER Experiment Name: Zm_Drought_P Parameter: Timepoint (hr) Value: 48
  misc_feature: MA Experiment 20000479 PARAMETER Experiment Name: Zm_Drought_P Parameter: Tissue Value: Aerial
  misc_feature: MA Experiment 20000479 PARAMETER Experiment Name: Zm_Drought_P Parameter: Treatment Value: Drought vs. No Drought
  misc_feature: MA Experiment ID: 20000480 Result: Up-regulated in Transcription
  misc_feature: MA Experiment 20000480 PARAMETER Experiment Name: Zm_Drought_P Parameter: Age (day) Value: 11
  misc_feature: MA Experiment 20000480 PARAMETER Experiment Name: Zm_Drought_P Parameter: Organism Value: Zea mays
  misc_feature: MA Experiment 20000480 PARAMETER Experiment Name: Zm_Drought_P Parameter: Plant Line Value: 35A19
  misc_feature: MA Experiment 20000480 PARAMETER Experiment Name: Zm_Drought_P Parameter: Timepoint (hr) Value: 72
  misc_feature: MA Experiment 20000480 PARAMETER Experiment Name: Zm_Drought_P Parameter: Tissue Value: Aerial
  misc_feature: MA Experiment 20000480 PARAMETER Experiment Name: Zm_Drought_P Parameter: Treatment Value: Drought vs. No Drought
  misc_feature: MA Experiment ID: 20000630 Result: Down-regulated in Transcription
  misc_feature: MA Experiment 20000630 PARAMETER Experiment Name: Zm_Herbicide-Treatments_P Parameter: Timepoint (hr) Value: 4
  misc_feature: MA Experiment 20000630 PARAMETER Experiment Name: Zm_Herbicide-Treatments_P Parameter: Tissue Value: Aerial
  misc_feature: MA Experiment 20000630 PARAMETER Experiment Name: Zm_Herbicide-Treatments_P Parameter: Treatment Value: Roundup vs. No Treatment
gcacgagaccattacctagaacatcctaatcgaaaaattatttataagccatttgcattgcgctccagcttgggagcaaaggcaaagcagccaacaacaatcagaggcaacgaagctcgcgaatcgagagcgccgggaacaacaacaagaagaagatgatgataatggagcaggaggaggaggcgtgctcgacttgttgctcctctccgctgcggcagtgcaggatttgccatgacgaggaggacgagcggcgctccgccatggagtcgccctgcgcctgctccggttccctcaagtatgctcacaggggatgcgtgcagagatggtgcgacgagaagggcagcaccgtctgcgagatttgccttcagaacttcgagacgggctacaccgttcctcccaagaaaacccaaccagctgatgtcgcggtgaccatcagagacagcgtggcggtacccaggcagcagaacgagcccgaggacgaggaggagcaggtggccgcggcgctgataggagccagcgatccggagtacgccgagtgcgcccgcgccgccggcaggagcgcgtcctggtcctgctgccgctccgtggccgtcacgttcacgattgtcctgctgctgaggcacctggtcaccgtggtgacgctcggagcggccaaccagcagcagttcgccttcagcctcctcacagtgtacttgctgcgggcgagcgggatcttgcttccgttctacgttgtcatgaggctcatctgcgtgatccatcagggacagaggcagtaccggctgcatctgcttcaggagcagaggagacacgcgttgaggcggttggcctggctgcacggccagggacagcaccagcaaccgcatgccattctggttcgttgaggaacaaggcattcgtctagtgctcatacgctcgttcatccaaccatccatcacgtacaagactgtaaatttgtaaaagggacaaaataaagaagaaacggagaaagaaaggtggc

SEQ ID NO: 6775 - protein, 241 aa, Zea mays subsp. mays
  peptide (1)..(241): Ceres Seq. ID no. 12404377
  misc_feature (22)..(69): Pfam Name: Zinc finger, C3HC4 type (RING finger) Pfam Description: Zinc finger, C3HC4 type (RING finger)
  misc_feature (5)..(241): Homolog of NCBI NO: 34905532 NR Description: B1146F03.23 [Oryza sativa (japonica
  misc_feature (21)..(241): Homolog of NCBI NO: 15227065 NR Description: unknown protein; protein id: At2g02960.1, by cDNA: gi_17529099, supported by cDNA: gi_20259116 [Arabidopsis >gi|25365876|pir||F84442 hypothetical protein At2g02960
  misc_feature (19)..(205): Homolog of NCBI NO: 22325409 NR Description: similar to nucleoside triphosphatase, putative;
  misc_feature (1)..(206): Homolog of NCBI NO: 18424590 NR Description: expressed protein; protein id: At5g62460.1, by cDNA: gi_16974606 [Arabidopsis thaliana] gene_id:K19B1.7~unknown protein [Arabidopsis thaliana]
  misc_feature (5)..(206): Homolog of NCBI NO: 15223693 NR Description: nucleoside triphosphatase, putative; protein id:
  misc_feature (5)..(206): Homolog of NCBI NO: 26451292 NR Description: unknown protein [Arabidopsis thaliana]
  misc_feature (5)..(206): Homolog of NCBI NO: 21537046 NR Description: nucleoside triphosphatase, putative [Arabidopsis
  misc_feature (13)..(178): Homolog of NCBI NO: 25518349 NR Description: hypothetical protein T14P4.10 - Arabidopsis >gi|9972376|gb|AAG10626.1|AC022521_4 Unknown protein [Arabidopsis
  misc_feature (21)..(209): Homolog of NCBI NO: 30692888 NR Description: expressed protein [Arabidopsis thaliana]
  misc_feature (5)..(206): Homolog of NCBI NO: 25365878 NR Description: F14L17.2 protein - Arabidopsis thaliana
MMIMEQEEEACSTCCSSPLRQCRICHDEEDERRSAMESPCACSGSLKYAHRGCVQRWCDEKGSTVCEICLQNFETGYTVPPKKTQPADVAVTIRDSVAVPRQQNEPEDEEEQVAAALIGASDPEYAECARAAGRSASWSCCRSVAVTFTIVLLLRHLVTVVTLGAANQQQFAFSLLTVYLLRASGILLPFYVVMRLICVIHQGQRQYRLHLLQEQRRHALRRLAWLHGQGQHQQPHAILVR

SEQ ID NO: 6776 - protein, 240 aa, Zea mays subsp. mays
  peptide (1)..(240): Ceres Seq. ID no. 12404378
  misc_feature (21)..(68): Pfam Name: Zinc finger, C3HC4 type (RING finger) Pfam Description: Zinc finger, C3HC4 type (RING finger)
  misc_feature (4)..(240): Homolog of NCBI NO: 34905532 NR Description: B1146F03.23 [Oryza sativa (japonica
  misc_feature (20)..(240): Homolog of NCBI NO: 15227065 NR Description: unknown protein; protein id: At2g02960.1, by cDNA: gi_17529099, supported by cDNA: gi_20259116 [Arabidopsis >gi|25365876|pir||F84442 hypothetical protein At2g02960
  misc_feature (18)..(204): Homolog of NCBI NO: 22325409 NR Description: similar to nucleoside triphosphatase, putative;
  misc_feature (1)..(205): Homolog of NCBI NO: 18424590 NR Description: expressed protein; protein id: At5g62460.1, by cDNA: gi_16974606 [Arabidopsis thaliana] gene_id:K19B1.7~unknown protein [Arabidopsis thaliana]
  misc_feature (4)..(205): Homolog of NCBI NO: 15223693 NR Description: nucleoside triphosphatase, putative; protein id:
  misc_feature (4)..(205): Homolog of NCBI NO: 26451292 NR Description: unknown protein [Arabidopsis thaliana]
  misc_feature (4)..(205): Homolog of NCBI NO: 21537046 NR Description: nucleoside triphosphatase, putative [Arabidopsis
  misc_feature (12)..(177): Homolog of NCBI NO: 25518349 NR Description: hypothetical protein T14P4.10 - Arabidopsis >gi|9972376|gb|AAG10626.1|AC022521_4 Unknown protein [Arabidopsis
  misc_feature (20)..(208): Homolog of NCBI NO: 30692888 NR Description: expressed protein [Arabidopsis thaliana]
  misc_feature (4)..(205): Homolog of NCBI NO: 25365878 NR Description: F14L17.2 protein - Arabidopsis thaliana
MIMEQEEEACSTCCSSPLRQCRICHDEEDERRSAMESPCACSGSLKYAHRGCVQRWCDEKGSTVCEICLQNFETGYTVPPKKTQPADVAVTIRDSVAVPRQQNEPEDEEEQVAAALIGASDPEYAECARAAGRSASWSCCRSVAVTFTIVLLLRHLVTVVTLGAANQQQFAFSLLTVYLLRASGILLPFYVVMRLICVIHQGQRQYRLHLLQEQRRHALRRLAWLHGQGQHQQPHAILVR

SEQ ID NO: 6777 - protein, 238 aa, Zea mays subsp. mays
  peptide (1)..(238): Ceres Seq. ID no. 12404379
  misc_feature (19)..(66): Pfam Name: Zinc finger, C3HC4 type (RING finger) Pfam Description: Zinc finger, C3HC4 type (RING finger)
  misc_feature (2)..(238): Homolog of NCBI NO: 34905532 NR Description: B1146F03.23 [Oryza sativa (japonica
  misc_feature (18)..(238): Homolog of NCBI NO: 15227065 NR Description: unknown protein; protein id: At2g02960.1, by cDNA: gi_17529099, supported by cDNA: gi_20259116 [Arabidopsis >gi|25365876|pir||F84442 hypothetical protein At2g02960
  misc_feature (16)..(202): Homolog of NCBI NO: 22325409 NR Description: similar to nucleoside triphosphatase, putative;
  misc_feature (1)..(203): Homolog of NCBI NO: 18424590 NR Description: expressed protein; protein id: At5g62460.1, by cDNA: gi_16974606 [Arabidopsis thaliana] gene_id:K19B1.7~unknown protein [Arabidopsis thaliana]
  misc_feature (2)..(203): Homolog of NCBI NO: 15223693 NR Description: nucleoside triphosphatase, putative; protein id:
  misc_feature (2)..(203): Homolog of NCBI NO: 26451292 NR Description: unknown protein [Arabidopsis thaliana]
  misc_feature (2)..(203): Homolog of NCBI NO: 21537046 NR Description: nucleoside triphosphatase, putative [Arabidopsis
  misc_feature (10)..(175): Homolog of NCBI NO: 25518349 NR Description: hypothetical protein T14P4.10 - Arabidopsis >gi|9972376|gb|AAG10626.1|AC022521_4 Unknown protein [Arabidopsis
  misc_feature (18)..(206): Homolog of NCBI NO: 30692888 NR Description: expressed protein [Arabidopsis thaliana]
  misc_feature (2)..(203): Homolog of NCBI NO: 25365878 NR Description: F14L17.2 protein - Arabidopsis thaliana
MEQEEEACSTCCSSPLRQCRICHDEEDERRSAMESPCACSGSLKYAHRGCVQRWCDEKGSTVCEICLQNFETGYTVPPKKTQPADVAVTIRDSVAVPRQQNEPEDEEEQVAAALIGASDPEYAECARAAGRSASWSCCRSVAVTFTIVLLLRHLVTVVTLGAANQQQFAFSLLTVYLLRASGILLPFYVVMRLICVIHQGQRQYRLHLLQEQRRHALRRLAWLHGQGQHQQPHAILVR

SEQ ID NO: 6778 - DNA, 974 bp, Zea mays subsp. mays
  misc_feature (1)..(974): Ceres Seq. ID no. 12402349
  misc_feature: MA Experiment ID: 108523 Result: Down-regulated in Transcription
  misc_feature: MA Experiment 108523 PARAMETER Experiment Name: Zm_42deg_Heat_P Parameter: Age (day) Value: 8
  misc_feature: MA Experiment 108523 PARAMETER Experiment Name: Zm_42deg_Heat_P Parameter: Organism Value: Zea mays
  misc_feature: MA Experiment 108523 PARAMETER Experiment Name: Zm_42deg_Heat_P Parameter: Plant Line Value: 35A19
  misc_feature: MA Experiment 108523 PARAMETER Experiment Name: Zm_42deg_Heat_P Parameter: Temperature (deg C) Value: 42 vs. 22
  misc_feature: MA Experiment 108523 PARAMETER Experiment Name: Zm_42deg_Heat_P Parameter: Timepoint (hr) Value: 6
  misc_feature: MA Experiment 108523 PARAMETER Experiment Name: Zm_42deg_Heat_P Parameter: Tissue Value: Aerial
  misc_feature: MA Experiment ID: 108527 Result: Down-regulated in Transcription
  misc_feature: MA Experiment 108527 PARAMETER Experiment Name: Zm_5mM_NO_P Parameter: Age (day) Value: 8
  misc_feature: MA Experiment 108527 PARAMETER Experiment Name: Zm_5mM_NO_P Parameter: Organism Value: Zea mays
  misc_feature: MA Experiment 108527 PARAMETER Experiment Name: Zm_5mM_NO_P Parameter: Plant Line Value: 35A19
  misc_feature: MA Experiment 108527 PARAMETER Experiment Name: Zm_5mM_NO_P Parameter: Timepoint (hr) Value: 6
  misc_feature: MA Experiment 108527 PARAMETER Experiment Name: Zm_5mM_NO_P Parameter: Tissue Value: Aerial
  misc_feature: MA Experiment 108527 PARAMETER Experiment Name: Zm_5mM_NO_P Parameter: Treatment Value: 5mM NO vs. No Treatment
  misc_feature: MA Experiment ID: 108528 Result: Up-regulated in Transcription
  misc_feature: MA Experiment 108528 PARAMETER Experiment Name: Zm_Imbibed_Seeds_P Parameter: Age (day) Value: 5 vs. 2
  misc_feature: MA Experiment 108528 PARAMETER Experiment Name: Zm_Imbibed_Seeds_P Parameter: Organism Value: Zea mays
  misc_feature: MA Experiment 108528 PARAMETER Experiment Name: Zm_Imbibed_Seeds_P Parameter: Plant Line Value: 35A19
  misc_feature: MA Experiment 108528 PARAMETER Experiment Name: Zm_Imbibed_Seeds_P Parameter: Tissue Value: Aerial vs. Embryo
  misc_feature: MA Experiment ID: 108530 Result: Up-regulated in Transcription
  misc_feature: MA Experiment 108530 PARAMETER Experiment Name: Zm_Imbibed_Seeds_P Parameter: Age (day) Value: 6 vs. 2
  misc_feature: MA Experiment 108530 PARAMETER Experiment Name: Zm_Imbibed_Seeds_P Parameter: Organism Value: Zea mays
  misc_feature: MA Experiment 108530 PARAMETER Experiment Name: Zm_Imbibed_Seeds_P Parameter: Plant Line Value: 35A19
  misc_feature: MA Experiment 108530 PARAMETER Experiment Name: Zm_Imbibed_Seeds_P Parameter: Tissue Value: Aerial vs. Embryo
  misc_feature: MA Experiment ID: 108534 Result: Down-regulated in Transcription
  misc_feature: MA Experiment 108534 PARAMETER Experiment Name: Zm_4deg_Cold_P Parameter: Age (hr) Value: 8
  misc_feature: MA Experiment 108534 PARAMETER Experiment Name: Zm_4deg_Cold_P Parameter: Organism Value: Zea mays
  misc_feature: MA Experiment 108534 PARAMETER Experiment Name: Zm_4deg_Cold_P Parameter: Plant Line Value: 35A19
  misc_feature: MA Experiment 108534 PARAMETER Experiment Name: Zm_4deg_Cold_P Parameter: Temperature (deg C) Value: 4 vs. 22
  misc_feature: MA Experiment 108534 PARAMETER Experiment Name: Zm_4deg_Cold_P Parameter: Timepoint (hr) Value: 6
  misc_feature: MA Experiment 108534 PARAMETER Experiment Name: Zm_4deg_Cold_P Parameter: Tissue Value: Aerial
  misc_feature: MA Experiment ID: 108536 Result: Down-regulated in Transcription
  misc_feature: MA Experiment 108536 PARAMETER Experiment Name: Zm_Meristem_P Parameter: Age (day) Value: 8
  misc_feature: MA Experiment 108536 PARAMETER Experiment Name: Zm_Meristem_P Parameter: Organism Value: Zea mays
  misc_feature: MA Experiment 108536 PARAMETER Experiment Name: Zm_Meristem_P Parameter: Plant Line Value: 35A19
  misc_feature: MA Experiment 108536 PARAMETER Experiment Name: Zm_Meristem_P Parameter: Tissue Value: Shoot Meristem vs. Above Shoot Meristem
  misc_feature: MA Experiment ID: 108543 Result: Up-regulated in Transcription
  misc_feature: MA Experiment ID: 108545 Result: Up-regulated in Transcription
  misc_feature: MA Experiment 108545 PARAMETER Experiment Name: Zm_Imbibed_Seeds_P Parameter: Age (day) Value: 3 vs. 2
  misc_feature: MA Experiment 108545 PARAMETER Experiment Name: Zm_Imbibed_Seeds_P Parameter: Organism Value: Zea mays
  misc_feature: MA Experiment 108545 PARAMETER Experiment Name: Zm_Imbibed_Seeds_P Parameter: Plant Line Value: 35A19
  misc_feature: MA Experiment 108545 PARAMETER Experiment Name: Zm_Imbibed_Seeds_P Parameter: Tissue Value: Aerial vs. Embryo
  misc_feature: MA Experiment ID: 108546 Result: Down-regulated in Transcription
  misc_feature: MA Experiment 108546 PARAMETER Experiment Name: Zm_Imbibed_Seeds_P Parameter: Age (day) Value: 3 vs. 2
  misc_feature: MA Experiment 108546 PARAMETER Experiment Name: Zm_Imbibed_Seeds_P Parameter: Organism Value: Zea mays
  misc_feature: MA Experiment 108546 PARAMETER Experiment Name: Zm_Imbibed_Seeds_P Parameter: Plant Line Value: 35A19
  misc_feature: MA Experiment 108546 PARAMETER Experiment Name: Zm_Imbibed_Seeds_P Parameter: Tissue Value: Roots vs. Embryo
  misc_feature: MA Experiment ID: 108547 Result: Up-regulated in Transcription
  misc_feature: MA Experiment 108547 PARAMETER Experiment Name: Zm_Imbibed_Seeds_P Parameter: Age (day) Value: 4 vs. 2
  misc_feature: MA Experiment 108547 PARAMETER Experiment Name: Zm_Imbibed_Seeds_P Parameter: Organism Value: Zea mays
  misc_feature: MA Experiment 108547 PARAMETER Experiment Name: Zm_Imbibed_Seeds_P Parameter: Plant Line Value: 35A19
  misc_feature: MA Experiment 108547 PARAMETER Experiment Name: Zm_Imbibed_Seeds_P Parameter: Tissue Value: Aerial vs. Embryo
  misc_feature: MA Experiment ID: 108556 Result: Up-regulated in Transcription
  misc_feature: MA Experiment 108556 PARAMETER Experiment Name: Zm_Drought_P Parameter: Age (day) Value: 9
  misc_feature: MA Experiment 108556 PARAMETER Experiment Name: Zm_Drought_P Parameter: Organism Value: Zea mays
  misc_feature: MA Experiment 108556 PARAMETER Experiment Name: Zm_Drought_P Parameter: Plant Line Value: 35A19
  misc_feature: MA Experiment 108556 PARAMETER Experiment Name: Zm_Drought_P Parameter: Timepoint (hr) Value: 24
  misc_feature: MA Experiment 108556 PARAMETER Experiment Name: Zm_Drought_P Parameter: Tissue Value: Aerial
  misc_feature: MA Experiment 108556 PARAMETER Experiment Name: Zm_Drought_P Parameter: Treatment Value: Drought vs. No Drought
  misc_feature: MA Experiment ID: 20000480 Result: Up-regulated in Transcription
  misc_feature: MA Experiment 20000480 PARAMETER Experiment Name: Zm_Drought_P Parameter: Age (day) Value: 11
  misc_feature: MA Experiment 20000480 PARAMETER Experiment Name: Zm_Drought_P Parameter: Organism Value: Zea mays
  misc_feature: MA Experiment 20000480 PARAMETER Experiment Name: Zm_Drought_P Parameter: Plant Line Value: 35A19
  misc_feature: MA Experiment 20000480 PARAMETER Experiment Name: Zm_Drought_P Parameter: Timepoint (hr) Value: 72
  misc_feature: MA Experiment 20000480 PARAMETER Experiment Name: Zm_Drought_P Parameter: Tissue Value: Aerial
  misc_feature: MA Experiment 20000480 PARAMETER Experiment Name: Zm_Drought_P Parameter: Treatment Value: Drought vs. No Drought
  misc_feature: MA Experiment ID: 20000492 Result: Down-regulated in Transcription
  misc_feature: MA Experiment 20000492 PARAMETER Experiment Name: Zm_Hybrid_Seed_Dev_P Parameter: DAP Value: 12
  misc_feature: MA Experiment 20000492 PARAMETER Experiment Name: Zm_Hybrid_Seed_Dev_P Parameter: Organism Value: Zea mays
  misc_feature: MA Experiment 20000492 PARAMETER Experiment Name: Zm_Hybrid_Seed_Dev_P Parameter: Plant Line Value: 35A19
  misc_feature: MA Experiment 20000492 PARAMETER Experiment Name: Zm_Hybrid_Seed_Dev_P Parameter: Tissue Value: Fert Kernel vs. Unfert Floret
  misc_feature: MA Experiment ID: 20000535 Result: Down-regulated in Transcription
  misc_feature: MA Experiment 20000535 PARAMETER Experiment Name: Zm_Hybrid_Seed_Dev_P Parameter: DAP Value: 30 vs. 12
  misc_feature: MA Experiment 20000535 PARAMETER Experiment Name: Zm_Hybrid_Seed_Dev_P Parameter: Organism Value: Zea mays
  misc_feature: MA Experiment 20000535 PARAMETER Experiment Name: Zm_Hybrid_Seed_Dev_P Parameter: Plant Line Value: 35A19
  misc_feature: MA Experiment 20000535 PARAMETER Experiment Name: Zm_Hybrid_Seed_Dev_P Parameter: Tissue Value: Embryo vs. Unfert Floret
  misc_feature: MA Experiment ID: 20000626 Result: Down-regulated in Transcription
  misc_feature: MA Experiment 20000626 PARAMETER Experiment Name: Zm_Herbicide-Treatments_P Parameter: Timepoint (hr) Value: 12
  misc_feature: MA Experiment 20000626 PARAMETER Experiment Name: Zm_Herbicide-Treatments_P Parameter: Tissue Value: Aerial
  misc_feature: MA Experiment 20000626 PARAMETER Experiment Name: Zm_Herbicide-Treatments_P Parameter: Treatment Value: Roundup vs. No Treatment
acggatatcttcgccaaccgctgcgtcgcgagctcgccgccatggcattggctctccccctcgcccgcctcgtccccgcctgccagtgccaggcttggccccacctgcgctttcggaagcgccacgtctccttcgccgctcacgccagttctcgcgccgccttcgctgcctgcgcggcggcccctgccctccaggtccaggcgccggaggcggaggcggaggcggagacggtcgagcaagtgggcccgaagacacgcctcgtcgcgcagaacatcccgtgggactgcacggccgacgaaatgcgcgcgctcttcgagagccacggctccgtcgtcggcgtcgagctttcaatgtacagcgccaataaaaacagaggattggcgtttgtaaccatggggttcagaagaggaggctcttgcagctctcacccatctcaattcaactattttaaatgataggaaaataaaggtggacttcgcaaggcctagaaagaagcaacctaagcaacctgctgtggtatcggatgccacggaaaagtatgttgtgtttgtcgggaatttgacatggagggtaagaaatcgtcaccttcgggaattatttgcctctgccccaggtgtggtatcagctgaagttatcttccataccaccactccgagacgatctgctggctacgcgtttgtttctttttcttcgaaagagagcgcaggggccgccatatctgctttcaacggaaagatattgatgggacggcccattaacgtgatgttcaaagatgaaaatggtgaaaagaatgaatcttcttctgtcccaaagaaggccgaggtggaaccatctgatggccagagtgataagctaagcatgaactgttaacgaaacaaataggtcatatctgtcattacacaaatatatgtatattctgacccatggtatttccttttcagaaatagttatgtcccttgttttattgatttgtc

SEQ ID NO: 6779 - protein, 150 aa, Zea mays subsp. mays
  peptide (1)..(150): Ceres Seq. ID no. 12402350
  misc_feature (33)..(131): Homolog of NCBI NO: 22328520 NR Description: RRM-containing protein; protein id: At4g09040.1,
  misc_feature (4)..(131): Homolog of NCBI NO: 38346724 NR Description: OSJNBa0086O06.22 [Oryza sativa (japonica
  misc_feature (49)..(150): Homolog of NCBI NO: 15226983 NR Description: chloroplast RNA-binding protein cp33, putative; id: At2g35410.1, supported by cDNA: gi_14596022 [Arabidopsis >gi|25386549|pir||C84768 hypothetical protein At2g35410
  misc_feature (69)..(132): Homolog of NCBI NO: 681912 NR Description: cp33 [Arabidopsis thaliana]
  misc_feature (69)..(132): Homolog of NCBI NO: 15231200 NR Description: chloroplast RNA-binding protein cp33; protein id: supported by cDNA: 14246., supported by cDNA: gi_14517543, by cDNA: gi_17064757, supported by cDNA: gi_18700225 protein cp33
  misc_feature (69)..(132): Homolog of NCBI NO: 17064758 NR Description: ubiquitin / ribosomal protein CEP52 [Arabidopsis
  misc_feature (33)..(131): Homolog of NCBI NO: 25407474 NR Description: hypothetical protein AT4g09050 [imported] - thaliana >gi|7267548|emb|CAB78029.1| putative protein
GYLRQPLRRELAAMALALPLARLVPACQCQAWPHLRFRKRHVSFAAHASSRAAFAACAAAPALQVQAPEAEAEAETVEQVGPKTRLVAQNIPWDCTADEMRALFESHGSVVGVELSMYSANKNRGLAFVTMGFRRGGSCSSHPSQFNYFK

SEQ ID NO: 6780 - protein, 137 aa, Zea mays subsp. mays
  peptide (1)..(137): Ceres Seq. ID no. 12402351
  misc_feature (20)..(118): Homolog of NCBI NO: 22328520 NR Description: RRM-containing protein; protein id: At4g09040.1,
  misc_feature (1)..(118): Homolog of NCBI NO: 38346724 NR Description: OSJNBa0086O06.22 [Oryza sativa (japonica
  misc_feature (36)..(137): Homolog of NCBI NO: 15226983 NR Description: chloroplast RNA-binding protein cp33, putative; id: At2g35410.1, supported by cDNA: gi_14596022 [Arabidopsis >gi|25386549|pir||C84768 hypothetical protein At2g35410
  misc_feature (56)..(119): Homolog of NCBI NO: 681912 NR Description: cp33 [Arabidopsis thaliana]
  misc_feature (56)..(119): Homolog of NCBI NO: 15231200 NR Description: chloroplast RNA-binding protein cp33; protein id: supported by cDNA: 14246., supported by cDNA: gi_14517543, by cDNA: gi_17064757, supported by cDNA: gi_18700225 protein cp33
  misc_feature (56)..(119): Homolog of NCBI NO: 17064758 NR Description: ubiquitin / ribosomal protein CEP52 [Arabidopsis
  misc_feature (20)..(118): Homolog of NCBI NO: 25407474 NR Description: hypothetical protein AT4g09050 [imported] - thaliana >gi|7267548|emb|CAB78029.1| putative protein
MALALPLARLVPACQCQAWPHLRFRKRHVSFAAHASSRAAFAACAAAPALQVQAPEAEAEAETVEQVGPKTRLVAQNIPWDCTADEMRALFESHGSVVGVELSMYSANKNRGLAFVTMGFRRGGSCSSHPSQFNYFK

SEQ ID NO: 6781 - protein, 129 aa, Zea mays subsp. mays
  peptide (1)..(129): Ceres Seq. ID no. 12402352
TDIFANRCVASSPPWHWLSPSPASSPPASARLGPTCAFGSATSPSPLTPVLAPPSLPARRPLPSRSRRRRRRRRRRRSSKWARRHASSRRTSRGTARPTKCARSSRATAPSSASSFQCTAPIKTEDWRL

SEQ ID NO: 6782 - DNA, 1075 bp, Zea mays subsp. mays
  misc_feature (1)..(1075): Ceres Seq. ID no. 12353875
  misc_feature: MA Experiment ID: 108504 Result: Up-regulated in Transcription
  misc_feature: MA Experiment 108504 PARAMETER Experiment Name: Zm_Drought_P Parameter: Age (day) Value: 8
  misc_feature: MA Experiment 108504 PARAMETER Experiment Name: Zm_Drought_P Parameter: Organism Value: Zea mays
  misc_feature: MA Experiment 108504 PARAMETER Experiment Name: Zm_Drought_P Parameter: Plant Line Value: 35A19
  misc_feature: MA Experiment 108504 PARAMETER Experiment Name: Zm_Drought_P Parameter: Timepoint (hr) Value: 12
  misc_feature: MA Experiment 108504 PARAMETER Experiment Name: Zm_Drought_P Parameter: Tissue Value: Aerial
  misc_feature: MA Experiment 108504 PARAMETER Experiment Name: Zm_Drought_P Parameter: Treatment Value: Drought vs. No Drought
  misc_feature: MA Experiment ID: 108523 Result: Up-regulated in Transcription
  misc_feature: MA Experiment 108523 PARAMETER Experiment Name: Zm_42deg_Heat_P Parameter: Age (day) Value: 8
  misc_feature: MA Experiment 108523 PARAMETER Experiment Name: Zm_42deg_Heat_P Parameter: Organism Value: Zea mays
  misc_feature: MA Experiment 108523 PARAMETER Experiment Name: Zm_42deg_Heat_P Parameter: Plant Line Value: 35A19
  misc_feature: MA Experiment 108523 PARAMETER Experiment Name: Zm_42deg_Heat_P Parameter: Temperature (deg C) Value: 42 vs. 22
  misc_feature: MA Experiment 108523 PARAMETER Experiment Name: Zm_42deg_Heat_P Parameter: Timepoint (hr) Value: 6
  misc_feature: MA Experiment 108523 PARAMETER Experiment Name: Zm_42deg_Heat_P Parameter: Tissue Value: Aerial
  misc_feature: MA Experiment ID: 108529 Result: Up-regulated in Transcription
  misc_feature: MA Experiment 108529 PARAMETER Experiment Name: Zm_Imbibed_Seeds_P Parameter: Age (day) Value: 5 vs. 2
  misc_feature: MA Experiment 108529 PARAMETER Experiment Name: Zm_Imbibed_Seeds_P Parameter: Organism Value: Zea mays
  misc_feature: MA Experiment 108529 PARAMETER Experiment Name: Zm_Imbibed_Seeds_P Parameter: Plant Line Value: 35A19
  misc_feature: MA Experiment 108529 PARAMETER Experiment Name: Zm_Imbibed_Seeds_P Parameter: Tissue Value: Roots vs. Embryo
  misc_feature: MA Experiment ID: 108535 Result: Down-regulated in Transcription
  misc_feature: MA Experiment 108535 PARAMETER Experiment Name: Zm_Meristem_P Parameter: Age (day) Value: 8
  misc_feature: MA Experiment 108535 PARAMETER Experiment Name: Zm_Meristem_P Parameter: Organism Value: Zea mays
  misc_feature: MA Experiment 108535 PARAMETER Experiment Name: Zm_Meristem_P Parameter: Plant Line Value: 35A19
  misc_feature: MA Experiment 108535 PARAMETER Experiment Name: Zm_Meristem_P Parameter: Tissue Value: Root Meristem vs. Above Root Meristem
  misc_feature: MA Experiment ID: 108556 Result: Up-regulated in Transcription
  misc_feature: MA Experiment 108556 PARAMETER Experiment Name: Zm_Drought_P Parameter: Age (day) Value: 9
  misc_feature: MA Experiment 108556 PARAMETER Experiment Name: Zm_Drought_P Parameter: Organism Value: Zea mays
  misc_feature: MA Experiment 108556 PARAMETER Experiment Name: Zm_Drought_P Parameter: Plant Line Value: 35A19
  misc_feature: MA Experiment 108556 PARAMETER Experiment Name: Zm_Drought_P Parameter: Timepoint (hr) Value: 24
  misc_feature: MA Experiment 108556 PARAMETER Experiment Name: Zm_Drought_P Parameter: Tissue Value: Aerial
  misc_feature: MA Experiment 108556 PARAMETER Experiment Name: Zm_Drought_P Parameter: Treatment Value: Drought vs. No Drought
  misc_feature: MA Experiment ID: 108559 Result: Down-regulated in Transcription
  misc_feature: MA Experiment 108559 PARAMETER Experiment Name: Zm_5mM_NO_P Parameter: Age (day) Value: 8
  misc_feature: MA Experiment 108559 PARAMETER Experiment Name: Zm_5mM_NO_P Parameter: Organism Value: Zea mays
  misc_feature: MA Experiment 108559 PARAMETER Experiment Name: Zm_5mM_NO_P Parameter: Plant Line Value: 35A19
  misc_feature: MA Experiment 108559 PARAMETER Experiment Name: Zm_5mM_NO_P Parameter: Timepoint (hr) Value: 12
  misc_feature: MA Experiment 108559 PARAMETER Experiment Name: Zm_5mM_NO_P Parameter: Tissue Value: Aerial
  misc_feature: MA Experiment 108559 PARAMETER Experiment Name: Zm_5mM_NO_P Parameter: Treatment Value: 5mM NO vs. No Treatment
  misc_feature: MA Experiment ID: 108597 Result: Up-regulated in Transcription
  misc_feature: MA Experiment 108597 PARAMETER Experiment Name: Zm_100uM_ABA_P Parameter: Age (day) Value: 9
  misc_feature: MA Experiment 108597 PARAMETER Experiment Name: Zm_100uM_ABA_P Parameter: Organism Value: Zea mays
  misc_feature: MA Experiment 108597 PARAMETER Experiment Name: Zm_100uM_ABA_P Parameter: Plant Line Value: 35A19
  misc_feature: MA Experiment 108597 PARAMETER Experiment Name: Zm_100uM_ABA_P Parameter: Timepoint (hr) Value: 24
  misc_feature: MA Experiment 108597 PARAMETER Experiment Name: Zm_100uM_ABA_P Parameter: Tissue Value: Aerial
  misc_feature: MA Experiment 108597 PARAMETER Experiment Name: Zm_100uM_ABA_P Parameter: Treatment Value: 100uM ABA vs. No Treatment
  misc_feature: MA Experiment ID: 108688 Result: Down-regulated in Transcription
  misc_feature: MA Experiment 108688 PARAMETER Experiment Name: Zm_Embryos-Flowers__P Parameter: Tissue Value: Immature Flowers vs. Aerial+
  misc_feature: MA Experiment ID: 20000477 Result: Up-regulated in Transcription
  misc_feature: MA Experiment 20000477 PARAMETER Experiment Name: Zm_5mM_SA_P Parameter: Age (day) Value: 10
  misc_feature: MA Experiment 20000477 PARAMETER Experiment Name: Zm_5mM_SA_P Parameter: Organism Value: Zea mays
  misc_feature: MA Experiment 20000477 PARAMETER Experiment Name: Zm_5mM_SA_P Parameter: Plant Line Value: 35A19
  misc_feature: MA Experiment 20000477 PARAMETER Experiment Name: Zm_5mM_SA_P Parameter: Timepoint (hr) Value: 48
  misc_feature: MA Experiment 20000477 PARAMETER Experiment Name: Zm_5mM_SA_P Parameter: Tissue Value: Aerial
  misc_feature: MA Experiment 20000477 PARAMETER Experiment Name: Zm_5mM_SA_P Parameter: Treatment Value: 5mM SA vs. No Treatment
  misc_feature: MA Experiment ID: 20000479 Result: Up-regulated in Transcription
  misc_feature: MA Experiment 20000479 PARAMETER Experiment Name: Zm_Drought_P Parameter: Age (day) Value: 10
  misc_feature: MA Experiment 20000479 PARAMETER Experiment Name: Zm_Drought_P Parameter: Organism Value: Zea mays
  misc_feature: MA Experiment 20000479 PARAMETER Experiment Name: Zm_Drought_P Parameter: Plant Line Value: 35A19
  misc_feature: MA Experiment 20000479 PARAMETER Experiment Name: Zm_Drought_P Parameter: Timepoint (hr) Value: 48
  misc_feature: MA Experiment 20000479 PARAMETER Experiment Name: Zm_Drought_P Parameter: Tissue Value: Aerial
  misc_feature: MA Experiment 20000479 PARAMETER Experiment Name: Zm_Drought_P Parameter: Treatment Value: Drought vs. No Drought
  misc_feature: MA Experiment ID: 20000480 Result: Up-regulated in Transcription
  misc_feature: MA Experiment 20000480 PARAMETER Experiment Name: Zm_Drought_P Parameter: Age (day) Value: 11
  misc_feature: MA Experiment 20000480 PARAMETER Experiment Name: Zm_Drought_P Parameter: Organism Value: Zea mays
  misc_feature: MA Experiment 20000480 PARAMETER Experiment Name: Zm_Drought_P Parameter: Plant Line Value: 35A19
  misc_feature: MA Experiment 20000480 PARAMETER Experiment Name: Zm_Drought_P Parameter: Timepoint (hr) Value: 72
  misc_feature: MA Experiment 20000480 PARAMETER Experiment Name: Zm_Drought_P Parameter: Tissue Value: Aerial
  misc_feature: MA Experiment 20000480 PARAMETER Experiment Name: Zm_Drought_P Parameter: Treatment Value: Drought vs. No Drought
  misc_feature: MA Experiment ID: 20000487 Result: Down-regulated in Transcription
  misc_feature: MA Experiment 20000487 PARAMETER Experiment Name: Zm_50mM_NH4NO3_L_to_H_P Parameter: Organism Value: Zea mays
  misc_feature: MA Experiment 20000487 PARAMETER Experiment Name: Zm_50mM_NH4NO3_L_to_H_P Parameter: Timepoint (hr) Value: 4
  misc_feature: MA Experiment 20000487 PARAMETER Experiment Name: Zm_50mM_NH4NO3_L_to_H_P Parameter: Tissue Value: Leaves
  misc_feature: MA Experiment 20000487 PARAMETER Experiment Name: Zm_50mM_NH4NO3_L_to_H_P Parameter: Treatment Value: 50mM NH4NO3 vs. 100mM Mannitol
  misc_feature: MA Experiment ID: 20000535 Result: Down-regulated in Transcription
  misc_feature: MA Experiment 20000535 PARAMETER Experiment Name: Zm_Hybrid_Seed_Dev_P Parameter: DAP Value: 30 vs. 12
  misc_feature: MA Experiment 20000535 PARAMETER Experiment Name: Zm_Hybrid_Seed_Dev_P Parameter: Organism Value: Zea mays
  misc_feature: MA Experiment 20000535 PARAMETER Experiment Name: Zm_Hybrid_Seed_Dev_P Parameter: Plant Line Value: 35A19
  misc_feature: MA Experiment 20000535 PARAMETER Experiment Name: Zm_Hybrid_Seed_Dev_P Parameter: Tissue Value: Embryo vs. Unfert Floret
  misc_feature: MA Experiment ID: 20000630 Result: Down-regulated in Transcription
  misc_feature: MA Experiment 20000630 PARAMETER Experiment Name: Zm_Herbicide-Treatments_P Parameter: Timepoint (hr) Value: 4
  misc_feature: MA Experiment 20000630 PARAMETER Experiment Name: Zm_Herbicide-Treatments_P Parameter: Tissue Value: Aerial
  misc_feature: MA Experiment 20000630 PARAMETER Experiment Name: Zm_Herbicide-Treatments_P Parameter: Treatment Value: Roundup vs. No Treatment
  misc_feature: MA Experiment ID: 20001612 Result: Down-regulated in Transcription
  misc_feature: MA Experiment 20001612 PARAMETER Experiment Name: Zm_50ppm_KNO3_L-to-H_P Parameter: Age (day) Value: 19
  misc_feature: MA Experiment 20001612 PARAMETER Experiment Name: Zm_50ppm_KNO3_L-to-H_P Parameter: Organism Value: Zea mays
  misc_feature: MA Experiment 20001612 PARAMETER Experiment Name: Zm_50ppm_KNO3_L-to-H_P Parameter: Plant Line Value: 35A19
  misc_feature: MA Experiment 20001612 PARAMETER Experiment Name: Zm_50ppm_KNO3_L-to-H_P Parameter: Timepoint (hr) Value: 8
  misc_feature: MA Experiment 20001612 PARAMETER Experiment Name: Zm_50ppm_KNO3_L-to-H_P Parameter: Tissue Value: Roots
  misc_feature: MA Experiment 20001612 PARAMETER Experiment Name: Zm_50ppm_KNO3_L-to-H_P Parameter: Treatment Value: 50ppm KNO3 vs. 50ppm KCl
attgccaacgcaacagttccgatcctccacaccagcacccgccgccgccgcctcttcccttgcgcacctgctgctgtgcggatcggtgaggcggaggagtaggatggcgagcgcggccggaggcggagcggcgggggaaggggagtggcttaaggtatcccagctcaggcccatggtggaagcgcaggaccccaacgccaaggcagtggacaacctgacgctgcgtcggttcctgcgcgcgcgcgaccacgacgtggacaaggcctccgccatgttcctcaagttcctcaagtggcggagggaggcggcgcccggcggctccgtgccggaggagcaggtgaggagggagctgtcgcaggacaagctgtgcatgggcggcgtcgacagggccggccgccccatcctcgtcgccttcgcggccaggcacttctccgccggccgtgacatggcagagttcaagagttttgttgtctacttcttcgacaagatctgtgccagaatccccagagggcaggagaaattcctctgcatcgttgatctcaagggctgggggtactcaaactgtgacgtccgggcatacattgccgctatagagatcttgcagaactactacccggagcggctcggcaaggcgctgatgatccacgtgccctacatcttcatgaaggcgtggaagatgatctaccccttcatcgacaccaacaccagggacaagttcgtgttcgtggaggacaagagcctgcaggagacgctgcggcgggagatcgacgaggggcagctcccggagttcctcggcggcaagatggacgtgatcccactcaaggactatggcgtgcagcagcagcctcaggccgtgtaatagccatgccatgcgtagcatacacgagttgtggctaggagcatagcatggcaataactgtgtagctgctgtgaaagtgaaaatgaaacgttgcgctgtttagccgggtcaattgaccagcccaactgcagatctctgggctaccactatgaacagcaagaactgtttcccttatccttttcagccaaactaatcaaaccagaaaatgtttcttgt

SEQ ID NO: 6783 - protein, 285 aa, Zea mays subsp. mays
  peptide (1)..(285): Ceres Seq. ID no. 12353876
  misc_feature (121)..(268): Pfam Name: CRAL/TRIO domain Pfam Description: CRAL/TRIO domain
  misc_feature (46)..(275): Homolog of NCBI NO: 15223439 NR Description: SEC14 cytosolic factor, putative; protein id: supported by cDNA: 20163. [Arabidopsis thaliana]
  misc_feature (41)..(275): Homolog of NCBI NO: 34907052 NR Description: sec14 like protein [Oryza sativa (japonica >gi|20160730|dbj|BAB89672.1| sec14 like protein [Oryza sativa
  misc_feature (41)..(275): Homolog of NCBI NO: 2286121 NR Description: sec14 like protein [Oryza sativa]
  misc_feature (48)..(273): Homolog of NCBI NO: 27573358 NR Description: putative phosphatidylinositol/phosphatidylcholine
  misc_feature (43)..(275): Homolog of NCBI NO: 17226662 NR Description: polyphosphoinositide binding protein [Gossypium
LPTQQFRSSTPAPAAAASSLAHLLLCGSVRRRSRMASAAGGGAAGEGEWLKVSQLRPMVEAQDPNAKAVDNLTLRRFLRARDHDVDKASAMFLKFLKWRREAAPGGSVPEEQVRRELSQDKLCMGGVDRAGRPILVAFAARHFSAGRDMAEFKSFVVYFFDKICARIPRGQEKFLCIVDLKGWGYSNCDVRAYIAAIEILQNYYPERLGKALMIHVPYIFMKAWKMIYPFIDTNTRDKFVFVEDKSLQETLRREIDEGQLPEFLGGKMDVIPLKDYGVQQQPQAV

SEQ ID NO: 6784 - protein, 251 aa, Zea mays subsp. mays
  peptide (1)..(251): Ceres Seq. ID no. 12353877
  misc_feature (87)..(234): Pfam Name: CRAL/TRIO domain Pfam Description: CRAL/TRIO domain
  misc_feature (7)..(241): Homolog of NCBI NO: 34907052 NR Description: sec14 like protein [Oryza sativa (japonica >gi|20160730|dbj|BAB89672.1| sec14 like protein [Oryza sativa
  misc_feature (7)..(241): Homolog of NCBI NO: 2286121 NR Description: sec14 like protein [Oryza sativa]
  misc_feature (14)..(239): Homolog of NCBI NO: 27573358 NR Description: putative phosphatidylinositol/phosphatidylcholine
  misc_feature (9)..(241): Homolog of NCBI NO: 17226662 NR Description: polyphosphoinositide binding protein [Gossypium
  misc_feature (12)..(241): Homolog of NCBI NO: 15223439 NR Description: SEC14 cytosolic factor, putative; protein id: supported by cDNA: 20163. [Arabidopsis thaliana]
MASAAGGGAAGEGEWLKVSQLRPMVEAQDPNAKAVDNLTLRRFLRARDHDVDKASAMFLKFLKWRREAAPGGSVPEEQVRRELSQDKLCMGGVDRAGRPILVAFAARHFSAGRDMAEFKSFVVYFFDKICARIPRGQEKFLCIVDLKGWGYSNCDVRAYIAAIEILQNYYPERLGKALMIHVPYIFMKAWKMIYPFIDTNTRDKFVFVEDKSLQETLRREIDEGQLPEFLGGKMDVIPLKDYGVQQQPQAV

SEQ ID NO: 6785 - protein, 228 aa, Zea mays subsp. mays
  peptide (1)..(228): Ceres Seq. ID no. 12353878
  misc_feature (64)..(211): Pfam Name: CRAL/TRIO domain Pfam Description: CRAL/TRIO domain
  misc_feature (1)..(218): Homolog of NCBI NO: 34907052 NR Description: sec14 like protein [Oryza sativa (japonica >gi|20160730|dbj|BAB89672.1| sec14 like protein [Oryza sativa
  misc_feature (1)..(218): Homolog of NCBI NO: 2286121 NR Description: sec14 like protein [Oryza sativa]
  misc_feature (1)..(216): Homolog of NCBI NO: 27573358 NR Description: putative phosphatidylinositol/phosphatidylcholine
  misc_feature (1)..(218): Homolog of NCBI NO: 17226662 NR Description: polyphosphoinositide binding protein [Gossypium
  misc_feature (1)..(218): Homolog of NCBI NO: 15223439 NR Description: SEC14 cytosolic factor, putative; protein id: supported by cDNA: 20163. [Arabidopsis thaliana]
MVEAQDPNAKAVDNLTLRRFLRARDHDVDKASAMFLKFLKWRREAAPGGSVPEEQVRRELSQDKLCMGGVDRAGRPILVAFAARHFSAGRDMAEFKSFVVYFFDKICARIPRGQEKFLCIVDLKGWGYSNCDVRAYIAAIEILQNYYPERLGKALMIHVPYIFMKAWKMIYPFIDTNTRDKFVFVEDKSLQETLRREIDEGQLPEFLGGKMDVIPLKDYGVQQQPQAV

SEQ ID NO: 6786 - DNA, 478 bp, Zea mays subsp. mays
  misc_feature (1)..(478): Ceres Seq. ID no. 13564651
  misc_feature: MA Experiment ID: 108535 Result: Down-regulated in Transcription
  misc_feature: MA Experiment 108535 PARAMETER Experiment Name: Zm_Meristem_P Parameter: Age (day) Value: 8
  misc_feature: MA Experiment 108535 PARAMETER Experiment Name: Zm_Meristem_P Parameter: Organism Value: Zea mays
  misc_feature: MA Experiment 108535 PARAMETER Experiment Name: Zm_Meristem_P Parameter: Plant Line Value: 35A19
  misc_feature: MA Experiment 108535 PARAMETER Experiment Name: Zm_Meristem_P Parameter: Tissue Value: Root Meristem vs. Above Root Meristem
  misc_feature: MA Experiment ID: 20000492 Result: Up-regulated in Transcription
  misc_feature: MA Experiment 20000492 PARAMETER Experiment Name: Zm_Hybrid_Seed_Dev_P Parameter: DAP Value: 12
  misc_feature: MA Experiment 20000492 PARAMETER Experiment Name: Zm_Hybrid_Seed_Dev_P Parameter: Organism Value: Zea mays
  misc_feature: MA Experiment 20000492 PARAMETER Experiment Name: Zm_Hybrid_Seed_Dev_P Parameter: Plant Line Value: 35A19
  misc_feature: MA Experiment 20000492 PARAMETER Experiment Name: Zm_Hybrid_Seed_Dev_P Parameter: Tissue Value: Fert Kernel vs. Unfert Floret
tatccctggtgctttgttctttgatgttgatggaatatccgacagaacatctagtttaccacacatgctgccatctgaaaaggcattttcagctgctgtatctgctcttggcatctacaacaaagacgggatagtagtttatgatggaaaggggctgttcagtgctgctcgtgtttggtggatgttccgtgtatttggacatgataaagtttgggtgttggatggaggtttgccccaatggcgcgcttctgggtatgatgttgaatcaagtccctctagtgatgccatcctaaaggccagtgcagctggtgaagcaattgagaaagtttaccagggtcaattggttggtccaaccacatttgaagcaaagttgcagcctcatcttctttggagtcttgatcaggtgaaagagaacatcaacacccagacacatcaacttatagatgctcgatcaaaacctagatttgatggtgcagtt

SEQ ID NO: 6787 - protein, 159 aa, Zea mays subsp. mays
  peptide (1)..(159): Ceres Seq. ID no. 13564652
  misc_feature (1)..(83): Pfam Name: Rhodanese-like domain Pfam Description: Rhodanese-like domain
  misc_feature (1)..(158): Homolog of NCBI NO: 4406372 NR Description: thiosulfate sulfurtransferase [Datisca glomerata]
  misc_feature (1)..(157): Homolog of NCBI NO: 18412307 NR Description: mercaptopyruvate sulfurtransferase (Mst1/Rdh1) thaliana] >gi|7488372|pir||T01034 thiosulfate sulfurtransferase
  misc_feature (1)..(157): Homolog of NCBI NO: 18394364 NR Description: mercaptopyruvate sulfurtransferase (Mst2/Rdh2) thaliana] >gi|25288790|pir||T52663 thiosulfate sulfurtransferase
  misc_feature (1)..(157): Homolog of NCBI NO: 30684873 NR Description: mercaptopyruvate sulfurtransferase (Mst2/Rdh2)
  misc_feature (1)..(157): Homolog of NCBI NO: 25456716 NR Description: thiosulfate sulfurtransferase (EC 2.8.1.1)
  misc_feature (1)..(158): Homolog of NCBI NO: 25288797 NR Description: hypothetical protein F3O9.26 [imported] - thaliana >gi|4966366|gb|AAD34697.1|AC006341_25 Similar to thiosulfate sulfurtransferase (TST) from Datisca glomerata and
  misc_feature (1)..(157): Homolog of NCBI NO: 25288794 NR Description: thiosulfate sulfurtransferase (EC 2.8.1.1) Mst1
  misc_feature (1)..(158): Homolog of NCBI NO: 14571545 NR Description: thiosulfate transferase [Triticum aestivum]
  misc_feature (1)..(101): Homolog of NCBI NO: 22960827 NR Description: hypothetical protein [Rhodopseudomonas palustris]
  misc_feature (115)..(158): Homolog of NCBI NO: 22960827 NR Description: hypothetical protein [Rhodopseudomonas palustris]
IPGALFFDVDGISDRTSSLPHMLPSEKAFSAAVSALGIYNKDGIVVYDGKGLFSAARVWWMFRVFGHDKVWVLDGGLPQWRASGYDVESSPSSDAILKASAAGEAIEKVYQGQLVGPTTFEAKLQPHLLWSLDQVKENINTQTHQLIDARSKPRFDGAV

SEQ ID NO: 6788 - protein, 138 aa, Zea mays subsp. mays
  peptide (1)..(138): Ceres Seq. ID no. 13564653
  misc_feature (1)..(62): Pfam Name: Rhodanese-like domain Pfam Description: Rhodanese-like domain
  misc_feature (1)..(137): Homolog of NCBI NO: 4406372 NR Description: thiosulfate sulfurtransferase [Datisca glomerata]
  misc_feature (1)..(136): Homolog of NCBI NO: 18412307 NR Description: mercaptopyruvate sulfurtransferase (Mst1/Rdh1) thaliana] >gi|7488372|pir||T01034 thiosulfate sulfurtransferase
  misc_feature (1)..(136): Homolog of NCBI NO: 18394364 NR Description: mercaptopyruvate sulfurtransferase (Mst2/Rdh2) thaliana] >gi|25288790|pir||T52663 thiosulfate sulfurtransferase
  misc_feature (1)..(136): Homolog of NCBI NO: 30684873 NR Description: mercaptopyruvate sulfurtransferase (Mst2/Rdh2)
  misc_feature (1)..(136): Homolog of NCBI NO: 25456716 NR Description: thiosulfate sulfurtransferase (EC 2.8.1.1)
  misc_feature (1)..(137): Homolog of NCBI NO: 25288797 NR Description: hypothetical protein F3O9.26 [imported] - thaliana >gi|4966366|gb|AAD34697.1|AC006341_25 Similar to thiosulfate sulfurtransferase (TST) from Datisca glomerata and
  misc_feature (1)..(136): Homolog of NCBI NO: 25288794 NR Description: thiosulfate sulfurtransferase (EC 2.8.1.1) Mst1
  misc_feature (1)..(137): Homolog of NCBI NO: 14571545 NR Description: thiosulfate transferase [Triticum aestivum]
  misc_feature (1)..(80): Homolog of NCBI NO: 22960827 NR Description: hypothetical protein [Rhodopseudomonas palustris]
  misc_feature (94)..(137): Homolog of NCBI NO: 22960827 NR Description: hypothetical protein [Rhodopseudomonas palustris]
MLPSEKAFSAAVSALGIYNKDGIVVYDGKGLFSAARVWWMFRVFGHDKVWVLDGGLPQWRASGYDVESSPSSDAILKASAAGEAIEKVYQGQLVGPTTFEAKLQPHLLWSLDQVKENINTQTHQLIDARSKPRFDGAV

SEQ ID NO: 6789 - protein, 99 aa, Zea mays subsp. mays
  peptide (1)..(99): Ceres Seq. ID no. 13564654
  misc_feature (1)..(98): Homolog of NCBI NO: 4406372 NR Description: thiosulfate sulfurtransferase [Datisca glomerata]
  misc_feature (1)..(97): Homolog of NCBI NO: 18412307 NR Description: mercaptopyruvate sulfurtransferase (Mst1/Rdh1) thaliana] >gi|7488372|pir||T01034 thiosulfate sulfurtransferase
  misc_feature (1)..(97): Homolog of NCBI NO: 18394364 NR Description: mercaptopyruvate sulfurtransferase (Mst2/Rdh2) thaliana] >gi|25288790|pir||T52663 thiosulfate sulfurtransferase
  misc_feature (1)..(97): Homolog of NCBI NO: 30684873 NR Description: mercaptopyruvate sulfurtransferase (Mst2/Rdh2)
  misc_feature (1)..(97): Homolog of NCBI NO: 25456716 NR Description: thiosulfate sulfurtransferase (EC 2.8.1.1)
  misc_feature (1)..(98): Homolog of NCBI NO: 25288797 NR Description: hypothetical protein F3O9.26 [imported] - thaliana >gi|4966366|gb|AAD34697.1|AC006341_25 Similar to thiosulfate sulfurtransferase (TST) from Datisca glomerata and
  misc_feature (1)..(97): Homolog of NCBI NO: 25288794 NR Description: thiosulfate sulfurtransferase (EC 2.8.1.1) Mst1
  misc_feature (1)..(98): Homolog of NCBI NO: 14571545 NR Description: thiosulfate transferase [Triticum aestivum]
  misc_feature (1)..(41): Homolog of NCBI NO: 22960827 NR Description: hypothetical protein [Rhodopseudomonas palustris]
  misc_feature (55)..(98): Homolog of NCBI NO: 22960827 NR Description: hypothetical protein [Rhodopseudomonas palustris]
MFRVFGHDKVWVLDGGLPQWRASGYDVESSPSSDAILKASAAGEAIEKVYQGQLVGPTTFEAKLQPHLLWSLDQVKENINTQTHQLIDARSKPRFDGAV

SEQ ID NO: 6790 - DNA, 825 bp, Zea mays subsp. mays
  misc_feature (1)..(825): Ceres Seq. ID no. 12351160
  misc_feature: MA Experiment ID: 108544 Result: Up-regulated in Transcription
cacacatgacacaacgacaccaactgtcctcaatccagcagccctcgagtctcgtccccgcacatcagcagagagacgccactaccaccaccgcaagcgacgacggggagatgtttctgcgacggatcctgaccggcggaggtggcctggcggcgctgagggcggcgcgcgccgtgaaggagacgacggggatcgtcggccttgaggtggcgcccaacgcgcgggaggttctcatcgggctctacacgcgtacgctcaaggagatcgaggccgtccccaaagacgagggctaccgcaaggccgttgagtccttcaccaatcaccgcctccagatctgccaggaggaggacgactggaagcgcatcgaggaccgaatcggatgcgggcaagtcgaggagctcatcgaggaggccgaggacgagctcaagctcatcgccaaaatgattgaatgggatccgtggggtgtccctgatgactacgaatgtgaggtgattgaagacgacaccccaattcctaagcatgttcctcagcaccggcccgttgctcttcctgaggagttcttcaagacactagatgccgtcaaatcagatcccgccctccaaggcgatgctcctcctcaagtgaaggcgtaaagatgagtcttcccggttatgtcttatgtcatttcacactttgctgcgctgggtagggactagtttcttgtgccatttgccagcaatgtgcttgttccgagcagaataaatttctggcgagtaccatcgaagagtgactttgaacgaagtgattcgacacagtaaatttgttgttgtccatgaatacttgctc

SEQ ID NO: 6791 - protein, 209 aa, Zea mays subsp. mays
  peptide (1)..(209): Ceres Seq. ID no. 12351161
  misc_feature (71)..(127): Pfam Name: ETC complex I subunit conserved region Pfam Description: ETC complex I subunit conserved region
  misc_feature (37)..(208): Homolog of NCBI NO: 18423437 NR Description: expressed protein; protein id: At5g52840.1, by cDNA: gi_15809965, supported by cDNA: gi_18958051 [Arabidopsis
  misc_feature (59)..(195): Homolog of NCBI NO: 16930745 NR Description: NADH-ubiquinone oxidoreductase [Retama raetam]
  misc_feature (58)..(164): Homolog of NCBI NO: 28829489 NR Description: similar to NADH-ubiquinone oxidoreductase 13 KD-B
  misc_feature (55)..(153): Homolog of NCBI NO: 233598 NR Description: 13 kDa-B polypeptide of iron-sulfur protein of NADH:ubiquinone oxidoreductase [cattle, heart, Peptide
  misc_feature (55)..(153): Homolog of NCBI NO: 28461281 NR Description: NADH dehydrogenase (ubiquinone) 1 alpha
  misc_feature (58)..(154): Homolog of NCBI NO: 37551400 NR Description: similar to NADH-ubiquinone oxidoreductase 13
  misc_feature (109)..(208): Homolog of NCBI NO: 22328992 NR Description: hypothetical protein; protein id: At4g28005.1
  misc_feature (55)..(153): Homolog of NCBI NO: 31213375 NR Description: ENSANGP00000017869 [Anopheles gambiae]
  misc_feature (55)..(153): Homolog of NCBI NO: 4826848 NR Description: NADH dehydrogenase (ubiquinone) 1 alpha
  misc_feature (55)..(153): Homolog of NCBI NO: 12844779 NR Description: unnamed protein product [Mus musculus]
HMTQRHQLSSIQQPSSLVPAHQQRDATTTTASDDGEMFLRRILTGGGGLAALRAARAVKETTGIVGLEVAPNAREVLIGLYTRTLKEIEAVPKDEGYRKAVESFTNHRLQICQEEDDWKRIEDRIGCGQVEELIEEAEDELKLIAKMIEWDPWGVPDDYECEVIEDDTPIPKHVPQHRPVALPEEFFKTLDAVKSDPALQGDAPPQVKA

SEQ ID NO: 6792 - protein, 208 aa, Zea mays subsp. mays
  peptide (1)..(208): Ceres Seq. ID no. 12351162
  misc_feature (70)..(126): Pfam Name: ETC complex I subunit conserved region Pfam Description: ETC complex I subunit conserved region
  misc_feature (36)..(207): Homolog of NCBI NO: 18423437 NR Description: expressed protein; protein id: At5g52840.1, by cDNA: gi_15809965, supported by cDNA: gi_18958051 [Arabidopsis
  misc_feature (58)..(194): Homolog of NCBI NO: 16930745 NR Description: NADH-ubiquinone oxidoreductase [Retama raetam]
  misc_feature (57)..(163): Homolog of NCBI NO: 28829489 NR Description: similar to NADH-ubiquinone oxidoreductase 13 KD-B
  misc_feature (54)..(152): Homolog of NCBI NO: 233598 NR Description: 13 kDa-B polypeptide of iron-sulfur protein of NADH:ubiquinone oxidoreductase [cattle, heart, Peptide
  misc_feature (54)..(152): Homolog of NCBI NO: 28461281 NR Description: NADH dehydrogenase (ubiquinone) 1 alpha
  misc_feature (57)..(153): Homolog of NCBI NO: 37551400 NR Description: similar to NADH-ubiquinone oxidoreductase 13
  misc_feature (108)..(207): Homolog of NCBI NO: 22328992 NR Description: hypothetical protein; protein id: At4g28005.1
  misc_feature (54)..(152): Homolog of NCBI NO: 31213375 NR Description: ENSANGP00000017869 [Anopheles gambiae]
  misc_feature (54)..(152): Homolog of NCBI NO: 4826848 NR Description: NADH dehydrogenase (ubiquinone) 1 alpha
  misc_feature (54)..(152): Homolog of NCBI NO: 30584885 NR Description: Homo sapiens NADH dehydrogenase (ubiquinone) 1
MTQRHQLSSIQQPSSLVPAHQQRDATTTTASDDGEMFLRRILTGGGGLAALRAARAVKETTGIVGLEVAPNAREVLIGLYTRTLKEIEAVPKDEGYRKAVESFTNHRLQICQEEDDWKRIEDRIGCGQVEELIEEAEDELKLIAKMIEWDPWGVPDDYECEVIEDDTPIPKHVPQHRPVALPEEFFKTLDAVKSDPALQGDAPPQVKA

SEQ ID NO: 6793 - protein, 173 aa, Zea mays subsp. mays
  peptide (1)..(173): Ceres Seq. ID no. 12351163
  misc_feature (35)..(91): Pfam Name: ETC complex I subunit conserved region Pfam Description: ETC complex I subunit conserved region
  misc_feature (1)..(172): Homolog of NCBI NO: 18423437 NR Description: expressed protein; protein id: At5g52840.1, by cDNA: gi_15809965, supported by cDNA: gi_18958051 [Arabidopsis
  misc_feature (23)..(159): Homolog of NCBI NO: 16930745 NR Description: NADH-ubiquinone oxidoreductase [Retama raetam]
  misc_feature (22)..(128): Homolog of NCBI NO: 28829489 NR Description: similar to NADH-ubiquinone oxidoreductase 13 KD-B
  misc_feature (19)..(117): Homolog of NCBI NO: 233598 NR Description: 13 kDa-B polypeptide of iron-sulfur protein of NADH:ubiquinone oxidoreductase [cattle, heart, Peptide
  misc_feature (19)..(117): Homolog of NCBI NO: 28461281 NR Description: NADH dehydrogenase (ubiquinone) 1 alpha
  misc_feature (22)..(118): Homolog of NCBI NO: 37551400 NR Description: similar to NADH-ubiquinone oxidoreductase 13
  misc_feature (73)..(172): Homolog of NCBI NO: 22328992 NR Description: hypothetical protein; protein id: At4g28005.1
  misc_feature (19)..(117): Homolog of NCBI NO: 31213375 NR Description: ENSANGP00000017869 [Anopheles gambiae]
  misc_feature (19)..(117): Homolog of NCBI NO: 4826848 NR Description: NADH dehydrogenase (ubiquinone) 1 alpha
  misc_feature (19)..(117): Homolog of NCBI NO: 30584885 NR Description: Homo sapiens NADH dehydrogenase (ubiquinone) 1
MFLRRILTGGGGLAALRAARAVKETTGIVGLEVAPNAREVLIGLYTRTLKEIEAVPKDEGYRKAVESFTNHRLQICQEEDDWKRIEDRIGCGQVEELIEEAEDELKLIAKMIEWDPWGVPDDYECEVIEDDTPIPKHVPQHRPVALPEEFFKTLDAVKSDPALQGDAPPQVKA

SEQ ID NO: 6794 - DNA, 1034 bp, Zea mays subsp. mays
  misc_feature (1)..(1034): Ceres Seq. ID no. 12402506
  misc_feature: MA Experiment ID: 108534 Result: Up-regulated in Transcription
  misc_feature: MA Experiment 108534 PARAMETER Experiment Name: Zm_4deg_Cold_P Parameter: Age (hr) Value: 8
  misc_feature: MA Experiment 108534 PARAMETER Experiment Name: Zm_4deg_Cold_P Parameter: Organism Value: Zea mays
  misc_feature: MA Experiment 108534 PARAMETER Experiment Name: Zm_4deg_Cold_P Parameter: Plant Line Value: 35A19
  misc_feature: MA Experiment 108534 PARAMETER Experiment Name: Zm_4deg_Cold_P Parameter: Temperature (deg C) Value: 4 vs. 22
  misc_feature: MA Experiment 108534 PARAMETER Experiment Name: Zm_4deg_Cold_P Parameter: Timepoint (hr) Value: 6
  misc_feature: MA Experiment 108534 PARAMETER Experiment Name: Zm_4deg_Cold_P Parameter: Tissue Value: Aerial
  misc_feature: MA Experiment ID: 108543 Result: Down-regulated in Transcription
atataatagggtagacgcccaactcgaacctgagtacctgagaaatggcggccgtctcctccacctcaaccgcctcctcctacttctccccgcagccgcagctgccgatctccaccgccgaccctgccgccagcaaaagtaggttgatgcggcagccacggcggagcagcagcttcgtgatggtggaggcgtcctctgccagcggcagcgacggcggggtggccaggacgaagagcctcacggaggacgacctggaggagctcaagggctgcctcgacctcggcttcggattcgcgtacagcgagatacccgagctctgcgggacgctgcccgcgctcgaactctgctactccatgacccggaggttcctcgacgagcagaaggcgccggggcaggaggaggaattggagcctgcgtcgccgccgctccccaattggaggatctctggcccgggtgacgatccagaagaagtgaaggcgaggttgaagtattgggctcaagctgttgcatgcactgtcaagctctgcagctaaactaaaggtcggatagaggctgaagaatctggttatatggttttgggatacagggagcggaaggggggggtgcttctgctctctggcatggaagcgacatgagtgatctcatctgcttctacaaaaaacttgggaagggggaggaaccatgatacggaacagggacagacctcgattcagaatttgagatccatggtctgagcttctacgagagggttcggaagccttgccattcctcagggtgggtggtctgcatagtgcagcgtttccaaatgcatgacctgctggttctttttgctgtttccttgtaatgatcaataggtgctctaattgtcgcactcttgtaataatgtactgaatcgaattttgagttttggccttttgggtactgatccaagggttgattagttccaacattggtttattttgtgctactctgatattgccatgtgcattatgctgttctacacgttcgtagaagttaatagcgcgtttggtttc

SEQ ID NO: 6795 - protein, 162 aa, Zea mays subsp. mays
  peptide (1)..(162): Ceres Seq. ID no. 12402507
  misc_feature (1)..(137): Homolog of NCBI NO: 34907664 NR Description: P0506A10.18 [Oryza sativa (japonica
  misc_feature (29)..(162): Homolog of NCBI NO: 30684991 NR Description: expressed protein [Arabidopsis thaliana]
  misc_feature (30)..(162): Homolog of NCBI NO: 25406874 NR Description: hypothetical protein [imported] - Arabidopsis >gi|6850316|gb|AAF29393.1|AC009999_13 Contains similarity to an protein from Arabidopsis thaliana gb|AC002335.2. ESTs
  misc_feature (4)..(162): Homolog of NCBI NO: 30689349 NR Description: expressed protein [Arabidopsis thaliana]
  misc_feature (4)..(159): Homolog of NCBI NO: 25408860 NR Description: hypothetical protein At2g43340 [imported] - thaliana >gi|2289002|gb|AAB64331.1| unknown protein [Arabidopsis
  misc_feature (30)..(155): Homolog of NCBI NO: 15221309 NR Description: unknown protein; protein id: At1g05870.1
  misc_feature (29)..(138): Homolog of NCBI NO: 25408168 NR Description: hypothetical protein At2g31560 [imported] - thaliana >gi|4582451|gb|AAD24835.1| unknown protein [Arabidopsis
  misc_feature (65)..(158): Homolog of NCBI NO: 15228829 NR Description: hypothetical protein; protein id: At3g22690.1
  misc_feature (1)..(158): Homolog of NCBI NO: 15223913 NR Description: hypothetical protein; protein id: At1g08790.1
  misc_feature (1)..(158): Homolog of NCBI NO: 15229330 NR Description: hypothetical protein; protein id: At3g04700.1 thaliana] >gi|6175172|gb|AAF04898.1|AC011437_13 hypothetical
MAAVSSTSTASSYFSPQPQLPISTADPAASKSRLMRQPRRSSSFVMVEASSASGSDGGVARTKSLTEDDLEELKGCLDLGFGFAYSEIPELCGTLPALELCYSMTRRFLDEQKAPGQEEELEPASPPLPNWRISGPGDDPEEVKARLKYWAQAVACTVKLCS

SEQ ID NO: 6796 - protein, 128 aa, Zea mays subsp. mays
  peptide (1)..(128): Ceres Seq. ID no. 12402508
  misc_feature (1)..(103): Homolog of NCBI NO: 34907664 NR Description: P0506A10.18 [Oryza sativa (japonica
  misc_feature (1)..(128): Homolog of NCBI NO: 30684991 NR Description: expressed protein [Arabidopsis thaliana]
  misc_feature (1)..(128): Homolog of NCBI NO: 25406874 NR Description: hypothetical protein [imported] - Arabidopsis >gi|6850316|gb|AAF29393.1|AC009999_13 Contains similarity to an protein from Arabidopsis thaliana gb|AC002335.2. ESTs
  misc_feature (1)..(128): Homolog of NCBI NO: 30689349 NR Description: expressed protein [Arabidopsis thaliana]
  misc_feature (1)..(125): Homolog of NCBI NO: 25408860 NR Description: hypothetical protein At2g43340 [imported] - thaliana >gi|2289002|gb|AAB64331.1| unknown protein [Arabidopsis
  misc_feature (1)..(121): Homolog of NCBI NO: 15221309 NR Description: unknown protein; protein id: At1g05870.1
  misc_feature (1)..(104): Homolog of NCBI NO: 25408168 NR Description: hypothetical protein At2g31560 [imported] - thaliana >gi|4582451|gb|AAD24835.1| unknown protein [Arabidopsis
  misc_feature (31)..(124): Homolog of NCBI NO: 15228829 NR Description: hypothetical protein; protein id: At3g22690.1
  misc_feature (1)..(124): Homolog of NCBI NO: 15223913 NR Description: hypothetical protein; protein id: At1g08790.1
  misc_feature (1)..(124): Homolog of NCBI NO: 15229330 NR Description: hypothetical protein; protein id: At3g04700.1 thaliana] >gi|6175172|gb|AAF04898.1|AC011437_13 hypothetical
MRQPRRSSSFVMVEASSASGSDGGVARTKSLTEDDLEELKGCLDLGFGFAYSEIPELCGTLPALELCYSMTRRFLDEQKAPGQEEELEPASPPLPNWRISGPGDDPEEVKARLKYWAQAVACTVKLCS

SEQ ID NO: 6797 - protein, 117 aa, Zea mays subsp. mays
  peptide (1)..(117): Ceres Seq. ID no. 12402509
  misc_feature (1)..(92): Homolog of NCBI NO: 34907664 NR Description: P0506A10.18 [Oryza sativa (japonica
  misc_feature (1)..(117): Homolog of NCBI NO: 30684991 NR Description: expressed protein [Arabidopsis thaliana]
  misc_feature (1)..(117): Homolog of NCBI NO: 25406874 NR Description: hypothetical protein [imported] - Arabidopsis >gi|6850316|gb|AAF29393.1|AC009999_13 Contains similarity to an protein from Arabidopsis thaliana gb|AC002335.2. ESTs
  misc_feature (1)..(117): Homolog of NCBI NO: 30689349 NR Description: expressed protein [Arabidopsis thaliana]
  misc_feature (1)..(114): Homolog of NCBI NO: 25408860 NR Description: hypothetical protein At2g43340 [imported] - thaliana >gi|2289002|gb|AAB64331.1| unknown protein [Arabidopsis
  misc_feature (1)..(110): Homolog of NCBI NO: 15221309 NR Description: unknown protein; protein id: At1g05870.1
  misc_feature (1)..(93): Homolog of NCBI NO: 25408168 NR Description: hypothetical protein At2g31560 [imported] - thaliana >gi|4582451|gb|AAD24835.1| unknown protein [Arabidopsis
  misc_feature (20)..(113): Homolog of NCBI NO: 15228829 NR Description: hypothetical protein; protein id: At3g22690.1
  misc_feature (1)..(113): Homolog of NCBI NO: 15223913 NR Description: hypothetical protein; protein id: At1g08790.1
  misc_feature (1)..(113): Homolog of NCBI NO: 15229330 NR Description: hypothetical protein; protein id: At3g04700.1 thaliana] >gi|6175172|gb|AAF04898.1|AC011437_13 hypothetical
MVEASSASGSDGGVARTKSLTEDDLEELKGCLDLGFGFAYSEIPELCGTLPALELCYSMTRRFLDEQKAPGQEEELEPASPPLPNWRISGPGDDPEEVKARLKYWAQAVACTVKLCS

SEQ ID NO: 6798 - DNA, 1252 bp, Zea mays subsp. mays
  misc_feature (1)..(1252): Ceres Seq. ID no. 15180749
  misc_feature: MA Experiment ID: 20000492 Result: Up-regulated in Transcription
  misc_feature: MA Experiment 20000492 PARAMETER Experiment Name: Zm_Hybrid_Seed_Dev_P Parameter: DAP Value: 12
  misc_feature: MA Experiment 20000492 PARAMETER Experiment Name: Zm_Hybrid_Seed_Dev_P Parameter: Organism Value: Zea mays
  misc_feature: MA Experiment 20000492 PARAMETER Experiment Name: Zm_Hybrid_Seed_Dev_P Parameter: Plant Line Value: 35A19
  misc_feature: MA Experiment 20000492 PARAMETER Experiment Name: Zm_Hybrid_Seed_Dev_P Parameter: Tissue Value: Fert Kernel vs. Unfert Floret
  misc_feature: MA Experiment ID: 20000534 Result: Down-regulated in Transcription
  misc_feature: MA Experiment 20000534 PARAMETER Experiment Name: Zm_Hybrid_Pollen_P Parameter: Age (day) Value: 8
  misc_feature: MA Experiment 20000534 PARAMETER Experiment Name: Zm_Hybrid_Pollen_P Parameter: Organism Value: Zea mays
  misc_feature: MA Experiment 20000534 PARAMETER Experiment Name: Zm_Hybrid_Pollen_P Parameter: Plant Line Value: 35A19
  misc_feature: MA Experiment 20000534 PARAMETER Experiment Name: Zm_Hybrid_Pollen_P Parameter: Tissue Value: Pollen vs. Aerial
acaacacaaccaagagccaacagagcaacgcccaggcacacacgacacgaaccaggcaaccagctgccgagggaggaaccctagcggaacactgtgcaggtgacggcggcgcgctaccggtgacgggggatacggcggcatcgtccccctcggcccctcctccatccccggcgcggcggcgccagcagccggcctgcaggttttgcaggtttcacacttcttatcatggatgataagaacaaagtcaagaaggaaatagatggcccccttggacccccacctcgcaaggggggacttaaattcgcaccaaaagtacctcagaagaaacctgccaaggttgtcccaaagaaggaaccggttgaagagagaaaggaggatgctttggataaggagttattgatgaaacttaagatgtcgcaaaacaagtatccctcaagaattaagtccgacgaaaagccaagaagtggtacacaggttgcatttggacaaggaaactcttattatgcaagaaattttcccatgcccaaaaaggattcttcagcaggtggagcttcgaagttaccaaaagaatatgcagaaccatgggactatagccatgattatcctgttactctcccactaaggaagccctactctggaaatcctgaaattctggatgaggaagaatttggagaatcttctgccagcaggacccaagatgatgaattatctgcagcagagcagcttggattaatggatatgtcgtcggaatcacagttcctcttcttccagttgccatcctctcttcctttaccgaggcagccacaatcaggtgctgaccctaacgaagtccgcgatgagaaacgtgaggacatgaggccatcatcgcacaatggctcgaaactcaaagaggttcctgaaggctatatggggaaaatgctcgtatataagagtggtaaagtgaagatgaagataggagacactctctttgatgtttcatttggctcgaattgcatgttttcccaggaggttgcagcaatcaacatcagagaaaaacattgctgtacggtgggagagatcagcaagcgtgctatcatcaccccagatattaactacatgttgggttctgttgacaagatggaagaatagtccattggtttctttcgcgcaaaccatatagaccatattatgccattacaagatagttttgctttcttatagagaacgacctgtgataccctctcagacttcttcaagaaaagatgcctcaaac

SEQ ID NO: 6799 - protein, 300 aa, Zea mays subsp. mays
  peptide (1)..(300): Ceres Seq. ID no. 15180750
  misc_feature (183)..(288): Pfam Name: RNA polymerase III RPC4 Pfam Description: RNA polymerase III RPC4
  misc_feature (250)..(299): Homolog of NCBI NO: 7486060 NR Description: hypothetical protein F24A6.20 - Arabidopsis >gi|4454006|emb|CAA23059.1| hypothetical protein [Arabidopsis >gi|7269368|emb|CAB79427.1| hypothetical protein [Arabidopsis
  misc_feature (250)..(299): Homolog of NCBI NO: 15234965 NR Description: hypothetical protein [Arabidopsis thaliana]
  misc_feature (144)..(292): Homolog of NCBI NO: 34907504 NR Description: B1099D03.22 [Oryza sativa (japonica
  misc_feature (42)..(299): Homolog of NCBI NO: 21740741 NR Description: OSJNBa0072K14.6 [Oryza sativa (japonica
  misc_feature (115)..(251): Homolog of NCBI NO: 7486060 NR Description: hypothetical protein F24A6.20 - Arabidopsis >gi|4454006|emb|CAA23059.1| hypothetical protein [Arabidopsis >gi|7269368|emb|CAB79427.1| hypothetical protein [Arabidopsis
  misc_feature (115)..(251): Homolog of NCBI NO: 15234965 NR Description: hypothetical protein [Arabidopsis thaliana]
  misc_feature (17)..(298): Homolog of NCBI NO: 15242400 NR Description: hypothetical protein [Arabidopsis thaliana]
  misc_feature (13)..(292): Homolog of NCBI NO: 34874432 NR Description: similar to DNA-directed RNA polymerase III 47 kDa (RNA polymerase C subunit 4) (RPC4) (RPC53) (BN51 protein)
  misc_feature (13)..(292): Homolog of NCBI NO: 12850356 NR Description: unnamed protein product [Mus musculus]
  misc_feature (13)..(292): Homolog of NCBI NO: 31981109 NR Description: polymerase (RNA) III (DNA directed) polypeptide
MDDKNKVKKEIDGPLGPPPRKGGLKFAPKVPQKKPAKVVPKKEPVEERKEDALDKELLMKLKMSQNKYPSRIKSDEKPRSGTQVAFGQGNSYYARNFPMPKKDSSAGGASKLPKEYAEPWDYSHDYPVTLPLRKPYSGNPEILDEEEFGESSASRTQDDELSAAEQLGLMDMSSESQFLFFQLPSSLPLPRQPQSGADPNEVRDEKREDMRPSSHNGSKLKEVPEGYMGKMLVYKSGKVKMKIGDTLFDVSFGSNCMFSQEVAAINIREKHCCTVGEISKRAIITPDINYMLGSVDKMEE

SEQ ID NO: 6800 - protein, 242 aa, Zea mays subsp. mays
  peptide (1)..(242): Ceres Seq. ID no. 15180751
  misc_feature (125)..(230): Pfam Name: RNA polymerase III RPC4 Pfam Description: RNA polymerase III RPC4
  misc_feature (1)..(241): Homolog of NCBI NO: 21740741 NR Description: OSJNBa0072K14.6 [Oryza sativa (japonica
  misc_feature (1)..(240): Homolog of NCBI NO: 15242400 NR Description: hypothetical protein [Arabidopsis thaliana]
  misc_feature (57)..(193): Homolog of NCBI NO: 7486060 NR Description: hypothetical protein F24A6.20 - Arabidopsis >gi|4454006|emb|CAA23059.1| hypothetical protein [Arabidopsis >gi|7269368|emb|CAB79427.1| hypothetical protein [Arabidopsis
  misc_feature (57)..(193): Homolog of NCBI NO: 15234965 NR Description: hypothetical protein [Arabidopsis thaliana]
  misc_feature (192)..(241): Homolog of NCBI NO: 7486060 NR Description: hypothetical protein F24A6.20 - Arabidopsis >gi|4454006|emb|CAA23059.1| hypothetical protein [Arabidopsis >gi|7269368|emb|CAB79427.1| hypothetical protein [Arabidopsis
  misc_feature (192)..(241): Homolog of NCBI NO: 15234965 NR Description: hypothetical protein [Arabidopsis thaliana]
  misc_feature (86)..(234): Homolog of NCBI NO: 34907504 NR Description: B1099D03.22 [Oryza sativa (japonica
  misc_feature (1)..(234): Homolog of NCBI NO: 34874432 NR Description: similar to DNA-directed RNA polymerase III 47 kDa (RNA polymerase C subunit 4) (RPC4) (RPC53) (BN51 protein)
  misc_feature (1)..(234): Homolog of NCBI NO: 12850356 NR Description: unnamed protein product [Mus musculus]
  misc_feature (1)..(234): Homolog of NCBI NO: 31981109 NR Description: polymerase (RNA) III (DNA directed) polypeptide
MKLKMSQNKYPSRIKSDEKPRSGTQVAFGQGNSYYARNFPMPKKDSSAGGASKLPKEYAEPWDYSHDYPVTLPLRKPYSGNPEILDEEEFGESSASRTQDDELSAAEQLGLMDMSSESQFLFFQLPSSLPLPRQPQSGADPNEVRDEKREDMRPSSHNGSKLKEVPEGYMGKMLVYKSGKVKMKIGDTLFDVSFGSNCMFSQEVAAINIREKHCCTVGEISKRAIITPDINYMLGSVDKMEE

SEQ ID NO: 6801 - protein, 238 aa, Zea mays subsp. mays
  peptide (1)..(238): Ceres Seq. ID no. 15180752
  misc_feature (121)..(226): Pfam Name: RNA polymerase III RPC4 Pfam Description: RNA polymerase III RPC4
  misc_feature (1)..(237): Homolog of NCBI NO: 21740741 NR Description: OSJNBa0072K14.6 [Oryza sativa (japonica
  misc_feature (1)..(236): Homolog of NCBI NO: 15242400 NR Description: hypothetical protein [Arabidopsis thaliana]
  misc_feature (53)..(189): Homolog of NCBI NO: 7486060 NR Description: hypothetical protein F24A6.20 - Arabidopsis >gi|4454006|emb|CAA23059.1| hypothetical protein [Arabidopsis >gi|7269368|emb|CAB79427.1| hypothetical protein [Arabidopsis
  misc_feature (53)..(189): Homolog of NCBI NO: 15234965 NR Description: hypothetical protein [Arabidopsis thaliana]
  misc_feature (188)..(237): Homolog of NCBI NO: 7486060 NR Description: hypothetical protein F24A6.20 - Arabidopsis >gi|4454006|emb|CAA23059.1| hypothetical protein [Arabidopsis >gi|7269368|emb|CAB79427.1| hypothetical protein [Arabidopsis
  misc_feature (188)..(237): Homolog of NCBI NO: 15234965 NR Description: hypothetical protein [Arabidopsis thaliana]
  misc_feature (82)..(230): Homolog of NCBI NO: 34907504 NR Description: B1099D03.22 [Oryza sativa (japonica
  misc_feature (1)..(230): Homolog of NCBI NO: 34874432 NR Description: similar to DNA-directed RNA polymerase III 47 kDa (RNA polymerase C subunit 4) (RPC4) (RPC53) (BN51 protein)
  misc_feature (1)..(230): Homolog of NCBI NO: 12850356 NR Description: unnamed protein product [Mus musculus]
  misc_feature (1)..(230): Homolog of NCBI NO: 31981109 NR Description: polymerase (RNA) III (DNA directed) polypeptide
MSQNKYPSRIKSDEKPRSGTQVAFGQGNSYYARNFPMPKKDSSAGGASKLPKEYAEPWDYSHDYPVTLPLRKPYSGNPEILDEEEFGESSASRTQDDELSAAEQLGLMDMSSESQFLFFQLPSSLPLPRQPQSGADPNEVRDEKREDMRPSSHNGSKLKEVPEGYMGKMLVYKSGKVKMKIGDTLFDVSFGSNCMFSQEVAAINIREKHCCTVGEISKRAIITPDINYMLGSVDKMEE

SEQ ID NO: 6802 - DNA, 1636 bp, Zea mays subsp. mays
  misc_feature (1)..(1636): Ceres Seq. ID no. 12409017
  misc_feature: MA Experiment ID: 108535 Result: Up-regulated in Transcription
  misc_feature: MA Experiment 108535 PARAMETER Experiment Name: Zm_Meristem_P Parameter: Age (day) Value: 8
  misc_feature: MA Experiment 108535 PARAMETER Experiment Name: Zm_Meristem_P Parameter: Organism Value: Zea mays
  misc_feature: MA Experiment 108535 PARAMETER Experiment Name: Zm_Meristem_P Parameter: Plant Line Value: 35A19
  misc_feature: MA Experiment 108535 PARAMETER Experiment Name: Zm_Meristem_P Parameter: Tissue Value: Root Meristem vs. Above Root Meristem
  misc_feature: MA Experiment ID: 20000534 Result: Down-regulated in Transcription
  misc_feature: MA Experiment 20000534 PARAMETER Experiment Name: Zm_Hybrid_Pollen_P Parameter: Age (day) Value: 8
  misc_feature: MA Experiment 20000534 PARAMETER Experiment Name: Zm_Hybrid_Pollen_P Parameter: Organism Value: Zea mays
  misc_feature: MA Experiment 20000534 PARAMETER Experiment Name: Zm_Hybrid_Pollen_P Parameter: Plant Line Value: 35A19
  misc_feature: MA Experiment 20000534 PARAMETER Experiment Name: Zm_Hybrid_Pollen_P Parameter: Tissue Value: Pollen vs. Aerial
ccccaaaccctaccgccgatccggccccagatcgccatggccgcgcccaacagcaatgacgccgccagcgccagcggcaccggcccggctggcgaggaggacatctccatcgaggcgttggcgcggcgcgtgcaagagcacatgaccctcaactcgaaccccgccgctcgccgccacaagttctgggagacacagcccgtcggccagttccgcgacgccgccgacgcatcgctaccgaacggccccatcgagccgcccacgccactctccgaggtgcgcgccgacccctacccactgcccgccgccttcgagtggctcacctgcgacctcgatgacgacgcgctcctcgccgacctctactcgttgctcgcccacaactacgtcgaggatgacgagaacatgttccgcttcaactactccccggccttcctccgctgggcgctcaagccgccgtccttcttccgggcctggcacatcggcgttcgcgccaaggagtccaagaagctcgtcgccttcatctcgggcgtccccgcccgcatccgcgctcgcgacgacgtcgtccgcatggccgagatcaactttctctgcgtccacaagaagctccgatccaagcgcctggcacccgtgctcatccgggaggtcacccgccgcgtccaccaggagaacatctggcaggctgcatacaccgcggggatcgtcctcccaacccccatcaccacctgccgctactggcaccgatccctcaaccccaagaagcttatcgatgttggattctctcgccttggtccgcgcatgactatgagccgcacggtccggctatacaagctgcctgatgcgccgctcacccctgggtttcgcaggatggagctgcgggatgtcgctgcagtcacacggctgctgagggcataccttgcgaggtttgtggtggcaccggattttgatgaggtagatgtagagcactggttgctgccccaagaggatgtggtggacagctaccttgtggagagccctgagacgcatgaggtcacggatttctgcagcttttacacactgccctcatcagtgttgaacaatgctaactatgcgacgctcaaagcggcatactcatattacaacgtttcaaccaaaactccattgcagcagctgatgaatgatgctcttattgttgccaaacggaagaattatgatgtgttcaatgctctcgatgtcatggagaatgagtcattcctcaaggagctcaagtttggtcctggagatgggcagctccactattacctctacaattaccgtattcgcaatggcatcaagccctctgagcttggtcttgtgctgttatagggcagtctaatcaggacagtcctgagtttacaccttccaggtctcactgtgcaatcccagtggtttcctcattttgtctattgtggtagtggtttctttgatatgattgccatgcccattgatgggagtccaagatgatttgcaaacaaggagactggaattagaaatcctttccttaatttaaggttattattcccattagtgacattttgtgtgcgtggtccacaacttgtatgctggcattgattttactgagaaattttgatacaacttgtgttatcgaagttgtttgtgtgct

SEQ ID NO: 6803 - protein, 445 aa, Zea mays subsp. mays
  peptide (1)..(445): Ceres Seq. ID no. 12409018
  misc_feature (255)..(444): Pfam Name: Myristoyl-CoA:protein N-myristoyltransferase, Pfam Description: Myristoyl-CoA:protein N-myristoyltransferase,
  misc_feature (13)..(445): Homolog of NCBI NO: 34910442 NR Description: putative N-myristoyl transferase [Oryza sativa
  misc_feature (29)..(445): Homolog of NCBI NO: 18423927 NR Description: N-myristoyl transferase; protein id: At5g57020.1, by cDNA: 36525., supported by cDNA: gi_13924513, supported by gi_15027994, supported by cDNA: gi_20259206, supported by cDNA:
  misc_feature (156)..(445): Homolog of NCBI NO: 8777442 NR Description: N-myristoyl transferase [Arabidopsis thaliana]
  misc_feature (29)..(91): Homolog of NCBI NO: 8777442 NR Description: N-myristoyl transferase [Arabidopsis thaliana]
  misc_feature (244)..(445): Homolog of NCBI NO: 6635379 NR Description: N-myristoyl transferase [Brassica oleracea]
  misc_feature (12)..(170): Homolog of NCBI NO: 6635379 NR Description: N-myristoyl transferase [Brassica oleracea]
  misc_feature (56)..(444): Homolog of NCBI NO: 13924516 NR Description: N-myristoyltransferase-like protein 2
  misc_feature (57)..(444): Homolog of NCBI NO: 27735395 NR Description: Similar to N-myristoyltransferase 1 [Xenopus
  misc_feature (51)..(444): Homolog of NCBI NO: 13623535 NR Description: N-myristoyltransferase 2 [Homo sapiens]
  misc_feature (57)..(444): Homolog of NCBI NO: 6679084 NR Description: N-myristoyltransferase 2 [Mus musculus]
PQTLPPIRPQIAMAAPNSNDAASASGTGPAGEEDISIEALARRVQEHMTLNSNPAARRHKFWETQPVGQFRDAADASLPNGPIEPPTPLSEVRADPYPLPAAFEWLTCDLDDDALLADLYSLLAHNYVEDDENMFRFNYSPAFLRWALKPPSFFRAWHIGVRAKESKKLVAFISGVPARIRARDDVVRMAEINFLCVHKKLRSKRLAPVLIREVTRRVHQENIWQAAYTAGIVLPTPITTCRYWHRSLNPKKLIDVGFSRLGPRMTMSRTVRLYKLPDAPLTPGFRRMELRDVAAVTRLLRAYLARFVVAPDFDEVDVEHWLLPQEDVVDSYLVESPETHEVTDFCSFYTLPSSVLNNANYATLKAAYSYYNVSTKTPLQQLMNDALIVAKRKNYDVFNALDVMENESFLKELKFGPGDGQLHYYLYNYRIRNGIKPSELGLVLL

SEQ ID NO: 6804 - protein, 433 aa, Zea mays subsp. mays
  peptide (1)..(433): Ceres Seq. ID no. 12409019
  misc_feature (243)..(432): Pfam Name: Myristoyl-CoA:protein N-myristoyltransferase, Pfam Description: Myristoyl-CoA:protein N-myristoyltransferase,
  misc_feature (1)..(433): Homolog of NCBI NO: 34910442 NR Description: putative N-myristoyl transferase [Oryza sativa
  misc_feature (17)..(433): Homolog of NCBI NO: 18423927 NR Description: N-myristoyl transferase; protein id: At5g57020.1, by cDNA: 36525., supported by cDNA: gi_13924513, supported by gi_15027994, supported by cDNA: gi_20259206, supported by cDNA:
  misc_feature (144)..(433): Homolog of NCBI NO: 8777442 NR Description: N-myristoyl transferase [Arabidopsis thaliana]
  misc_feature (17)..(79): Homolog of NCBI NO: 8777442 NR Description: N-myristoyl transferase [Arabidopsis thaliana]
  misc_feature (232)..(433): Homolog of NCBI NO: 6635379 NR Description: N-myristoyl transferase [Brassica oleracea]
  misc_feature (1)..(158): Homolog of NCBI NO: 6635379 NR Description: N-myristoyl transferase [Brassica oleracea]
  misc_feature (44)..(432): Homolog of NCBI NO: 13924516 NR Description: N-myristoyltransferase-like protein 2
  misc_feature (45)..(432): Homolog of NCBI NO: 27735395 NR Description: Similar to N-myristoyltransferase 1 [Xenopus
  misc_feature (39)..(432): Homolog of NCBI NO: 13623535 NR Description: N-myristoyltransferase 2 [Homo sapiens]
  misc_feature (45)..(432): Homolog of NCBI NO: 6679084 NR Description: N-myristoyltransferase 2 [Mus musculus]
MAAPNSNDAASASGTGPAGEEDISIEALARRVQEHMTLNSNPAARRHKFWETQPVGQFRDAADASLPNGPIEPPTPLSEVRADPYPLPAAFEWLTCDLDDDALLADLYSLLAHNYVEDDENMFRFNYSPAFLRWALKPPSFFRAWHIGVRAKESKKLVAFISGVPARIRARDDVVRMAEINFLCVHKKLRSKRLAPVLIREVTRRVHQENIWQAAYTAGIVLPTPITTCRYWHRSLNPKKLIDVGFSRLGPRMTMSRTVRLYKLPDAPLTPGFRRMELRDVAAVTRLLRAYLARFVVAPDFDEVDVEHWLLPQEDVVDSYLVESPETHEVTDFCSFYTLPSSVLNNANYATLKAAYSYYNVSTKTPLQQLMNDALIVAKRKNYDVFNALDVMENESFLKELKFGPGDGQLHYYLYNYRIRNGIKPSELGLVLL

SEQ ID NO: 6805 - protein, 398 aa, Zea mays subsp. mays
  peptide (1)..(398): Ceres Seq. ID no. 12409020
  misc_feature (208)..(397): Pfam Name: Myristoyl-CoA:protein N-myristoyltransferase, Pfam Description: Myristoyl-CoA:protein N-myristoyltransferase,
  misc_feature (1)..(398): Homolog of NCBI NO: 34910442 NR Description: putative N-myristoyl transferase [Oryza sativa
  misc_feature (1)..(398): Homolog of NCBI NO: 18423927 NR Description: N-myristoyl transferase; protein id: At5g57020.1, by cDNA: 36525., supported by cDNA: gi_13924513, supported by gi_15027994, supported by cDNA: gi_20259206, supported by cDNA:
  misc_feature (109)..(398): Homolog of NCBI NO: 8777442 NR Description: N-myristoyl transferase [Arabidopsis thaliana]
  misc_feature (1)..(44): Homolog of NCBI NO: 8777442 NR Description: N-myristoyl transferase [Arabidopsis thaliana]
  misc_feature (197)..(398): Homolog of NCBI NO: 6635379 NR Description: N-myristoyl transferase [Brassica oleracea]
  misc_feature (1)..(123): Homolog of NCBI NO: 6635379 NR Description: N-myristoyl transferase [Brassica oleracea]
  misc_feature (9)..(397): Homolog of NCBI NO: 13924516 NR Description: N-myristoyltransferase-like protein 2
  misc_feature (10)..(397): Homolog of NCBI NO: 27735395 NR Description: Similar to N-myristoyltransferase 1 [Xenopus
  misc_feature (4)..(397): Homolog of NCBI NO: 13623535 NR Description: N-myristoyltransferase 2 [Homo sapiens]
  misc_feature (10)..(397): Homolog of NCBI NO: 6679084 NR Description: N-myristoyltransferase 2 [Mus musculus]
MTLNSNPAARRHKFWETQPVGQFRDAADASLPNGPIEPPTPLSEVRADPYPLPAAFEWLTCDLDDDALLADLYSLLAHNYVEDDENMFRFNYSPAFLRWALKPPSFFRAWHIGVRAKESKKLVAFISGVPARIRARDDVVRMAEINFLCVHKKLRSKRLAPVLIREVTRRVHQENIWQAAYTAGIVLPTPITTCRYWHRSLNPKKLIDVGFSRLGPRMTMSRTVRLYKLPDAPLTPGFRRMELRDVAAVTRLLRAYLARFVVAPDFDEVDVEHWLLPQEDVVDSYLVESPETHEVTDFCSFYTLPSSVLNNANYATLKAAYSYYNVSTKTPLQQLMNDALIVAKRKNYDVFNALDVMENESFLKELKFGPGDGQLHYYLYNYRIRNGIKPSELGLVLL

SEQ ID NO: 6806 - DNA, 1052 bp, Zea mays subsp. mays
  misc_feature (1)..(1052): Ceres Seq. ID no. 12363055
  misc_feature: MA Experiment ID: 108523 Result: Down-regulated in Transcription
  misc_feature: MA Experiment 108523 PARAMETER Experiment Name: Zm_42deg_Heat_P Parameter: Age (day) Value: 8
  misc_feature: MA Experiment 108523 PARAMETER Experiment Name: Zm_42deg_Heat_P Parameter: Organism Value: Zea mays
  misc_feature: MA Experiment 108523 PARAMETER Experiment Name: Zm_42deg_Heat_P Parameter: Plant Line Value: 35A19
  misc_feature: MA Experiment 108523 PARAMETER Experiment Name: Zm_42deg_Heat_P Parameter: Temperature (deg C) Value: 42 vs. 22
  misc_feature: MA Experiment 108523 PARAMETER Experiment Name: Zm_42deg_Heat_P Parameter: Timepoint (hr) Value: 6
  misc_feature: MA Experiment 108523 PARAMETER Experiment Name: Zm_42deg_Heat_P Parameter: Tissue Value: Aerial
  misc_feature: MA Experiment ID: 108530 Result: Up-regulated in Transcription
  misc_feature: MA Experiment 108530 PARAMETER Experiment Name: Zm_Imbibed_Seeds_P Parameter: Age (day) Value: 6 vs. 2
  misc_feature: MA Experiment 108530 PARAMETER Experiment Name: Zm_Imbibed_Seeds_P Parameter: Organism Value: Zea mays
  misc_feature: MA Experiment 108530 PARAMETER Experiment Name: Zm_Imbibed_Seeds_P Parameter: Plant Line Value: 35A19
  misc_feature: MA Experiment 108530 PARAMETER Experiment Name: Zm_Imbibed_Seeds_P Parameter: Tissue Value: Aerial vs. Embryo
  misc_feature: MA Experiment ID: 108546 Result: Down-regulated in Transcription
  misc_feature: MA Experiment 108546 PARAMETER Experiment Name: Zm_Imbibed_Seeds_P Parameter: Age (day) Value: 3 vs. 2
  misc_feature: MA Experiment 108546 PARAMETER Experiment Name: Zm_Imbibed_Seeds_P Parameter: Organism Value: Zea mays
  misc_feature: MA Experiment 108546 PARAMETER Experiment Name: Zm_Imbibed_Seeds_P Parameter: Plant Line Value: 35A19
  misc_feature: MA Experiment 108546 PARAMETER Experiment Name: Zm_Imbibed_Seeds_P Parameter: Tissue Value: Roots vs. Embryo
  misc_feature: MA Experiment ID: 108687 Result: Down-regulated in Transcription
  misc_feature: MA Experiment 108687 PARAMETER Experiment Name: Zm_Embryos-Flowers__P Parameter: Tissue Value: Embryo vs. Aerial+
  misc_feature: MA Experiment ID: 20000492 Result: Down-regulated in Transcription
  misc_feature: MA Experiment 20000492 PARAMETER Experiment Name: Zm_Hybrid_Seed_Dev_P Parameter: DAP Value: 12
  misc_feature: MA Experiment 20000492 PARAMETER Experiment Name: Zm_Hybrid_Seed_Dev_P Parameter: Organism Value: Zea mays
  misc_feature: MA Experiment 20000492 PARAMETER Experiment Name: Zm_Hybrid_Seed_Dev_P Parameter: Plant Line Value: 35A19
  misc_feature: MA Experiment 20000492 PARAMETER Experiment Name: Zm_Hybrid_Seed_Dev_P Parameter: Tissue Value: Fert Kernel vs. Unfert Floret
  misc_feature: MA Experiment ID: 20000535 Result: Down-regulated in Transcription
  misc_feature: MA Experiment 20000535 PARAMETER Experiment Name: Zm_Hybrid_Seed_Dev_P Parameter: DAP Value: 30 vs. 12
  misc_feature: MA Experiment 20000535 PARAMETER Experiment Name: Zm_Hybrid_Seed_Dev_P Parameter: Organism Value: Zea mays
  misc_feature: MA Experiment 20000535 PARAMETER Experiment Name: Zm_Hybrid_Seed_Dev_P Parameter: Plant Line Value: 35A19
  misc_feature: MA Experiment 20000535 PARAMETER Experiment Name: Zm_Hybrid_Seed_Dev_P Parameter: Tissue Value: Embryo vs. Unfert Floret
gcacgagaccattacctagaacatcctaatcgaaaaaagtaccatctccaaagtgtccccagcggctaatgggtagatcatgtccataccgacgtttgcggcatttggccgttgtcaacgtctccaaagtgtcaaagtcgttccctacgtcatttcgtcaaaatcgagcactgtcgtgttcttatccggtcccgaacaaacaaccccgcttctgccggccgttttgcaggaggcgttgcggccatggcggcttcgaagcccatcttgtatagcgcgtggatcagctcctgctccttccgagtccggatcgccctcaacctcaaaggtgtggattatgagtacagggctgtgacaaggaacgatctagattacgaaaagatcaatccaatcaagtatgttccagcattggttgatggggattttgttgtttctgactccctggcaatcatattgtatcttgaagataaatatcctcaacaccctcttttgcctcaagatctcaaaaagaaagctataaatctgcagattgcaaatatagtttgttcaagcattcaacctcttcaatgttatgctgtaattggtctgcttgatggcaccttaggctctaaccagagccttcagattgttcggaattacaccgacaagggatttaaagcaatcgaaaaacttctggaaggttgtgacagtaaatatgctactggagacgaagtccaactgatgtgtttcttgcgccccagatgtatgcaggcgtgacgcgcttcggaattgatatgtcaaagtaccctcttctggagaggttctacaaagcctatatggagatcccagcatttcaagtcgcggttcctgaaaaacagccggatgcgcctgcgtccccatactgaaacggaggcagcaaccatattgatattcaaattgatttggttatcttggaatcatgttgtatgtagcatgacatagaaggccacgatgtatgcctatttgtttcgtacacattctggtttgtccgaagaatttcacagtaaataaggcccgatgatttgtgtagtagtgtt

SEQ ID NO: 6807 - protein, 169 aa, Zea mays subsp. mays
  peptide (1)..(169): Ceres Seq. ID no. 12363056
  misc_feature (1)..(165): Homolog of NCBI NO: 11177839 NR Description: putative glutathione S-transferase OsGSTZ1 [Oryza
  misc_feature (1)..(165): Homolog of NCBI NO: 11385487 NR Description: glutathione S-transferase GST 18 [Zea mays]
  misc_feature (1)..(165): Homolog of NCBI NO: 15430707 NR Description: putative glutathione S-transferase OsGSTZ2 [Oryza
  misc_feature (1)..(165): Homolog of NCBI NO: 11132027 NR Description: Glutathione S-transferase (GST class-zeta)
  misc_feature (8)..(165): Homolog of NCBI NO: 29420155 NR Description: glutathione S-transferase Z1 [Malva pusilla]
  misc_feature (7)..(169): Homolog of NCBI NO: 11385485 NR Description: glutathione S-transferase GST 17 [Zea mays]
  misc_feature (3)..(169): Homolog of NCBI NO: 24061762 NR Description: glutathione S-transferase [Capsicum annuum]
  misc_feature (8)..(165): Homolog of NCBI NO: 11132235 NR Description: Glutathione S-transferase zeta class
  misc_feature (8)..(165): Homolog of NCBI NO: 28932694 NR Description: glutathione S-transferase zeta [Brassica napus]
  misc_feature (8)..(165): Homolog of NCBI NO: 15226949 NR Description: glutathione transferase, putative; protein id:
MAASKPILYSAWISSCSFRVRIALNLKGVDYEYRAVTRNDLDYEKINPIKYVPALVDGDFVVSDSLAIILYLEDKYPQHPLLPQDLKKKAINLQIANIVCSSIQPLQCYAVIGLLDGTLGSNQSLQIVRNYTDKGFKAIEKLLEGCDSKYATGDEVQLMCFLRPRCMQA

SEQ ID NO: 6808 - protein, 90 aa, Zea mays subsp. mays
  peptide (1)..(90): Ceres Seq. ID no. 12363057
MSIPTFAAFGRCQRLQSVKVVPYVISSKSSTVVFLSGPEQTTPLLPAVLQEALRPWRLRSPSCIARGSAPAPSESGSPSTSKVWIMSTGL

SEQ ID NO: 6809 - DNA, 872 bp, Zea mays subsp. mays
  misc_feature (1)..(872): Ceres Seq. ID no. 12372380
  misc_feature: MA Experiment ID: 20000534 Result: Down-regulated in Transcription
  misc_feature: MA Experiment 20000534 PARAMETER Experiment Name: Zm_Hybrid_Pollen_P Parameter: Age (day) Value: 8
  misc_feature: MA Experiment 20000534 PARAMETER Experiment Name: Zm_Hybrid_Pollen_P Parameter: Organism Value: Zea mays
  misc_feature: MA Experiment 20000534 PARAMETER Experiment Name: Zm_Hybrid_Pollen_P Parameter: Plant Line Value: 35A19
  misc_feature: MA Experiment 20000534 PARAMETER Experiment Name: Zm_Hybrid_Pollen_P Parameter: Tissue Value: Pollen vs. Aerial
aaaccgtccacgcctcgtcccaaccctagccccgtcgatctcgcatggccaccggcccgcgatctctccacgccctcctcggcggcggcgcagtcgccgacttgctgctgtgtaggcggaggaacgcctcggcggcggccgtggtgggcgccaccgcggtctggttcgtcttcgagcgcgcgggctacagcttcccttccgtcctgtccaacgccctgctcctcctcgtcgccatcctcttcttctgggccaagtccgcgttgctgcttaacaggcctcttccacctcttcctaaccttgaggtttcagatgcagttgttgaaaaggctgcagattatgctcttgtatggatcaataggctgctggctgtcggtcatgacatcgccatcaagagaaataggaaagtttttataaaggtgatattgattttgtggctggtttcatttgttggaatgctcttcaactttcttacactcatttacattggtgtaatgctttctctgttggttccaccactctatgagaagtatcaggatcaggttgatgaaaaggttggcgtagcgcacagtataatatcgaggcacataaataccattgttaccagggctgggcaatcagccaaggagaagaagactgaataaaagaattgttttgatgtattgtggaacatctctggttgtcaggtggagttgatagtgggcttttcatctttggactctccatatgaacctccacttacattagttctcgatatgctgatctgaggttttgatgtgcgctgttgatttcaggaaatgagacggtttgtgtattttttctttttgaacatgaggtttactatgggcgcatatcttactcgaaatgatattttg

SEQ ID NO: 6810 - protein, 198 aa, Zea mays subsp. mays
  peptide (1)..(198): Ceres Seq. ID no. 12372381
  misc_feature (3)..(198): Homolog of NCBI NO: 38345298 NR Description: OSJNBa0043A12.26 [Oryza sativa (japonica
  misc_feature (7)..(182): Homolog of NCBI NO: 18402246 NR Description: expressed protein; protein id: At3g19460.1, by cDNA: 37065. [Arabidopsis thaliana] gb|AAD26905.1~gene_id:MLD14.20~similar to unknown protein
  misc_feature (7)..(182): Homolog of NCBI NO: 21593206 NR Description: unknown [Arabidopsis thaliana]
  misc_feature (7)..(197): Homolog of NCBI NO: 30679374 NR Description: expressed protein [Arabidopsis thaliana]
  misc_feature (33)..(197): Homolog of NCBI NO: 25411624 NR Description: hypothetical protein At2g15280 [imported] - thaliana >gi|4662633|gb|AAD26905.1| hypothetical protein
  misc_feature (6)..(166): Homolog of NCBI NO: 15232423 NR Description: putative protein; protein id: At3g54120.1
  misc_feature (7)..(184): Homolog of NCBI NO: 26450318 NR Description: unknown protein [Arabidopsis thaliana]
  misc_feature (16)..(184): Homolog of NCBI NO: 30681541 NR Description: reticulon family [Arabidopsis thaliana]
  misc_feature (8)..(167): Homolog of NCBI NO: 34904202 NR Description: P0492F05.25 [Oryza sativa (japonica
  misc_feature (8)..(167): Homolog of NCBI NO: 15236556 NR Description: putative protein; protein id: At4g23630.1, by cDNA: 39185., supported by cDNA: gi_15215585 [Arabidopsis
MATGPRSLHALLGGGAVADLLLCRRRNASAAAVVGATAVWFVFERAGYSFPSVLSNALLLLVAILFFWAKSALLLNRPLPPLPNLEVSDAVVEKAADYALVWINRLLAVGHDIAIKRNRKVFIKVILILWLVSFVGMLFNFLTLIYIGVMLSLLVPPLYEKYQDQVDEKVGVAHSIISRHINTIVTRAGQSAKEKKTE

SEQ ID NO: 6811 - protein, 137 aa, Zea mays subsp. mays
  peptide (1)..(137): Ceres Seq. ID no. 12372382
KPSTPRPNPSPVDLAWPPARDLSTPSSAAAQSPTCCCVGGGTPRRRPWWAPPRSGSSSSARATASLPSCPTPCSSSSPSSSSGPSPRCCLTGLFHLFLTLRFQMQLLKRLQIMLLYGSIGCWLSVMTSPSREIGKFL

SEQ ID NO: 6812 - DNA, 1127 bp, Zea mays subsp. mays
  misc_feature (1)..(1127): Ceres Seq. ID no. 12391329
  misc_feature: MA Experiment ID: 20000535 Result: Up-regulated in Transcription
  misc_feature: MA Experiment 20000535 PARAMETER Experiment Name: Zm_Hybrid_Seed_Dev_P Parameter: DAP Value: 30 vs. 12
  misc_feature: MA Experiment 20000535 PARAMETER Experiment Name: Zm_Hybrid_Seed_Dev_P Parameter: Organism Value: Zea mays
  misc_feature: MA Experiment 20000535 PARAMETER Experiment Name: Zm_Hybrid_Seed_Dev_P Parameter: Plant Line Value: 35A19
  misc_feature: MA Experiment 20000535 PARAMETER Experiment Name: Zm_Hybrid_Seed_Dev_P Parameter: Tissue Value: Embryo vs. Unfert Floret
gcacgagaccattacctagaacatcctaatcgaaaaaataaacaaaaaagattgactaaactgcaccaatgtaaagctggttcactcgtgtaactgatgcaatgcagtatgcaaagctcctgcctttggccttgatccacatgcttggaaatgttttcaccaatatgagtttgggtaaggtgtctgtctccttcacccacaccatcaaggccatggagcccttcttctcggtcctcctctctatcctattcctaggagagacaccttctctaccagtgttgggttcacttgtccctattgttggcggagttgtattggcgtcgatgactgaagtttcattcaactggattggattctggagtgccatgacttcgaatcttatgaatcaatcgcggaacgtttacagcaagaaaattctcgctgataaagaggacagtttggatgacataaatctcttctcaataataactgtcatggcattcttgttatctgctccactgatgctatgtgtagaaggaatcaagtttagcccatcatatctacagaatgctggagttaatgtaaaagaattatttataagagcggcacttgctgggacatctttctatttttaccaacaggtttcgtacagtttattggctagagtatctcccgtgacccattcggttgccaactctcttaaacgtgtggtggtcattgtgtcatccgttctcttctttagaactttaatttcacctataaatgccttaggaaccggtgttgctcttgctggagtgttcctgtactcgcagttcaaaaagtcaaaaccaaaggctacggctgcatgaagagactatagaatgatggaggatttggaactatcagtcgacgtggtgaagcagactggccttcacggtagcaaacacatatagtttccccatgttgcatcttaaaaaaaatgtgttctcttgtcaggttctttggatgtgagaagcttgtacgtaagtttcatccacaaggtgtggtggaacacgtgaacaacggagatatagcattcttagatttcaagagaatacaaattttggaatatacttccatgtcattgaaactgacagaatgctctcactattatatatattctttacgcc

SEQ ID NO: 6813 - protein, 241 aa, Zea mays subsp. mays
  peptide (1)..(241): Ceres Seq. ID no. 12391330
  misc_feature (1)..(75): Pfam Name: Integral membrane protein DUF6 Pfam Description: Integral membrane protein DUF6
  misc_feature (1)..(241): Homolog of NCBI NO: 1706110 NR Description: Triose phosphate/phosphate translocator,
  misc_feature (2)..(238): Homolog of NCBI NO: 7489171 NR Description: phosphate/phosphoenolpyruvate translocator
  misc_feature (1)..(241): Homolog of NCBI NO: 7489743 NR Description: glucose-6-phosphate/phosphate-translocator
  misc_feature (2)..(241): Homolog of NCBI NO: 7546829 NR Description: phosphate/phosphoenolpyruvate translocator
  misc_feature (2)..(241): Homolog of NCBI NO: 15242801 NR Description: phosphate/phosphoenolpyruvate translocator protein id: At5g33320.1, supported by cDNA: 21316., supported by
  misc_feature (2)..(241): Homolog of NCBI NO: 1778141 NR Description: phosphate/phosphoenolpyruvate translocator
  misc_feature (1)..(241): Homolog of NCBI NO: 7489742 NR Description: glucose-6-phosphate/phosphate-translocator
  misc_feature (2)..(241): Homolog of NCBI NO: 13991929 NR Description: phosphoenolpyruvate/phosphate translocator [Oryza
  misc_feature (2)..(241): Homolog of NCBI NO: 21554233 NR Description: phosphate/phosphoenolpyruvate translocator
  misc_feature (1)..(241): Homolog of NCBI NO: 29647427 NR Description: putative phosphoenolpyruvate/phosphate
MQYAKLLPLALIHMLGNVFTNMSLGKVSVSFTHTIKAMEPFFSVLLSILFLGETPSLPVLGSLVPIVGGVVLASMTEVSFNWIGFWSAMTSNLMNQSRNVYSKKILADKEDSLDDINLFSIITVMAFLLSAPLMLCVEGIKFSPSYLQNAGVNVKELFIRAALAGTSFYFYQQVSYSLLARVSPVTHSVANSLKRVVVIVSSVLFFRTLISPINALGTGVALAGVFLYSQFKKSKPKATAA

SEQ ID NO: 6814 - protein, 228 aa, Zea mays subsp. mays
  peptide (1)..(228): Ceres Seq. ID no. 12391331
  misc_feature (1)..(62): Pfam Name: Integral membrane protein DUF6 Pfam Description: Integral membrane protein DUF6
  misc_feature (1)..(228): Homolog of NCBI NO: 1706110 NR Description: Triose phosphate/phosphate translocator,
  misc_feature (1)..(225): Homolog of NCBI NO: 7489171 NR Description: phosphate/phosphoenolpyruvate translocator
  misc_feature (1)..(228): Homolog of NCBI NO: 7489743 NR Description: glucose-6-phosphate/phosphate-translocator
  misc_feature (1)..(228): Homolog of NCBI NO: 7546829 NR Description: phosphate/phosphoenolpyruvate translocator
  misc_feature (1)..(228): Homolog of NCBI NO: 15242801 NR Description: phosphate/phosphoenolpyruvate translocator protein id: At5g33320.1, supported by cDNA: 21316., supported by
  misc_feature (1)..(228): Homolog of NCBI NO: 1778141 NR Description: phosphate/phosphoenolpyruvate translocator
  misc_feature (1)..(228): Homolog of NCBI NO: 7489742 NR Description: glucose-6-phosphate/phosphate-translocator
  misc_feature (1)..(228): Homolog of NCBI NO: 13991929 NR Description: phosphoenolpyruvate/phosphate translocator [Oryza
  misc_feature (1)..(228): Homolog of NCBI NO: 21554233 NR Description: phosphate/phosphoenolpyruvate translocator
  misc_feature (1)..(228): Homolog of NCBI NO: 29647427 NR Description: putative phosphoenolpyruvate/phosphate
MLGNVFTNMSLGKVSVSFTHTIKAMEPFFSVLLSILFLGETPSLPVLGSLVPIVGGVVLASMTEVSFNWIGFWSAMTSNLMNQSRNVYSKKILADKEDSLDDINLFSIITVMAFLLSAPLMLCVEGIKFSPSYLQNAGVNVKELFIRAALAGTSFYFYQQVSYSLLARVSPVTHSVANSLKRVVVIVSSVLFFRTLISPINALGTGVALAGVFLYSQFKKSKPKATAA

SEQ ID NO: 6815 - protein, 220 aa, Zea mays subsp. mays
  peptide (1)..(220): Ceres Seq. ID no. 12391332
  misc_feature (1)..(54): Pfam Name: Integral membrane protein DUF6 Pfam Description: Integral membrane protein DUF6
  misc_feature (1)..(220): Homolog of NCBI NO: 1706110 NR Description: Triose phosphate/phosphate translocator,
  misc_feature (1)..(217): Homolog of NCBI NO: 7489171 NR Description: phosphate/phosphoenolpyruvate translocator
  misc_feature (1)..(220): Homolog of NCBI NO: 7489743 NR Description: glucose-6-phosphate/phosphate-translocator
  misc_feature (1)..(220): Homolog of NCBI NO: 7546829 NR Description: phosphate/phosphoenolpyruvate translocator
  misc_feature (1)..(220): Homolog of NCBI NO: 15242801 NR Description: phosphate/phosphoenolpyruvate translocator protein id: At5g33320.1, supported by cDNA: 21316., supported by
  misc_feature (1)..(220): Homolog of NCBI NO: 1778141 NR Description: phosphate/phosphoenolpyruvate translocator
  misc_feature (1)..(220): Homolog of NCBI NO: 7489742 NR Description: glucose-6-phosphate/phosphate-translocator
  misc_feature (1)..(220): Homolog of NCBI NO: 13991929 NR Description: phosphoenolpyruvate/phosphate translocator [Oryza
  misc_feature (1)..(220): Homolog of NCBI NO: 21554233 NR Description: phosphate/phosphoenolpyruvate translocator
  misc_feature (1)..(220): Homolog of NCBI NO: 29647427 NR Description: putative phosphoenolpyruvate/phosphate
MSLGKVSVSFTHTIKAMEPFFSVLLSILFLGETPSLPVLGSLVPIVGGVVLASMTEVSFNWIGFWSAMTSNLMNQSRNVYSKKILADKEDSLDDINLFSIITVMAFLLSAPLMLCVEGIKFSPSYLQNAGVNVKELFIRAALAGTSFYFYQQVSYSLLARVSPVTHSVANSLKRVVVIVSSVLFFRTLISPINALGTGVALAGVFLYSQFKKSKPKATAA

SEQ ID NO: 6816 - DNA, 958 bp, Zea mays subsp. mays
  misc_feature (1)..(958): Ceres Seq. ID no. 12379360
  misc_feature: MA Experiment ID: 108529 Result: Up-regulated in Transcription
  misc_feature: MA Experiment 108529 PARAMETER Experiment Name: Zm_Imbibed_Seeds_P Parameter: Age (day) Value: 5 vs. 2
  misc_feature: MA Experiment 108529 PARAMETER Experiment Name: Zm_Imbibed_Seeds_P Parameter: Organism Value: Zea mays
  misc_feature: MA Experiment 108529 PARAMETER Experiment Name: Zm_Imbibed_Seeds_P Parameter: Plant Line Value: 35A19
  misc_feature: MA Experiment 108529 PARAMETER Experiment Name: Zm_Imbibed_Seeds_P Parameter: Tissue Value: Roots vs. Embryo
  misc_feature: MA Experiment ID: 108535 Result: Down-regulated in Transcription
  misc_feature: MA Experiment 108535 PARAMETER Experiment Name: Zm_Meristem_P Parameter: Age (day) Value: 8
  misc_feature: MA Experiment 108535 PARAMETER Experiment Name: Zm_Meristem_P Parameter: Organism Value: Zea mays
  misc_feature: MA Experiment 108535 PARAMETER Experiment Name: Zm_Meristem_P Parameter: Plant Line Value: 35A19
  misc_feature: MA Experiment 108535 PARAMETER Experiment Name: Zm_Meristem_P Parameter: Tissue Value: Root Meristem vs. Above Root Meristem
  misc_feature: MA Experiment ID: 20000492 Result: Down-regulated in Transcription
  misc_feature: MA Experiment 20000492 PARAMETER Experiment Name: Zm_Hybrid_Seed_Dev_P Parameter: DAP Value: 12
  misc_feature: MA Experiment 20000492 PARAMETER Experiment Name: Zm_Hybrid_Seed_Dev_P Parameter: Organism Value: Zea mays
  misc_feature: MA Experiment 20000492 PARAMETER Experiment Name: Zm_Hybrid_Seed_Dev_P Parameter: Plant Line Value: 35A19
  misc_feature: MA Experiment 20000492 PARAMETER Experiment Name: Zm_Hybrid_Seed_Dev_P Parameter: Tissue Value: Fert Kernel vs. Unfert Floret
  misc_feature: MA Experiment ID: 20000535 Result: Down-regulated in Transcription
  misc_feature: MA Experiment 20000535 PARAMETER Experiment Name: Zm_Hybrid_Seed_Dev_P Parameter: DAP Value: 30 vs. 12
  misc_feature: MA Experiment 20000535 PARAMETER Experiment Name: Zm_Hybrid_Seed_Dev_P Parameter: Organism Value: Zea mays
  misc_feature: MA Experiment 20000535 PARAMETER Experiment Name: Zm_Hybrid_Seed_Dev_P Parameter: Plant Line Value: 35A19
  misc_feature: MA Experiment 20000535 PARAMETER Experiment Name: Zm_Hybrid_Seed_Dev_P Parameter: Tissue Value: Embryo vs. Unfert Floret
  misc_feature: MA Experiment ID: 20001608 Result: Down-regulated in Transcription
  misc_feature: MA Experiment 20001608 PARAMETER Experiment Name: Zm_50ppm_KNO3_L-to-H_P Parameter: Age (day) Value: 21
  misc_feature: MA Experiment 20001608 PARAMETER Experiment Name: Zm_50ppm_KNO3_L-to-H_P Parameter: Organism Value: Zea mays
  misc_feature: MA Experiment 20001608 PARAMETER Experiment Name: Zm_50ppm_KNO3_L-to-H_P Parameter: Plant Line Value: 35A19
  misc_feature: MA Experiment 20001608 PARAMETER Experiment Name: Zm_50ppm_KNO3_L-to-H_P Parameter: Timepoint (hr) Value: 48
  misc_feature: MA Experiment 20001608 PARAMETER Experiment Name: Zm_50ppm_KNO3_L-to-H_P Parameter: Tissue Value: Shoots
  misc_feature: MA Experiment 20001608 PARAMETER Experiment Name: Zm_50ppm_KNO3_L-to-H_P Parameter: Treatment Value: 50ppm KNO3 vs. 50ppm KCl
gtatctctctcctccctggctctcgtcccccccaccgagtcgtcgccccctcgctttcaccccacgcggaagcaagaattcgtcgtcaaattcccagcttgcgcgtgtttctgtggatttcttcccgcttccctgctcctgcctcctatgggcctttgatccggggcttcgtggatcttgggaagaggaggtgtggtgggcgcctcggcggcgatctggcggggaggatatggccagcgggaaggagccgatcgaggtcaggtttcgtctcttcgacggcacggatatcgggcctacgaagtacgatccctccaccacggtctcctcgctcaaggagttcatcctcgctcggtggccgcaagataaggatatagctccaaaaactgttaatgacttgaagcttatcaatggtggaaggatattggagaataaccggacacttgcagagtcccgtgttccagtaggagagatcccaggtggtgtaattacaatgcatgtggtagtgcgacctccacaagctgacaaaaacaagaagcagcttgccaattcccccaagcagaacagatgtggatgcaccattctctgataaggcgtctgcttggtgctgtacaatctgtgtgtacacataagattttgtatgtgctttgctgtgttcacacaagcatggattcgttttgatatccaattcttgaagccatacaaattccagaagtaagatcccacggaatacgaagatttctggatcgttttgttctagagtgtaggattggatgcttcctgctgtataaattgtgttgtcaaaactgaaaaaaaaatctctttcttttctgctatattgacttattatcgattctttctagctcggttgcttttgattcgtgtaacagaaatattgtactcatgtatatgtaacttgcaaaaggagtaatgtatggtgttatggtaattggtaaagggg

SEQ ID NO: 6817 - protein, 194 aa, Zea mays subsp. mays
  peptide (1)..(194): Ceres Seq. ID no. 12379361
  misc_feature (84)..(171): Pfam Name: Ubiquitin family Pfam Description: Ubiquitin family
  misc_feature (81)..(194): Homolog of NCBI NO: 4097567 NR Description: ATGP4 [Arabidopsis thaliana]
  misc_feature (81)..(194): Homolog of NCBI NO: 4097587 NR Description: NTGP5 [Nicotiana tabacum]
  misc_feature (77)..(194): Homolog of NCBI NO: 15219188 NR Description: expressed protein; protein id: At1g22050.1 thaliana] >gi|26452618|dbj|BAC43392.1| unknown protein thaliana] >gi|28973097|gb|AAO63873.1| unknown protein
  misc_feature (84)..(194): Homolog of NCBI NO: 21592966 NR Description: ubiquitin-fusion protein, putative [Arabidopsis
  misc_feature (84)..(194): Homolog of NCBI NO: 15218145 NR Description: expressed protein; protein id: At1g77870.1, by cDNA: 34600. [Arabidopsis thaliana] >gi|25375747|pir||E96808
  misc_feature (77)..(175): Homolog of NCBI NO: 25402954 NR Description: protein F2E2.12 [imported] - Arabidopsis thaliana
  misc_feature (73)..(194): Homolog of NCBI NO: 38347220 NR Description: OSJNBa0055C08.14 [Oryza sativa (japonica
  misc_feature (77)..(191): Homolog of NCBI NO: 18417680 NR Description: expressed protein; protein id: At5g15460.1, by cDNA: 250561. [Arabidopsis thaliana] NTGP5 [Arabidopsis thaliana] >gi|28973721|gb|AAO64177.1| unknown
  misc_feature (84)..(194): Homolog of NCBI NO: 22331362 NR Description: expressed protein; protein id: At3g26980.1, by cDNA: gi_19310678 [Arabidopsis thaliana]
  misc_feature (81)..(194): Homolog of NCBI NO: 15234839 NR Description: expressed protein; protein id: At4g24990.1, by cDNA: gi_4097566 [Arabidopsis thaliana]
YLSPPWLSSPPPSRRPLAFTPRGSKNSSSNSQLARVSVDFFPLPCSCLLWAFDPGLRGSWEEEVWWAPRRRSGGEDMASGKEPIEVRFRLFDGTDIGPTKYDPSTTVSSLKEFILARWPQDKDIAPKTVNDLKLINGGRILENNRTLAESRVPVGEIPGGVITMHVVVRPPQADKNKKQLANSPKQNRCGCTIL

SEQ ID NO: 6818 - protein, 123 aa, Zea mays subsp. mays
  peptide (1)..(123): Ceres Seq. ID no. 12379362
ISLLPGSRPPHRVVAPSLSPHAEARIRRQIPSLRVFLWISSRFPAPASYGPLIRGFVDLGKRRCGGRLGGDLAGRIWPAGRSRSRSGFVSSTARISGLRSTIPPPRSPRSRSSSSLGGRKIRI

SEQ ID NO: 6819 - protein, 118 aa, Zea mays subsp. mays
  peptide (1)..(118): Ceres Seq. ID no. 12379363
  misc_feature (8)..(95): Pfam Name: Ubiquitin family Pfam Description: Ubiquitin family
  misc_feature (5)..(118): Homolog of NCBI NO: 4097587 NR Description: NTGP5 [Nicotiana tabacum]
  misc_feature (1)..(118): Homolog of NCBI NO: 15219188 NR Description: expressed protein; protein id: At1g22050.1 thaliana] >gi|26452618|dbj|BAC43392.1| unknown protein thaliana] >gi|28973097|gb|AAO63873.1| unknown protein
  misc_feature (8)..(118): Homolog of NCBI NO: 21592966 NR Description: ubiquitin-fusion protein, putative [Arabidopsis
  misc_feature (8)..(118): Homolog of NCBI NO: 15218145 NR Description: expressed protein; protein id: At1g77870.1, by cDNA: 34600. [Arabidopsis thaliana] >gi|25375747|pir||E96808
  misc_feature (1)..(99): Homolog of NCBI NO: 25402954 NR Description: protein F2E2.12 [imported] - Arabidopsis thaliana
  misc_feature (1)..(118): Homolog of NCBI NO: 38347220 NR Description: OSJNBa0055C08.14 [Oryza sativa (japonica
  misc_feature (1)..(115): Homolog of NCBI NO: 18417680 NR Description: expressed protein; protein id: At5g15460.1, by cDNA: 250561. [Arabidopsis thaliana] NTGP5 [Arabidopsis thaliana] >gi|28973721|gb|AAO64177.1| unknown
  misc_feature (8)..(118): Homolog of NCBI NO: 22331362 NR Description: expressed protein; protein id: At3g26980.1, by cDNA: gi_19310678 [Arabidopsis thaliana]
  misc_feature (5)..(118): Homolog of NCBI NO: 15234839 NR Description: expressed protein; protein id: At4g24990.1, by cDNA: gi_4097566 [Arabidopsis thaliana]
  misc_feature (5)..(118): Homolog of NCBI NO: 4097567 NR Description: ATGP4 [Arabidopsis thaliana]
MASGKEPIEVRFRLFDGTDIGPTKYDPSTTVSSLKEFILARWPQDKDIAPKTVNDLKLINGGRILENNRTLAESRVPVGEIPGGVITMHVVVRPPQADKNKKQLANSPKQNRCGCTIL

SEQ ID NO: 6820 - DNA, 1099 bp, Zea mays subsp. mays
  misc_feature (1)..(1099): Ceres Seq. ID no. 12381037
  misc_feature: MA Experiment ID: 108522 Result: Down-regulated in Transcription
  misc_feature: MA Experiment 108522 PARAMETER Experiment Name: Zm_42deg_Heat_P Parameter: Age (day) Value: 8
  misc_feature: MA Experiment 108522 PARAMETER Experiment Name: Zm_42deg_Heat_P Parameter: Organism Value: Zea mays
  misc_feature: MA Experiment 108522 PARAMETER Experiment Name: Zm_42deg_Heat_P Parameter: Plant Line Value: 35A19
  misc_feature: MA Experiment 108522 PARAMETER Experiment Name: Zm_42deg_Heat_P Parameter: Temperature (deg C) Value: 42 vs. 22
  misc_feature: MA Experiment 108522 PARAMETER Experiment Name: Zm_42deg_Heat_P Parameter: Timepoint (hr) Value: 1
  misc_feature: MA Experiment 108522 PARAMETER Experiment Name: Zm_42deg_Heat_P Parameter: Tissue Value: Aerial
  misc_feature: MA Experiment ID: 108535 Result: Up-regulated in Transcription
  misc_feature: MA Experiment 108535 PARAMETER Experiment Name: Zm_Meristem_P Parameter: Age (day) Value: 8
  misc_feature: MA Experiment 108535 PARAMETER Experiment Name: Zm_Meristem_P Parameter: Organism Value: Zea mays
  misc_feature: MA Experiment 108535 PARAMETER Experiment Name: Zm_Meristem_P Parameter: Plant Line Value: 35A19
  misc_feature: MA Experiment 108535 PARAMETER Experiment Name: Zm_Meristem_P Parameter: Tissue Value: Root Meristem vs. Above Root Meristem
  misc_feature: MA Experiment ID: 108544 Result: Down-regulated in Transcription
  misc_feature: MA Experiment ID: 20000488 Result: Up-regulated in Transcription
  misc_feature: MA Experiment 20000488 PARAMETER Experiment Name: Zm_50mM_NH4NO3_L_to_H_P Parameter: Organism Value: Zea mays
  misc_feature: MA Experiment 20000488 PARAMETER Experiment Name: Zm_50mM_NH4NO3_L_to_H_P Parameter: Timepoint (hr) Value: 8
  misc_feature: MA Experiment 20000488 PARAMETER Experiment Name: Zm_50mM_NH4NO3_L_to_H_P Parameter: Tissue Value: Leaves
  misc_feature: MA Experiment 20000488 PARAMETER Experiment Name: Zm_50mM_NH4NO3_L_to_H_P Parameter: Treatment Value: 50mM NH4NO3 vs. 100mM Mannitol
  misc_feature: MA Experiment ID: 20000492 Result: Up-regulated in Transcription
  misc_feature: MA Experiment 20000492 PARAMETER Experiment Name: Zm_Hybrid_Seed_Dev_P Parameter: DAP Value: 12
  misc_feature: MA Experiment 20000492 PARAMETER Experiment Name: Zm_Hybrid_Seed_Dev_P Parameter: Organism Value: Zea mays
  misc_feature: MA Experiment 20000492 PARAMETER Experiment Name: Zm_Hybrid_Seed_Dev_P Parameter: Plant Line Value: 35A19
  misc_feature: MA Experiment 20000492 PARAMETER Experiment Name: Zm_Hybrid_Seed_Dev_P Parameter: Tissue Value: Fert Kernel vs. Unfert Floret
acccagacctagccactccccagcaggcaagcaacctcgccaaaaccctacgccgctcaactatgctcatccggcgaccgctccaaaccctcaccctccccctcctccgccgccacttctccgccgccaccgtcgaggcctttgtgtctcccgaccaagccaccgacccgctctccccgccgtacgactacctcccgggccacccgagccagacgctaagcacaatgaggtgatcctcgccgtcccgcgcgcctcttcggggcgccacgtagccgccaaggagcgcaaggccgggcgggtccccgccatcgtgttcgagcaggagaacggacaggagggcggcaacaagcgcctcatctccgttcgggccaatcagatccgcaagctcgtcgaccacctcggccggtccttcttcctctccaggctgttcagtctccaggtctggtcagaacatgccgggcagggcgaactcatcgaaagcgtccgcgtcctacccagaaaggtacacctgcatgcaggcactgatgaaccgctgaatatcacatttatgagagcaccttcttctgcacttctcaaaatagatgttcctctgatgttcattggagaggatgcctcacctggtctcaggaaaggagcttacttcaacaccataaaacgaacagccaagtatctgtgccctgctgacatagtaccaccatacattaaagtggatctaagtgagttggatgtaggacagaaattgctgatgcgtgatctgaaagttcatcctgcgttgaagctgcttcattcgccagatcagcccatctgtaactttaccggatcaaggtctccagaatagaagaagggaaaataacttgcttctttgtatgagctgttttgagcacaataaggttttgtttcgtacttgagtgattcaggtgttacttgtcctactgttaggatgaattgtagccagagacacctatttttacctcaggaagggatcttttgagcaggtagatgctactacagctagacgcacttgcaaagtttcctaaatatggtcatctagtgttaacagaaacttatggtgctgtgagcaatattgaaaattgtttgc

SEQ ID NO: 6821 - protein, 278 aa, Zea mays subsp. mays
  peptide (1)..(278): Ceres Seq. ID no. 12381038
  misc_feature (65)..(238): Homolog of NCBI NO: 34912284 NR Description: P0451D05.2 [Oryza sativa (japonica
  misc_feature (65)..(278): Homolog of NCBI NO: 15236554 NR Description: putative protein; protein id: At4g23620.1, by cDNA: 6527., supported by cDNA: gi_18253004 [Arabidopsis
  misc_feature (76)..(277): Homolog of NCBI NO: 15240108 NR Description: putative protein; protein id: At5g66860.1, by cDNA: gi_15450929, supported by cDNA: gi_17978762 [Arabidopsis >gi|9758136|dbj|BAB08628.1| gene_id:MUD21.12~pir||T05594~similar
  misc_feature (89)..(259): Homolog of NCBI NO: 23106991 NR Description: hypothetical protein [Novosphingobium
  misc_feature (78)..(262): Homolog of NCBI NO: 23015980 NR Description: hypothetical protein [Magnetospirillum
  misc_feature (113)..(278): Homolog of NCBI NO: 16124740 NR Description: ribosomal 5S rRNA E-loop binding protein [Caulobacter crescentus CB15] >gi|25351958|pir||D87309
  misc_feature (83)..(278): Homolog of NCBI NO: 22965584 NR Description: hypothetical protein [Rhodospirillum rubrum]
  misc_feature (162)..(265): Homolog of NCBI NO: 27382552 NR Description: 50S ribosomal protein L25 [Bradyrhizobium >gi|27355724|dbj|BAC52706.1| 50S ribosomal protein L25
  misc_feature (162)..(265): Homolog of NCBI NO: 22961530 NR Description: hypothetical protein [Rhodopseudomonas palustris]
  misc_feature (159)..(278): Homolog of NCBI NO: 13472406 NR Description: 50S ribosomal protein L25 [Mesorhizobium loti]
PRPSHSPAGKQPRQNPTPLNYAHPATAPNPHPPPPPPPLLRRHRRGLCVSRPSHRPALPAVRLPPGPPEPDAKHNEVILAVPRASSGRHVAAKERKAGRVPAIVFEQENGQEGGNKRLISVRANQIRKLVDHLGRSFFLSRLFSLQVWSEHAGQGELIESVRVLPRKVHLHAGTDEPLNITFMRAPSSALLKIDVPLMFIGEDASPGLRKGAYFNTIKRTAKYLCPADIVPPYIKVDLSELDVGQKLLMRDLKVHPALKLLHSPDQPICNFTGSRSPE

SEQ ID NO: 6822 - DNA, 1130 bp, Zea mays subsp. mays
  misc_feature (1)..(1130): Ceres Seq. ID no. 12386565
  misc_feature: MA Experiment ID: 108543 Result: Down-regulated in Transcription
cccgaaagccaaagaggaaaaaggaattgcgcctcccgctacgctattaccgccggcggccgctgccatggacgttggcgcgaaggaggaggagatgggtcaagtgtggtggggccaccgcgcgtggtccctcctctccgctgttcgtgcacgggcgccgctagtgcagtgcatcaccaacctcgtctcaatggacatcgccgccaacgtgctcctcgccgcgggcgcctccccggctatggtccactccctccgcgaggtgcccgactttaccccgcgctgcgacgccgtgtatgtcaacgtcggcacgctctcggaggactggctcccctccatgcgcgccgccgcctccgccggccgcccctgggtgctcgaccccgtcgccgccgccgcctccgggttccggatgaaagcctgcctcgagcttctgtcgctctgcccagcagtcgtcagggggaacgcctctgaaattctcgcgctcgcttcccgctcaaccgccgcctcttccaatttcaagggtgtggacagttcacattgctctgttgatgctattgaagctgcaaaagcgttggcactgtccagcagtgctgttgtcgcggtatctggagctgttgatttcgtcactgatgggaagcaggttatcagcgtgagcaacggtgtgcccatgatgcagaagatcaccgcaacagggtgcgctgtgactgctcttattgctgcatttgttgccatggaaccttctgatgccatagttgcagcggcatgcgctcttgccatctttggtctggtgggagagattgggatggagtcagccaaggggcctgcctctcttaggatgcacctcatcgacgctctctactgcctcaatgaagaaacagtcacttctcgggttaggatttccttgcgaccatgatgcgcggacgcatgccatggctactgttttttcaggtaaatatggagtttcgaataataggaaggctgagttcattttctgaaatgtcttgataaccatgaaaatcatagacactcctttaaccttcacgactgtacgaaatacctagatgtgatgcccaagttgtgcctgaattgtcagctgtacatatttaatacagtaaaatggggaaccttgtttc

SEQ ID NO: 6823 - protein, 302 aa, Zea mays subsp. mays
  peptide (1)..(302): Ceres Seq. ID no. 12386566
  misc_feature (45)..(288): Pfam Name: Hydroxyethylthiazole kinase family Pfam Description: Hydroxyethylthiazole kinase family
  misc_feature (29)..(300): Homolog of NCBI NO: 34915114 NR Description: putative hydoxyethylthiazole kinase [Oryza sativa
  misc_feature (29)..(299): Homolog of NCBI NO: 15229565 NR Description: hydoxyethylthiazole kinase, putative; protein id:
  misc_feature (34)..(290): Homolog of NCBI NO: 24216064 NR Description: hydroxyethylthiazole kinase [Leptospira serovar lai str. 56601] >gi|24197300|gb|AAN50563.1|AE011496_2
  misc_feature (52)..(290): Homolog of NCBI NO: 15802579 NR Description: hydoxyethylthiazole kinase [Escherichia coli
  misc_feature (45)..(301): Homolog of NCBI NO: 28899986 NR Description: putative hydroxyethylthiazole kinase [Vibrio RIMD 2210633] >gi|28808269|dbj|BAC61474.1| putative
  misc_feature (52)..(290): Homolog of NCBI NO: 15832161 NR Description: hydoxyethylthiazole kinase [Escherichia coli
  misc_feature (45)..(294): Homolog of NCBI NO: 16761089 NR Description: hydroxyethylthiazole kinase [Salmonella enterica enterica serovar Typhi] >gi|29141214|ref|NP_804556.1| kinase [Salmonella enterica subsp. enterica serovar Typhi Ty2]
  misc_feature (52)..(290): Homolog of NCBI NO: 16130042 NR Description: hydoxyethylthiazole kinase [Escherichia coli K12]
  misc_feature (45)..(294): Homolog of NCBI NO: 16765476 NR Description: hydoxyethylthiazole kinase (THZ kinase) typhimurium LT2] >gi|2499011|sp|P55883|THIM_SALTY
  misc_feature (52)..(290): Homolog of NCBI NO: 24113480 NR Description: hydoxyethylthiazole kinase [Shigella flexneri 2a
PKAKEEKGIAPPATLLPPAAAAMDVGAKEEEMGQVWWGHRAWSLLSAVRARAPLVQCITNLVSMDIAANVLLAAGASPAMVHSLREVPDFTPRCDAVYVNVGTLSEDWLPSMRAAASAGRPWVLDPVAAAASGFRMKACLELLSLCPAVVRGNASEILALASRSTAASSNFKGVDSSHCSVDAIEAAKALALSSSAVVAVSGAVDFVTDGKQVISVSNGVPMMQKITATGCAVTALIAAFVAMEPSDAIVAAACALAIFGLVGEIGMESAKGPASLRMHLIDALYCLNEETVTSRVRISLRP

SEQ ID NO: 6824 - protein, 280 aa, Zea mays subsp. mays
  peptide (1)..(280): Ceres Seq. ID no. 12386567
  misc_feature (23)..(266): Pfam Name: Hydroxyethylthiazole kinase family Pfam Description: Hydroxyethylthiazole kinase family
  misc_feature (7)..(278): Homolog of NCBI NO: 34915114 NR Description: putative hydoxyethylthiazole kinase [Oryza sativa
  misc_feature (7)..(277): Homolog of NCBI NO: 15229565 NR Description: hydoxyethylthiazole kinase, putative; protein id:
  misc_feature (12)..(268): Homolog of NCBI NO: 24216064 NR Description: hydroxyethylthiazole kinase [Leptospira serovar lai str. 56601] >gi|24197300|gb|AAN50563.1|AE011496_2
  misc_feature (30)..(268): Homolog of NCBI NO: 15802579 NR Description: hydoxyethylthiazole kinase [Escherichia coli
  misc_feature (23)..(279): Homolog of NCBI NO: 28899986 NR Description: putative hydroxyethylthiazole kinase [Vibrio RIMD 2210633] >gi|28808269|dbj|BAC61474.1| putative
  misc_feature (30)..(268): Homolog of NCBI NO: 15832161 NR Description: hydoxyethylthiazole kinase [Escherichia coli
  misc_feature (23)..(272): Homolog of NCBI NO: 16761089 NR Description: hydroxyethylthiazole kinase [Salmonella enterica enterica serovar Typhi] >gi|29141214|ref|NP_804556.1| kinase [Salmonella enterica subsp. enterica serovar Typhi Ty2]
  misc_feature (30)..(268): Homolog of NCBI NO: 16130042 NR Description: hydoxyethylthiazole kinase [Escherichia coli K12]
  misc_feature (23)..(272): Homolog of NCBI NO: 16765476 NR Description: hydoxyethylthiazole kinase (THZ kinase) typhimurium LT2] >gi|2499011|sp|P55883|THIM_SALTY
  misc_feature (30)..(268): Homolog of NCBI NO: 24113480 NR Description: hydoxyethylthiazole kinase [Shigella flexneri 2a
MDVGAKEEEMGQVWWGHRAWSLLSAVRARAPLVQCITNLVSMDIAANVLLAAGASPAMVHSLREVPDFTPRCDAVYVNVGTLSEDWLPSMRAAASAGRPWVLDPVAAAASGFRMKACLELLSLCPAVVRGNASEILALASRSTAASSNFKGVDSSHCSVDAIEAAKALALSSSAVVAVSGAVDFVTDGKQVISVSNGVPMMQKITATGCAVTALIAAFVAMEPSDAIVAAACALAIFGLVGEIGMESAKGPASLRMHLIDALYCLNEETVTSRVRISLRP

SEQ ID NO: 6825 - protein, 271 aa, Zea mays subsp. mays
  peptide (1)..(271): Ceres Seq. ID no. 12386568
  misc_feature (14)..(257): Pfam Name: Hydroxyethylthiazole kinase family Pfam Description: Hydroxyethylthiazole kinase family
  misc_feature (1)..(269): Homolog of NCBI NO: 34915114 NR Description: putative hydoxyethylthiazole kinase [Oryza sativa
  misc_feature (1)..(268): Homolog of NCBI NO: 15229565 NR Description: hydoxyethylthiazole kinase, putative; protein id:
  misc_feature (3)..(259): Homolog of NCBI NO: 24216064 NR Description: hydroxyethylthiazole kinase [Leptospira serovar lai str. 56601] >gi|24197300|gb|AAN50563.1|AE011496_2
  misc_feature (21)..(259): Homolog of NCBI NO: 15802579 NR Description: hydoxyethylthiazole kinase [Escherichia coli
  misc_feature (14)..(270): Homolog of NCBI NO: 28899986 NR Description: putative hydroxyethylthiazole kinase [Vibrio RIMD 2210633] >gi|28808269|dbj|BAC61474.1| putative
  misc_feature (21)..(259): Homolog of NCBI NO: 15832161 NR Description: hydoxyethylthiazole kinase [Escherichia coli
  misc_feature (14)..(263): Homolog of NCBI NO: 16761089 NR Description: hydroxyethylthiazole kinase [Salmonella enterica enterica serovar Typhi] >gi|29141214|ref|NP_804556.1| kinase [Salmonella enterica subsp. enterica serovar Typhi Ty2]
  misc_feature (21)..(259): Homolog of NCBI NO: 16130042 NR Description: hydoxyethylthiazole kinase [Escherichia coli K12]
  misc_feature (14)..(263): Homolog of NCBI NO: 16765476 NR Description: hydoxyethylthiazole kinase (THZ kinase) typhimurium LT2] >gi|2499011|sp|P55883|THIM_SALTY
  misc_feature (21)..(259): Homolog of NCBI NO: 24113480 NR Description: hydoxyethylthiazole kinase [Shigella flexneri 2a
MGQVWWGHRAWSLLSAVRARAPLVQCITNLVSMDIAANVLLAAGASPAMVHSLREVPDFTPRCDAVYVNVGTLSEDWLPSMRAAASAGRPWVLDPVAAAASGFRMKACLELLSLCPAVVRGNASEILALASRSTAASSNFKGVDSSHCSVDAIEAAKALALSSSAVVAVSGAVDFVTDGKQVISVSNGVPMMQKITATGCAVTALIAAFVAMEPSDAIVAAACALAIFGLVGEIGMESAKGPASLRMHLIDALYCLNEETVTSRVRISLRP

SEQ ID NO: 6826 - DNA, 853 bp, Zea mays subsp. mays
  misc_feature (1)..(853): Ceres Seq. ID no. 12402503
  misc_feature: MA Experiment ID: 108504 Result: Down-regulated in Transcription
  misc_feature: MA Experiment 108504 PARAMETER Experiment Name: Zm_Drought_P Parameter: Age (day) Value: 8
  misc_feature: MA Experiment 108504 PARAMETER Experiment Name: Zm_Drought_P Parameter: Organism Value: Zea mays
  misc_feature: MA Experiment 108504 PARAMETER Experiment Name: Zm_Drought_P Parameter: Plant Line Value: 35A19
  misc_feature: MA Experiment 108504 PARAMETER Experiment Name: Zm_Drought_P Parameter: Timepoint (hr) Value: 12
  misc_feature: MA Experiment 108504 PARAMETER Experiment Name: Zm_Drought_P Parameter: Tissue Value: Aerial
  misc_feature: MA Experiment 108504 PARAMETER Experiment Name: Zm_Drought_P Parameter: Treatment Value: Drought vs. No Drought
  misc_feature: MA Experiment ID: 108530 Result: Up-regulated in Transcription
  misc_feature: MA Experiment 108530 PARAMETER Experiment Name: Zm_Imbibed_Seeds_P Parameter: Age (day) Value: 6 vs. 2
  misc_feature: MA Experiment 108530 PARAMETER Experiment Name: Zm_Imbibed_Seeds_P Parameter: Organism Value: Zea mays
  misc_feature: MA Experiment 108530 PARAMETER Experiment Name: Zm_Imbibed_Seeds_P Parameter: Plant Line Value: 35A19
  misc_feature: MA Experiment 108530 PARAMETER Experiment Name: Zm_Imbibed_Seeds_P Parameter: Tissue Value: Aerial vs. Embryo
  misc_feature: MA Experiment ID: 108535 Result: Down-regulated in Transcription
  misc_feature: MA Experiment 108535 PARAMETER Experiment Name: Zm_Meristem_P Parameter: Age (day) Value: 8
  misc_feature: MA Experiment 108535 PARAMETER Experiment Name: Zm_Meristem_P Parameter: Organism Value: Zea mays
  misc_feature: MA Experiment 108535 PARAMETER Experiment Name: Zm_Meristem_P Parameter: Plant Line Value: 35A19
  misc_feature: MA Experiment 108535 PARAMETER Experiment Name: Zm_Meristem_P Parameter: Tissue Value: Root Meristem vs. Above Root Meristem
  misc_feature: MA Experiment ID: 108543 Result: Up-regulated in Transcription
  misc_feature: MA Experiment ID: 108546 Result: Up-regulated in Transcription
  misc_feature: MA Experiment 108546 PARAMETER Experiment Name: Zm_Imbibed_Seeds_P Parameter: Age (day) Value: 3 vs. 2
  misc_feature: MA Experiment 108546 PARAMETER Experiment Name: Zm_Imbibed_Seeds_P Parameter: Organism Value: Zea mays
  misc_feature: MA Experiment 108546 PARAMETER Experiment Name: Zm_Imbibed_Seeds_P Parameter: Plant Line Value: 35A19
  misc_feature: MA Experiment 108546 PARAMETER Experiment Name: Zm_Imbibed_Seeds_P Parameter: Tissue Value: Roots vs. Embryo
  misc_feature: MA Experiment ID: 108547 Result: Up-regulated in Transcription
  misc_feature: MA Experiment 108547 PARAMETER Experiment Name: Zm_Imbibed_Seeds_P Parameter: Age (day) Value: 4 vs. 2
  misc_feature: MA Experiment 108547 PARAMETER Experiment Name: Zm_Imbibed_Seeds_P Parameter: Organism Value: Zea mays
  misc_feature: MA Experiment 108547 PARAMETER Experiment Name: Zm_Imbibed_Seeds_P Parameter: Plant Line Value: 35A19
  misc_feature: MA Experiment 108547 PARAMETER Experiment Name: Zm_Imbibed_Seeds_P Parameter: Tissue Value: Aerial vs. Embryo
  misc_feature: MA Experiment ID: 108559 Result: Down-regulated in Transcription
  misc_feature: MA Experiment 108559 PARAMETER Experiment Name: Zm_5mM_NO_P Parameter: Age (day) Value: 8
  misc_feature: MA Experiment 108559 PARAMETER Experiment Name: Zm_5mM_NO_P Parameter: Organism Value: Zea mays
  misc_feature: MA Experiment 108559 PARAMETER Experiment Name: Zm_5mM_NO_P Parameter: Plant Line Value: 35A19
  misc_feature: MA Experiment 108559 PARAMETER Experiment Name: Zm_5mM_NO_P Parameter: Timepoint (hr) Value: 12
  misc_feature: MA Experiment 108559 PARAMETER Experiment Name: Zm_5mM_NO_P Parameter: Tissue Value: Aerial
  misc_feature: MA Experiment 108559 PARAMETER Experiment Name: Zm_5mM_NO_P Parameter: Treatment Value: 5mM NO vs. No Treatment
  misc_feature: MA Experiment ID: 108597 Result: Down-regulated in Transcription
  misc_feature: MA Experiment 108597 PARAMETER Experiment Name: Zm_100uM_ABA_P Parameter: Age (day) Value: 9
  misc_feature: MA Experiment 108597 PARAMETER Experiment Name: Zm_100uM_ABA_P Parameter: Organism Value: Zea mays
  misc_feature: MA Experiment 108597 PARAMETER Experiment Name: Zm_100uM_ABA_P Parameter: Plant Line Value: 35A19
  misc_feature: MA Experiment 108597 PARAMETER Experiment Name: Zm_100uM_ABA_P Parameter: Timepoint (hr) Value: 24
  misc_feature: MA Experiment 108597 PARAMETER Experiment Name: Zm_100uM_ABA_P Parameter: Tissue Value: Aerial
  misc_feature: MA Experiment 108597 PARAMETER Experiment Name: Zm_100uM_ABA_P Parameter: Treatment Value: 100uM ABA vs. No Treatment
  misc_feature: MA Experiment ID: 108689 Result: Up-regulated in Transcription
  misc_feature: MA Experiment 108689 PARAMETER Experiment Name: Zm_Drought_Roots_P Parameter: Age (day) Value: 9
  misc_feature: MA Experiment 108689 PARAMETER Experiment Name: Zm_Drought_Roots_P Parameter: Organism Value: Zea mays
  misc_feature: MA Experiment 108689 PARAMETER Experiment Name: Zm_Drought_Roots_P Parameter: Plant Line Value: 35A19
  misc_feature: MA Experiment 108689 PARAMETER Experiment Name: Zm_Drought_Roots_P Parameter: Timepoint (hr) Value: 24
  misc_feature: MA Experiment 108689 PARAMETER Experiment Name: Zm_Drought_Roots_P Parameter: Tissue Value: Roots
  misc_feature: MA Experiment 108689 PARAMETER Experiment Name: Zm_Drought_Roots_P Parameter: Treatment Value: Drought vs. No Drought
  misc_feature: MA Experiment ID: 20000477 Result: Down-regulated in Transcription
  misc_feature: MA Experiment 20000477 PARAMETER Experiment Name: Zm_5mM_SA_P Parameter: Age (day) Value: 10
  misc_feature: MA Experiment 20000477 PARAMETER Experiment Name: Zm_5mM_SA_P Parameter: Organism Value: Zea mays
  misc_feature: MA Experiment 20000477 PARAMETER Experiment Name: Zm_5mM_SA_P Parameter: Plant Line Value: 35A19
  misc_feature: MA Experiment 20000477 PARAMETER Experiment Name: Zm_5mM_SA_P Parameter: Timepoint (hr) Value: 48
  misc_feature: MA Experiment 20000477 PARAMETER Experiment Name: Zm_5mM_SA_P Parameter: Tissue Value: Aerial
  misc_feature: MA Experiment 20000477 PARAMETER Experiment Name: Zm_5mM_SA_P Parameter: Treatment Value: 5mM SA vs. No Treatment
  misc_feature: MA Experiment ID: 20000478 Result: Down-regulated in Transcription
  misc_feature: MA Experiment 20000478 PARAMETER Experiment Name: Zm_5mM_SA_P Parameter: Age (day) Value: 11
  misc_feature: MA Experiment 20000478 PARAMETER Experiment Name: Zm_5mM_SA_P Parameter: Organism Value: Zea mays
  misc_feature: MA Experiment 20000478 PARAMETER Experiment Name: Zm_5mM_SA_P Parameter: Plant Line Value: 35A19
  misc_feature: MA Experiment 20000478 PARAMETER Experiment Name: Zm_5mM_SA_P Parameter: Timepoint (hr) Value: 72
  misc_feature: MA Experiment 20000478 PARAMETER Experiment Name: Zm_5mM_SA_P Parameter: Tissue Value: Aerial
  misc_feature: MA Experiment 20000478 PARAMETER Experiment Name: Zm_5mM_SA_P Parameter: Treatment Value: 5mM SA vs. No Treatment
  misc_feature: MA Experiment ID: 20000479 Result: Down-regulated in Transcription
  misc_feature: MA Experiment 20000479 PARAMETER Experiment Name: Zm_Drought_P Parameter: Age (day) Value: 10
  misc_feature: MA Experiment 20000479 PARAMETER Experiment Name: Zm_Drought_P Parameter: Organism Value: Zea mays
  misc_feature: MA Experiment 20000479 PARAMETER Experiment Name: Zm_Drought_P Parameter: Plant Line Value: 35A19
  misc_feature: MA Experiment 20000479 PARAMETER Experiment Name: Zm_Drought_P Parameter: Timepoint (hr) Value: 48
  misc_feature: MA Experiment 20000479 PARAMETER Experiment Name: Zm_Drought_P Parameter: Tissue Value: Aerial
  misc_feature: MA Experiment 20000479 PARAMETER Experiment Name: Zm_Drought_P Parameter: Treatment Value: Drought vs. No Drought
  misc_feature: MA Experiment ID: 20000480 Result: Down-regulated in Transcription
  misc_feature: MA Experiment 20000480 PARAMETER Experiment Name: Zm_Drought_P Parameter: Age (day) Value: 11
  misc_feature: MA Experiment 20000480 PARAMETER Experiment Name: Zm_Drought_P Parameter: Organism Value: Zea mays
  misc_feature: MA Experiment 20000480 PARAMETER Experiment Name: Zm_Drought_P Parameter: Plant Line Value: 35A19
  misc_feature: MA Experiment 20000480 PARAMETER Experiment Name: Zm_Drought_P Parameter: Timepoint (hr) Value: 72
  misc_feature: MA Experiment 20000480 PARAMETER Experiment Name: Zm_Drought_P Parameter: Tissue Value: Aerial
  misc_feature: MA Experiment 20000480 PARAMETER Experiment Name: Zm_Drought_P Parameter: Treatment Value: Drought vs. No Drought
  misc_feature: MA Experiment ID: 20000492 Result: Down-regulated in Transcription
  misc_feature: MA Experiment 20000492 PARAMETER Experiment Name: Zm_Hybrid_Seed_Dev_P Parameter: DAP Value: 12
  misc_feature: MA Experiment 20000492 PARAMETER Experiment Name: Zm_Hybrid_Seed_Dev_P Parameter: Organism Value: Zea mays
  misc_feature: MA Experiment 20000492 PARAMETER Experiment Name: Zm_Hybrid_Seed_Dev_P Parameter: Plant Line Value: 35A19
  misc_feature: MA Experiment 20000492 PARAMETER Experiment Name: Zm_Hybrid_Seed_Dev_P Parameter: Tissue Value: Fert Kernel vs. Unfert Floret
  misc_feature: MA Experiment ID: 20000534 Result: Down-regulated in Transcription
  misc_feature: MA Experiment 20000534 PARAMETER Experiment Name: Zm_Hybrid_Pollen_P Parameter: Age (day) Value: 8
  misc_feature: MA Experiment 20000534 PARAMETER Experiment Name: Zm_Hybrid_Pollen_P Parameter: Organism Value: Zea mays
  misc_feature: MA Experiment 20000534 PARAMETER Experiment Name: Zm_Hybrid_Pollen_P Parameter: Plant Line Value: 35A19
  misc_feature: MA Experiment 20000534 PARAMETER Experiment Name: Zm_Hybrid_Pollen_P Parameter: Tissue Value: Pollen vs. Aerial
  misc_feature: MA Experiment ID: 20000535 Result: Down-regulated in Transcription
  misc_feature: MA Experiment 20000535 PARAMETER Experiment Name: Zm_Hybrid_Seed_Dev_P Parameter: DAP Value: 30 vs. 12
  misc_feature: MA Experiment 20000535 PARAMETER Experiment Name: Zm_Hybrid_Seed_Dev_P Parameter: Organism Value: Zea mays
  misc_feature: MA Experiment 20000535 PARAMETER Experiment Name: Zm_Hybrid_Seed_Dev_P Parameter: Plant Line Value: 35A19
  misc_feature: MA Experiment 20000535 PARAMETER Experiment Name: Zm_Hybrid_Seed_Dev_P Parameter: Tissue Value: Embryo vs. Unfert Floret
ctatatatccacacggacggagcccgcgtcattgtgcggtgccctccggagcgcacggcggcggcctcctgccgaccttcgcggtagcaagctagcagctagctagccgcagttagcgtctctttcgtccgtcctcctgcgccggccgtcatgaccttcccgctggtttgctactgcaacgcggtgccgcgccccgtggccgcgctgttcaagaccatccacgccgcggcgctggtggtcgtgctggtcctctgcttcctgggcctctacgagttcccctacgaccccgaggaccacgcgccggtgatcaacgggcgggcccgcggcgggcgggacgcccctgggccggaggcggtgaagcggcacctcccgctcgtcgagttcctggagctgatggtggtggctccgtcgtcgccgtcgggggcggaggcggctccgacgtgccgggtgtgcctggagaggctggaggcggcggacggggtgcggcggctgggcaactgcgcccacgcgttccacgcgcgctgcatcgaccgctggatcgacctgggcgaggtgacgtgcccgctgtgccgctcccacctgctgccgcgccggcgcgccggcctgcttgccatggcacggcttggcgacggctagtagtcgcccgtccgtccgtccgtacctggttgtttccttgccacgtgacgtgcgtgcccgtgcccgtgtccgtatatatgcttggctttcaggcggcgctggtgccggatgggggcggaccaaccgcgaactgatcgcgattagcaggacgatggactaaccaccaacctgatgttattaatgaatgggcgcaagttaaattaaccggaggaggttg

SEQ ID NO: 6827 - protein, 161 aa, Zea mays subsp. mays
  peptide (1)..(161): Ceres Seq. ID no. 12402504
  misc_feature (98)..(140): Pfam Name: Zinc finger, C3HC4 type (RING finger) Pfam Description: Zinc finger, C3HC4 type (RING finger)
  misc_feature (1)..(159): Homolog of NCBI NO: 38345870 NR Description: OSJNBa0064M23.12 [Oryza sativa (japonica
  misc_feature (1)..(146): Homolog of NCBI NO: 15233117 NR Description: RING finger protein; protein id: At3g61460.1, by cDNA: 25801., supported by cDNA: gi_17644156, supported by
  misc_feature (30)..(149): Homolog of NCBI NO: 15233352 NR Description: RING-H2 finger protein RHA1a -like protein; id: At4g11370.1, supported by cDNA: 21591., supported by cDNA:
  misc_feature (73)..(142): Homolog of NCBI NO: 21554155 NR Description: RING zinc finger protein-like [Arabidopsis
  misc_feature (73)..(142): Homolog of NCBI NO: 15238072 NR Description: RING zinc finger protein-like; protein id: supported by cDNA: 207148. [Arabidopsis thaliana]
  misc_feature (62)..(149): Homolog of NCBI NO: 11358776 NR Description: RING-H2 finger protein RHA1a [imported] -
  misc_feature (80)..(150): Homolog of NCBI NO: 11358777 NR Description: RING-H2 finger protein RHA1b [imported] -
  misc_feature (80)..(150): Homolog of NCBI NO: 15233350 NR Description: RING-H2 finger protein RHA1b; protein id: supported by cDNA: 37097., supported by cDNA: gi_3790566
  misc_feature (57)..(152): Homolog of NCBI NO: 34894518 NR Description: P0551A11.23 [Oryza sativa (japonica
  misc_feature (97)..(146): Homolog of NCBI NO: 18411282 NR Description: similar to RING finger protein; protein id:
MTFPLVCYCNAVPRPVAALFKTIHAAALVVVLVLCFLGLYEFPYDPEDHAPVINGRARGGRDAPGPEAVKRHLPLVEFLELMVVAPSSPSGAEAAPTCRVCLERLEAADGVRRLGNCAHAFHARCIDRWIDLGEVTCPLCRSHLLPRRRAGLLAMARLGDG

SEQ ID NO: 6828 - protein, 80 aa, Zea mays subsp. mays
  peptide (1)..(80): Ceres Seq. ID no. 12402505
  misc_feature (17)..(59): Pfam Name: Zinc finger, C3HC4 type (RING finger) Pfam Description: Zinc finger, C3HC4 type (RING finger)
  misc_feature (1)..(78): Homolog of NCBI NO: 38345870 NR Description: OSJNBa0064M23.12 [Oryza sativa (japonica
  misc_feature (1)..(65): Homolog of NCBI NO: 15233117 NR Description: RING finger protein; protein id: At3g61460.1, by cDNA: 25801., supported by cDNA: gi_17644156, supported by
  misc_feature (1)..(68): Homolog of NCBI NO: 15233352 NR Description: RING-H2 finger protein RHA1a -like protein; id: At4g11370.1, supported by cDNA: 21591., supported by cDNA:
  misc_feature (1)..(61): Homolog of NCBI NO: 21554155 NR Description: RING zinc finger protein-like [Arabidopsis
  misc_feature (1)..(61): Homolog of NCBI NO: 15238072 NR Description: RING zinc finger protein-like; protein id: supported by cDNA: 207148. [Arabidopsis thaliana]
  misc_feature (1)..(68): Homolog of NCBI NO: 11358776 NR Description: RING-H2 finger protein RHA1a [imported] -
  misc_feature (1)..(69): Homolog of NCBI NO: 11358777 NR Description: RING-H2 finger protein RHA1b [imported] -
  misc_feature (1)..(69): Homolog of NCBI NO: 15233350 NR Description: RING-H2 finger protein RHA1b; protein id: supported by cDNA: 37097., supported by cDNA: gi_3790566
  misc_feature (1)..(71): Homolog of NCBI NO: 34894518 NR Description: P0551A11.23 [Oryza sativa (japonica
  misc_feature (16)..(65): Homolog of NCBI NO: 18411282 NR Description: similar to RING finger protein; protein id:
MVVAPSSPSGAEAAPTCRVCLERLEAADGVRRLGNCAHAFHARCIDRWIDLGEVTCPLCRSHLLPRRRAGLLAMARLGDG

SEQ ID NO: 6829 - DNA, 1619 bp, Zea mays subsp. mays
  misc_feature (1)..(1619): Ceres Seq. ID no. 12350003
  misc_feature: MA Experiment ID: 108689 Result: Up-regulated in Transcription
  misc_feature: MA Experiment 108689 PARAMETER Experiment Name: Zm_Drought_Roots_P Parameter: Age (day) Value: 9
  misc_feature: MA Experiment 108689 PARAMETER Experiment Name: Zm_Drought_Roots_P Parameter: Organism Value: Zea mays
  misc_feature: MA Experiment 108689 PARAMETER Experiment Name: Zm_Drought_Roots_P Parameter: Plant Line Value: 35A19
  misc_feature: MA Experiment 108689 PARAMETER Experiment Name: Zm_Drought_Roots_P Parameter: Timepoint (hr) Value: 24
  misc_feature: MA Experiment 108689 PARAMETER Experiment Name: Zm_Drought_Roots_P Parameter: Tissue Value: Roots
  misc_feature: MA Experiment 108689 PARAMETER Experiment Name: Zm_Drought_Roots_P Parameter: Treatment Value: Drought vs. No Drought
  misc_feature: MA Experiment ID: 20000477 Result: Down-regulated in Transcription
  misc_feature: MA Experiment 20000477 PARAMETER Experiment Name: Zm_5mM_SA_P Parameter: Age (day) Value: 10
  misc_feature: MA Experiment 20000477 PARAMETER Experiment Name: Zm_5mM_SA_P Parameter: Organism Value: Zea mays
  misc_feature: MA Experiment 20000477 PARAMETER Experiment Name: Zm_5mM_SA_P Parameter: Plant Line Value: 35A19
  misc_feature: MA Experiment 20000477 PARAMETER Experiment Name: Zm_5mM_SA_P Parameter: Timepoint (hr) Value: 48
  misc_feature: MA Experiment 20000477 PARAMETER Experiment Name: Zm_5mM_SA_P Parameter: Tissue Value: Aerial
  misc_feature: MA Experiment 20000477 PARAMETER Experiment Name: Zm_5mM_SA_P Parameter: Treatment Value: 5mM SA vs. No Treatment
agggacaaagaaaggaaagggacgcccgtctcgtcacgtcctccacccccgccgccatggctgccctgggcctgctcctcctcgccgtcgtcggtgccaccaacgccgcggcgccgggcggtagaatgtccatcatctcctacaacgaggagcacgccgcgcgcgggctggagcggacggagccggaggcccggacgctgtacgagctctggctcgccgagcacggccgcgcctacaacgcgctcggcgagcgcgaccgccgcttccgcgtgttctgggacaacctacgcttcgtcgacgcgcacaacgagcgcgccgcggagcacggcttccgcctcggcatgaaccagttcgccgacctcaccaacgacgagttccgcgccgcgtacctcggcgccaggatccccgccgcccggagaaggggaaccgccgtgggggagaggtaccgccacggcggtggcgccgaggagctgccggagagcgtcgactggagggagaagggcgccgttgcgcccgtcaagaaccaggggcagtgcggaagttgctgggctttctctgcagtaagctcagtagaaagcgttaaccaaattgttactggtgagatggtgaccttgtccgagcaggagcttgtagagtgctcgactgatggagggaacagcggctgcaatggtgggcttatggatgccgcatttgattttatcataaagaacgggggcattgatactgaaggagactacccttacaaagctgtggatgggaagtgtgacatcaacagggaaaatgccaaggttgtgagcatcgatggctttgaagatgtgcctgaaaacgacgagaaatcattgcagaaggcagttgctcaccagcccgtcagcgttgccattgaggctggtggccgggagttccagctgtacaaagcgggtgtctttagtggaacttgcaccacaaatcttgaccacggtgtcgtcgctgtcggctacggcaccgaaaatgggaaggactactggattgtccgcaactcttggggtgcaaagtggggcgaggatggttacatccgtatggagaggaacgtcaatgccaccactgggaagtgcgggattgctatgatggcatcctaccctaccaagaagggcgcaaaccctcccaagccgtctccaacccctccaacgccgccgcctcccccggttgcccctgacaatgtctgcgatgagaacttctcttgcgcagcgggcagcacctgctgctgtgcgtttggtttcaggaacgtctgcttggtctggggttgctgtccgatggaaggtgccacctgctgcaaggaccacgccagctgctgcccgccgggttaccctgtgtgcaacgtcagagccggaacttgctcagtgagcaagaacagcccgctgagcgtgaaggccttgaagcgcaccctcgccaagctgaacagcgcatgagctcgtccagacatcatggatctggagaggaatgggaccgccccggagcttttcagactctgcgtcctgatacaagctttcatagataacattatattgtatatctaagtattacttggcgtcccataaatccgttgtaaatatcaagctataatttctactatcttcgttctc

SEQ ID NO: 6830 - protein, 480 aa, Zea mays subsp. mays
  peptide (1)..(480): Ceres Seq. ID no. 12350004
  misc_feature (157)..(373): Pfam Name: Papain family cysteine protease Pfam Description: Papain family cysteine protease
  misc_feature (18)..(479): Homolog of NCBI NO: 129232 NR Description: Oryzain beta chain precursor
  misc_feature (11)..(476): Homolog of NCBI NO: 6682829 NR Description: cysteine protease component of protease-inhibitor
  misc_feature (10)..(476): Homolog of NCBI NO: 7435806 NR Description: cysteine proteinase mir3 (EC 3.4.22.-) - maize
  misc_feature (18)..(478): Homolog of NCBI NO: 129231 NR Description: Oryzain alpha chain precursor
  misc_feature (24)..(480): Homolog of NCBI NO: 7435791 NR Description: cysteine proteinase (EC 3.4.22.-) 3 precursor - bean >gi|2511693|emb|CAB17076.1| cysteine proteinase precursor
  misc_feature (19)..(476): Homolog of NCBI NO: 13897890 NR Description: putative cysteine protease [Ipomoea batatas]
  misc_feature (24)..(475): Homolog of NCBI NO: 18422289 NR Description: cysteine proteinase RD21A; protein id:
  misc_feature (22)..(476): Homolog of NCBI NO: 7435801 NR Description: cysteine proteinase (EC 3.4.22.-) precursor -
  misc_feature (22)..(472): Homolog of NCBI NO: 18401614 NR Description: cysteine proteinase RD21A; protein id: supported by cDNA: gi_14517541, supported by cDNA: gi_18175925, by cDNA: gi_19548038 [Arabidopsis thaliana]
  misc_feature (22)..(472): Homolog of NCBI NO: 14517542 NR Description: F2G19.31/F2G19.31 [Arabidopsis thaliana]
GQRKERDARLVTSSTPAAMAALGLLLLAVVGATNAAAPGGRMSIISYNEEHAARGLERTEPEARTLYELWLAEHGRAYNALGERDRRFRVFWDNLRFVDAHNERAAEHGFRLGMNQFADLTNDEFRAAYLGARIPAARRRGTAVGERYRHGGGAEELPESVDWREKGAVAPVKNQGQCGSCWAFSAVSSVESVNQIVTGEMVTLSEQELVECSTDGGNSGCNGGLMDAAFDFIIKNGGIDTEGDYPYKAVDGKCDINRENAKVVSIDGFEDVPENDEKSLQKAVAHQPVSVAIEAGGREFQLYKAGVFSGTCTTNLDHGVVAVGYGTENGKDYWIVRNSWGAKWGEDGYIRMERNVNATTGKCGIAMMASYPTKKGANPPKPSPTPPTPPPPPVAPDNVCDENFSCAAGSTCCCAFGFRNVCLVWGCCPMEGATCCKDHASCCPPGYPVCNVRAGTCSVSKNSPLSVKALKRTLAKLNSA

SEQ ID NO: 6831 - protein, 462 aa, Zea mays subsp. mays
  peptide (1)..(462): Ceres Seq. ID no. 12350005
  misc_feature (139)..(355): Pfam Name: Papain family cysteine protease Pfam Description: Papain family cysteine protease
  misc_feature (1)..(461): Homolog of NCBI NO: 129232 NR Description: Oryzain beta chain precursor
  misc_feature (1)..(458): Homolog of NCBI NO: 6682829 NR Description: cysteine protease component of protease-inhibitor
  misc_feature (1)..(458): Homolog of NCBI NO: 7435806 NR Description: cysteine proteinase mir3 (EC 3.4.22.-) - maize
  misc_feature (1)..(460): Homolog of NCBI NO: 129231 NR Description: Oryzain alpha chain precursor
  misc_feature (6)..(462): Homolog of NCBI NO: 7435791 NR Description: cysteine proteinase (EC 3.4.22.-) 3 precursor - bean >gi|2511693|emb|CAB17076.1| cysteine proteinase precursor
  misc_feature (1)..(458): Homolog of NCBI NO: 13897890 NR Description: putative cysteine protease [Ipomoea batatas]
  misc_feature (6)..(457): Homolog of NCBI NO: 18422289 NR Description: cysteine proteinase RD21A; protein id:
  misc_feature (4)..(458): Homolog of NCBI NO: 7435801 NR Description: cysteine proteinase (EC 3.4.22.-) precursor -
  misc_feature (4)..(454): Homolog of NCBI NO: 18401614 NR Description: cysteine proteinase RD21A; protein id: supported by cDNA: gi_14517541, supported by cDNA: gi_18175925, by cDNA: gi_19548038 [Arabidopsis thaliana]
  misc_feature (4)..(454): Homolog of NCBI NO: 14517542 NR Description: F2G19.31/F2G19.31 [Arabidopsis thaliana]
MAALGLLLLAVVGATNAAAPGGRMSIISYNEEHAARGLERTEPEARTLYELWLAEHGRAYNALGERDRRFRVFWDNLRFVDAHNERAAEHGFRLGMNQFADLTNDEFRAAYLGARIPAARRRGTAVGERYRHGGGAEELPESVDWREKGAVAPVKNQGQCGSCWAFSAVSSVESVNQIVTGEMVTLSEQELVECSTDGGNSGCNGGLMDAAFDFIIKNGGIDTEGDYPYKAVDGKCDINRENAKVVSIDGFEDVPENDEKSLQKAVAHQPVSVAIEAGGREFQLYKAGVFSGTCTTNLDHGVVAVGYGTENGKDYWIVRNSWGAKWGEDGYIRMERNVNATTGKCGIAMMASYPTKKGANPPKPSPTPPTPPPPPVAPDNVCDENFSCAAGSTCCCAFGFRNVCLVWGCCPMEGATCCKDHASCCPPGYPVCNVRAGTCSVSKNSPLSVKALKRTLAKLNSA

SEQ ID NO: 6832 - protein, 439 aa, Zea mays subsp. mays
  peptide (1)..(439): Ceres Seq. ID no. 12350006
  misc_feature (116)..(332): Pfam Name: Papain family cysteine protease Pfam Description: Papain family cysteine protease
  misc_feature (1)..(434): Homolog of NCBI NO: 18422289 NR Description: cysteine proteinase RD21A; protein id:
  misc_feature (1)..(435): Homolog of NCBI NO: 7435801 NR Description: cysteine proteinase (EC 3.4.22.-) precursor -
  misc_feature (1)..(438): Homolog of NCBI NO: 129232 NR Description: Oryzain beta chain precursor
  misc_feature (1)..(435): Homolog of NCBI NO: 7435806 NR Description: cysteine proteinase mir3 (EC 3.4.22.-) - maize
  misc_feature (1)..(439): Homolog of NCBI NO: 7435791 NR Description: cysteine proteinase (EC 3.4.22.-) 3 precursor - bean >gi|2511693|emb|CAB17076.1| cysteine proteinase precursor
  misc_feature (1)..(435): Homolog of NCBI NO: 13897890 NR Description: putative cysteine protease [Ipomoea batatas]
  misc_feature (1)..(437): Homolog of NCBI NO: 129231 NR Description: Oryzain alpha chain precursor
  misc_feature (1)..(435): Homolog of NCBI NO: 6682829 NR Description: cysteine protease component of protease-inhibitor
  misc_feature (1)..(431): Homolog of NCBI NO: 18401614 NR Description: cysteine proteinase RD21A; protein id: supported by cDNA: gi_14517541, supported by cDNA: gi_18175925, by cDNA: gi_19548038 [Arabidopsis thaliana]
  misc_feature (1)..(431): Homolog of NCBI NO: 14517542 NR Description: F2G19.31/F2G19.31 [Arabidopsis thaliana]
MSIISYNEEHAARGLERTEPEARTLYELWLAEHGRAYNALGERDRRFRVFWDNLRFVDAHNERAAEHGFRLGMNQFADLTNDEFRAAYLGARIPAARRRGTAVGERYRHGGGAEELPESVDWREKGAVAPVKNQGQCGSCWAFSAVSSVESVNQIVTGEMVTLSEQELVECSTDGGNSGCNGGLMDAAFDFIIKNGGIDTEGDYPYKAVDGKCDINRENAKVVSIDGFEDVPENDEKSLQKAVAHQPVSVAIEAGGREFQLYKAGVFSGTCTTNLDHGVVAVGYGTENGKDYWIVRNSWGAKWGEDGYIRMERNVNATTGKCGIAMMASYPTKKGANPPKPSPTPPTPPPPPVAPDNVCDENFSCAAGSTCCCAFGFRNVCLVWGCCPMEGATCCKDHASCCPPGYPVCNVRAGTCSVSKNSPLSVKALKRTLAKLNSA

SEQ ID NO: 6833 - DNA, 1904 bp, Zea mays subsp. mays
  misc_feature (1)..(1904): Ceres Seq. ID no. 12406864
  misc_feature: MA Experiment ID: 108528 Result: Up-regulated in Transcription
  misc_feature: MA Experiment 108528 PARAMETER Experiment Name: Zm_Imbibed_Seeds_P Parameter: Age (day) Value: 5 vs. 2
  misc_feature: MA Experiment 108528 PARAMETER Experiment Name: Zm_Imbibed_Seeds_P Parameter: Organism Value: Zea mays
  misc_feature: MA Experiment 108528 PARAMETER Experiment Name: Zm_Imbibed_Seeds_P Parameter: Plant Line Value: 35A19
  misc_feature: MA Experiment 108528 PARAMETER Experiment Name: Zm_Imbibed_Seeds_P Parameter: Tissue Value: Aerial vs. Embryo
  misc_feature: MA Experiment ID: 108530 Result: Up-regulated in Transcription
  misc_feature: MA Experiment 108530 PARAMETER Experiment Name: Zm_Imbibed_Seeds_P Parameter: Age (day) Value: 6 vs. 2
  misc_feature: MA Experiment 108530 PARAMETER Experiment Name: Zm_Imbibed_Seeds_P Parameter: Organism Value: Zea mays
  misc_feature: MA Experiment 108530 PARAMETER Experiment Name: Zm_Imbibed_Seeds_P Parameter: Plant Line Value: 35A19
  misc_feature: MA Experiment 108530 PARAMETER Experiment Name: Zm_Imbibed_Seeds_P Parameter: Tissue Value: Aerial vs. Embryo
  misc_feature: MA Experiment ID: 108535 Result: Down-regulated in Transcription
  misc_feature: MA Experiment 108535 PARAMETER Experiment Name: Zm_Meristem_P Parameter: Age (day) Value: 8
  misc_feature: MA Experiment 108535 PARAMETER Experiment Name: Zm_Meristem_P Parameter: Organism Value: Zea mays
  misc_feature: MA Experiment 108535 PARAMETER Experiment Name: Zm_Meristem_P Parameter: Plant Line Value: 35A19
  misc_feature: MA Experiment 108535 PARAMETER Experiment Name: Zm_Meristem_P Parameter: Tissue Value: Root Meristem vs. Above Root Meristem
  misc_feature: MA Experiment ID: 108543 Result: Up-regulated in Transcription
  misc_feature: MA Experiment ID: 108545 Result: Up-regulated in Transcription
  misc_feature: MA Experiment 108545 PARAMETER Experiment Name: Zm_Imbibed_Seeds_P Parameter: Age (day) Value: 3 vs. 2
  misc_feature: MA Experiment 108545 PARAMETER Experiment Name: Zm_Imbibed_Seeds_P Parameter: Organism Value: Zea mays
  misc_feature: MA Experiment 108545 PARAMETER Experiment Name: Zm_Imbibed_Seeds_P Parameter: Plant Line Value: 35A19
  misc_feature: MA Experiment 108545 PARAMETER Experiment Name: Zm_Imbibed_Seeds_P Parameter: Tissue Value: Aerial vs. Embryo
  misc_feature: MA Experiment ID: 108547 Result: Up-regulated in Transcription
  misc_feature: MA Experiment 108547 PARAMETER Experiment Name: Zm_Imbibed_Seeds_P Parameter: Age (day) Value: 4 vs. 2
  misc_feature: MA Experiment 108547 PARAMETER Experiment Name: Zm_Imbibed_Seeds_P Parameter: Organism Value: Zea mays
  misc_feature: MA Experiment 108547 PARAMETER Experiment Name: Zm_Imbibed_Seeds_P Parameter: Plant Line Value: 35A19
  misc_feature: MA Experiment 108547 PARAMETER Experiment Name: Zm_Imbibed_Seeds_P Parameter: Tissue Value: Aerial vs. Embryo
  misc_feature: MA Experiment ID: 108687 Result: Down-regulated in Transcription
  misc_feature: MA Experiment 108687 PARAMETER Experiment Name: Zm_Embryos-Flowers__P Parameter: Tissue Value: Embryo vs. Aerial+
  misc_feature: MA Experiment ID: 108689 Result: Down-regulated in Transcription
  misc_feature: MA Experiment 108689 PARAMETER Experiment Name: Zm_Drought_Roots_P Parameter: Age (day) Value: 9
  misc_feature: MA Experiment 108689 PARAMETER Experiment Name: Zm_Drought_Roots_P Parameter: Organism Value: Zea mays
  misc_feature: MA Experiment 108689 PARAMETER Experiment Name: Zm_Drought_Roots_P Parameter: Plant Line Value: 35A19
  misc_feature: MA Experiment 108689 PARAMETER Experiment Name: Zm_Drought_Roots_P Parameter: Timepoint (hr) Value: 24
  misc_feature: MA Experiment 108689 PARAMETER Experiment Name: Zm_Drought_Roots_P Parameter: Tissue Value: Roots
  misc_feature: MA Experiment 108689 PARAMETER Experiment Name: Zm_Drought_Roots_P Parameter: Treatment Value: Drought vs. No Drought
  misc_feature: MA Experiment ID: 20000532 Result: Up-regulated in Transcription
  misc_feature: MA Experiment 20000532 PARAMETER Experiment Name: Zm_0.001percent_MeJA_P Parameter: Age (day) Value: 10
  misc_feature: MA Experiment 20000532 PARAMETER Experiment Name: Zm_0.001percent_MeJA_P Parameter: Organism Value: Zea mays
  misc_feature: MA Experiment 20000532 PARAMETER Experiment Name: Zm_0.001percent_MeJA_P Parameter: Plant Line Value: 35A19
  misc_feature: MA Experiment 20000532 PARAMETER Experiment Name: Zm_0.001percent_MeJA_P Parameter: Timepoint (hr) Value: 48
  misc_feature: MA Experiment 20000532 PARAMETER Experiment Name: Zm_0.001percent_MeJA_P Parameter: Tissue Value: Aerial
  misc_feature: MA Experiment 20000532 PARAMETER Experiment Name: Zm_0.001percent_MeJA_P Parameter: Treatment Value: 0.001percent MeJA vs. No Treatment
  misc_feature: MA Experiment ID: 20000535 Result: Down-regulated in Transcription
  misc_feature: MA Experiment 20000535 PARAMETER Experiment Name: Zm_Hybrid_Seed_Dev_P Parameter: DAP Value: 30 vs. 12
  misc_feature: MA Experiment 20000535 PARAMETER Experiment Name: Zm_Hybrid_Seed_Dev_P Parameter: Organism Value: Zea mays
  misc_feature: MA Experiment 20000535 PARAMETER Experiment Name: Zm_Hybrid_Seed_Dev_P Parameter: Plant Line Value: 35A19
  misc_feature: MA Experiment 20000535 PARAMETER Experiment Name: Zm_Hybrid_Seed_Dev_P Parameter: Tissue Value: Embryo vs. Unfert Floret
  misc_feature: MA Experiment ID: 20001606 Result: Down-regulated in Transcription
  misc_feature: MA Experiment 20001606 PARAMETER Experiment Name: Zm_50ppm_KNO3_L-to-H_P Parameter: Age (day) Value: 19
  misc_feature: MA Experiment 20001606 PARAMETER Experiment Name: Zm_50ppm_KNO3_L-to-H_P Parameter: Organism Value: Zea mays
  misc_feature: MA Experiment 20001606 PARAMETER Experiment Name: Zm_50ppm_KNO3_L-to-H_P Parameter: Plant Line Value: 35A19
  misc_feature: MA Experiment 20001606 PARAMETER Experiment Name: Zm_50ppm_KNO3_L-to-H_P Parameter: Timepoint (hr) Value: 8
  misc_feature: MA Experiment 20001606 PARAMETER Experiment Name: Zm_50ppm_KNO3_L-to-H_P Parameter: Tissue Value: Shoots
  misc_feature: MA Experiment 20001606 PARAMETER Experiment Name: Zm_50ppm_KNO3_L-to-H_P Parameter: Treatment Value: 50ppm KNO3 vs. 50ppm KCl
agtctagctagaatacactcgcgttcaaaacaaacacacagcgtcgtgctgcgtgatctctgaccgcgtcgacaactaccgcagcaccaagcagctgatggcggccaccgtatcttcctgcctgagcctcgtccccaccgtgcaccaccgggccggcgggttccccagcagtgtggcactgacgaacacgcttcagcgccgtcgtcgttctcgccgctatcttgtcgtcgcctcggcgacgagagccgaacaggaggccgcccctgtgacgatcgaggacgtggacctcagctctcatcaggcccgcggccgacgacgggggagctcgccgcgcggtggcgggaggtccacggcagcaacaactgggagggtctgctggaccccatcgacggcgtgctcctccaggagctcatccgctacggcgagttcgcccaggccacctacgacagcttcgactacgaccgcttctccccctactgcggcagctgcaagtacccggcgaagaccttcttccacgacgtcggcctcggcggcatcggctacgaggtcacccgctacctctacgccacctgcaacgacctcaagttccccaacttcggcatcaagacggccgccaacgccaagatgtggagcgagtccggcacgttcatcgggtacgtggccgtgtccaccgacgaggagacggcgcggctcggccgccgggacatcgccgtggcgtggcgcggcaccatcacccgcctcgagtgggtggccgatctgacggccaaccagatccccctgcgcgagacgggcgtcccctgcccggaccccgacgtgaaggtggagcgagggttcgcggcgctgtacacggacaagggcgccggctgccgcttctgccggtactcggcgcgggagcaggtgctggccgaggtgcgcaagctggtggatctgtaccacgggcggggcgagcaggtgagcgtgacggtcacgggccacagcctgggcagcgcgctggcgatgctgtgcgccttcgacatcgcggagacgcgcgcgaacgtgtcgccgggcgacagggtggcgccggtgtgcgtgttctccttcgccggcccgcgcgtcgggaacgtcgccttccggaggcggttcgagcgggagctgggcgtgcgggcgctgcgcgtcgtgaacgtgcacgacagcgtgcccaaggtgcccggcgtgttcttcaacgagtcggcgttcccggagctcgtcctgcgggcggcggacaggctgggcctcggcggcgtgtacacgcacctgggcgtgctgctgcagctggaccacaaggtgtcgccgttcctcaaggagaccctggacctctcgtgctaccacgacctggaggcgcacctgcacctgctggacggcttccgcggctccggcgcggggttcgagccccgcgggagggaccccgcgctggtgaacaagtccaccgacttcctccgggaggaccacatggtgccgcccgtgtggtaccaggcggagaacaagggcatggtgaggacggaggacggccggtgggtgctgccgccgcggcagagggtgctcgacgaccacccggaggacactgaccatcacctccagcggctcggtctcaccgcgtgaagctcagcaatactctgatagtagcgttaattagtgcgtgtggcgttcgcgtacgtgcgcggggcagtcggttactctgttgccgcgcgcggcagctcagtggcgcgttcatggcgtgcatgatgcgggtgacgtgcgggatgggcacgtcgctgcctgagaagctcgcgccgttggcgttcgtgtggctgcagaaaggtcgtcttggattgtaattctctctacttatttttgtaaattgacccagaaaagctgctgcttgcagcgccaaaaaaaaaacgattttc

SEQ ID NO: 6834 - protein, 330 aa, Zea mays subsp. mays
  peptide (1)..(330): Ceres Seq. ID no. 12406865
  misc_feature (1)..(326): Homolog of NCBI NO: 30679836 NR Description: lipase (class 3) family [Arabidopsis thaliana]
  misc_feature (1)..(328): Homolog of NCBI NO: 18402385 NR Description: putative lipase; protein id: At2g30550.1, by cDNA: 207043., supported by cDNA: gi_20268777 [Arabidopsis >gi|20198327|gb|AAB63082.2| putative lipase [Arabidopsis
  misc_feature (1)..(328): Homolog of NCBI NO: 25408087 NR Description: probable lipase [imported] - Arabidopsis thaliana
  misc_feature (1)..(326): Homolog of NCBI NO: 18403524 NR Description: expressed protein; protein id: At1g51440.1, by cDNA: gi_15983395 [Arabidopsis thaliana]
  misc_feature (1)..(252): Homolog of NCBI NO: 18390691 NR Description: lipase, putative; protein id: At1g06800.1, by cDNA: gi_15529150 [Arabidopsis thaliana] At1g06800/F4H5_10 [Arabidopsis thaliana]
  misc_feature (1)..(253): Homolog of NCBI NO: 30684625 NR Description: lipase (class 3) family [Arabidopsis thaliana]
  misc_feature (1)..(308): Homolog of NCBI NO: 15220732 NR Description: lipase, putative; protein id: At1g30370.1
  misc_feature (1)..(190): Homolog of NCBI NO: 34911832 NR Description: lipase-like protein [Oryza sativa (japonica
  misc_feature (214)..(320): Homolog of NCBI NO: 34911832 NR Description: lipase-like protein [Oryza sativa (japonica
  misc_feature (1)..(277): Homolog of NCBI NO: 18390571 NR Description: hypothetical protein; protein id: At1g05800.1
MWSESGTFIGYVAVSTDEETARLGRRDIAVAWRGTITRLEWVADLTANQIPLRETGVPCPDPDVKVERGFAALYTDKGAGCRFCRYSAREQVLAEVRKLVDLYHGRGEQVSVTVTGHSLGSALAMLCAFDIAETRANVSPGDRVAPVCVFSFAGPRVGNVAFRRRFERELGVRALRVVNVHDSVPKVPGVFFNESAFPELVLRAADRLGLGGVYTHLGVLLQLDHKVSPFLKETLDLSCYHDLEAHLHLLDGFRGSGAGFEPRGRDPALVNKSTDFLREDHMVPPVWYQAENKGMVRTEDGRWVLPPRQRVLDDHPEDTDHHLQRLGLTA

SEQ ID NO: 6835 - protein, 220 aa, Zea mays subsp. mays
  peptide (1)..(220): Ceres Seq. ID no. 12406866
  misc_feature (56)..(220): Pfam Name: Equine herpesvirus glycoprotein gp2 Pfam Description: Equine herpesvirus glycoprotein gp2
  misc_feature (47)..(220): Homolog of NCBI NO: 28574039 NR Description: Salivary gland secretion 1 CG3047-PA
  misc_feature (81)..(220): Homolog of NCBI NO: 17221106 NR Description: glycoprotein gp2 [Equine herpesvirus 1]
  misc_feature (15)..(220): Homolog of NCBI NO: 13592175 NR Description: ppg3 [Leishmania major]
  misc_feature (81)..(220): Homolog of NCBI NO: 28574039 NR Description: Salivary gland secretion 1 CG3047-PA
  misc_feature (95)..(220): Homolog of NCBI NO: 28574039 NR Description: Salivary gland secretion 1 CG3047-PA
  misc_feature (1)..(220): Homolog of NCBI NO: 28574039 NR Description: Salivary gland secretion 1 CG3047-PA
  misc_feature (56)..(220): Homolog of NCBI NO: 11278205 NR Description: membrane glycoprotein [imported] - equine
  misc_feature (45)..(220): Homolog of NCBI NO: 13592175 NR Description: ppg3 [Leishmania major]
  misc_feature (45)..(220): Homolog of NCBI NO: 13592175 NR Description: ppg3 [Leishmania major]
  misc_feature (81)..(220): Homolog of NCBI NO: 17221116 NR Description: glycoprotein gp2 [Equine herpesvirus 1]
MAATVSSCLSLVPTVHHRAGGFPSSVALTNTLQRRRRSRRYLVVASATRAEQEAAPVTIEDVDLSSHQARGRRRGSSPRGGGRSTAATTGRVCWTPSTACSSRSSSATASSPRPPTTASTTTASPPTAAAASTRRRPSSTTSASAASATRSPATSTPPATTSSSPTSASRRPPTPRCGASPARSSGTWPCPPTRRRRGSAAGTSPWRGAAPSPASSGWPI

SEQ ID NO: 6836 - protein, 206 aa, Zea mays subsp. mays
  peptide (1)..(206): Ceres Seq. ID no. 12406867
  misc_feature (1)..(202): Homolog of NCBI NO: 30679836 NR Description: lipase (class 3) family [Arabidopsis thaliana]
  misc_feature (1)..(204): Homolog of NCBI NO: 18402385 NR Description: putative lipase; protein id: At2g30550.1, by cDNA: 207043., supported by cDNA: gi_20268777 [Arabidopsis >gi|20198327|gb|AAB63082.2| putative lipase [Arabidopsis
  misc_feature (1)..(204): Homolog of NCBI NO: 25408087 NR Description: probable lipase [imported] - Arabidopsis thaliana
  misc_feature (1)..(202): Homolog of NCBI NO: 18403524 NR Description: expressed protein; protein id: At1g51440.1, by cDNA: gi_15983395 [Arabidopsis thaliana]
  misc_feature (1)..(128): Homolog of NCBI NO: 18390691 NR Description: lipase, putative; protein id: At1g06800.1, by cDNA: gi_15529150 [Arabidopsis thaliana] At1g06800/F4H5_10 [Arabidopsis thaliana]
  misc_feature (1)..(129): Homolog of NCBI NO: 30684625 NR Description: lipase (class 3) family [Arabidopsis thaliana]
  misc_feature (1)..(184): Homolog of NCBI NO: 15220732 NR Description: lipase, putative; protein id: At1g30370.1
  misc_feature (1)..(66): Homolog of NCBI NO: 34911832 NR Description: lipase-like protein [Oryza sativa (japonica
  misc_feature (90)..(196): Homolog of NCBI NO: 34911832 NR Description: lipase-like protein [Oryza sativa (japonica
  misc_feature (1)..(153): Homolog of NCBI NO: 18390571 NR Description: hypothetical protein; protein id: At1g05800.1
MLCAFDIAETRANVSPGDRVAPVCVFSFAGPRVGNVAFRRRFERELGVRALRVVNVHDSVPKVPGVFFNESAFPELVLRAADRLGLGGVYTHLGVLLQLDHKVSPFLKETLDLSCYHDLEAHLHLLDGFRGSGAGFEPRGRDPALVNKSTDFLREDHMVPPVWYQAENKGMVRTEDGRWVLPPRQRVLDDHPEDTDHHLQRLGLTA

SEQ ID NO: 6837 - DNA, 1192 bp, Zea mays subsp. mays
  misc_feature (1)..(1192): Ceres Seq. ID no. 12386906
  misc_feature: MA Experiment ID: 108504 Result: Up-regulated in Transcription
  misc_feature: MA Experiment 108504 PARAMETER Experiment Name: Zm_Drought_P Parameter: Age (day) Value: 8
  misc_feature: MA Experiment 108504 PARAMETER Experiment Name: Zm_Drought_P Parameter: Organism Value: Zea mays
  misc_feature: MA Experiment 108504 PARAMETER Experiment Name: Zm_Drought_P Parameter: Plant Line Value: 35A19
  misc_feature: MA Experiment 108504 PARAMETER Experiment Name: Zm_Drought_P Parameter: Timepoint (hr) Value: 12
  misc_feature: MA Experiment 108504 PARAMETER Experiment Name: Zm_Drought_P Parameter: Tissue Value: Aerial
  misc_feature: MA Experiment 108504 PARAMETER Experiment Name: Zm_Drought_P Parameter: Treatment Value: Drought vs. No Drought
  misc_feature: MA Experiment ID: 108513 Result: Up-regulated in Transcription
  misc_feature: MA Experiment 108513 PARAMETER Experiment Name: Zm_100uM_ABA_P Parameter: Age (day) Value: 8
  misc_feature: MA Experiment 108513 PARAMETER Experiment Name: Zm_100uM_ABA_P Parameter: Organism Value: Zea mays
  misc_feature: MA Experiment 108513 PARAMETER Experiment Name: Zm_100uM_ABA_P Parameter: Plant Line Value: 35A19
  misc_feature: MA Experiment 108513 PARAMETER Experiment Name: Zm_100uM_ABA_P Parameter: Timepoint (hr) Value: 6
  misc_feature: MA Experiment 108513 PARAMETER Experiment Name: Zm_100uM_ABA_P Parameter: Tissue Value: Aerial
  misc_feature: MA Experiment 108513 PARAMETER Experiment Name: Zm_100uM_ABA_P Parameter: Treatment Value: 100uM ABA vs. No Treatment
  misc_feature: MA Experiment ID: 108522 Result: Down-regulated in Transcription
  misc_feature: MA Experiment 108522 PARAMETER Experiment Name: Zm_42deg_Heat_P Parameter: Age (day) Value: 8
  misc_feature: MA Experiment 108522 PARAMETER Experiment Name: Zm_42deg_Heat_P Parameter: Organism Value: Zea mays
  misc_feature: MA Experiment 108522 PARAMETER Experiment Name: Zm_42deg_Heat_P Parameter: Plant Line Value: 35A19
  misc_feature: MA Experiment 108522 PARAMETER Experiment Name: Zm_42deg_Heat_P Parameter: Temperature (deg C) Value: 42 vs. 22
  misc_feature: MA Experiment 108522 PARAMETER Experiment Name: Zm_42deg_Heat_P Parameter: Timepoint (hr) Value: 1
  misc_feature: MA Experiment 108522 PARAMETER Experiment Name: Zm_42deg_Heat_P Parameter: Tissue Value: Aerial
  misc_feature: MA Experiment ID: 108535 Result: Down-regulated in Transcription
  misc_feature: MA Experiment 108535 PARAMETER Experiment Name: Zm_Meristem_P Parameter: Age (day) Value: 8
  misc_feature: MA Experiment 108535 PARAMETER Experiment Name: Zm_Meristem_P Parameter: Organism Value: Zea mays
  misc_feature: MA Experiment 108535 PARAMETER Experiment Name: Zm_Meristem_P Parameter: Plant Line Value: 35A19
  misc_feature: MA Experiment 108535 PARAMETER Experiment Name: Zm_Meristem_P Parameter: Tissue Value: Root Meristem vs. Above Root Meristem
  misc_feature: MA Experiment ID: 108536 Result: Up-regulated in Transcription
  misc_feature: MA Experiment 108536 PARAMETER Experiment Name: Zm_Meristem_P Parameter: Age (day) Value: 8
  misc_feature: MA Experiment 108536 PARAMETER Experiment Name: Zm_Meristem_P Parameter: Organism Value: Zea mays
  misc_feature: MA Experiment 108536 PARAMETER Experiment Name: Zm_Meristem_P Parameter: Plant Line Value: 35A19
  misc_feature: MA Experiment 108536 PARAMETER Experiment Name: Zm_Meristem_P Parameter: Tissue Value: Shoot Meristem vs. Above Shoot Meristem
  misc_feature: MA Experiment ID: 108540 Result: Up-regulated in Transcription
  misc_feature: MA Experiment 108540 PARAMETER Experiment Name: Zm_20percent_PEG_P Parameter: Age (day) Value: 8
  misc_feature: MA Experiment 108540 PARAMETER Experiment Name: Zm_20percent_PEG_P Parameter: Organism Value: Zea mays
  misc_feature: MA Experiment 108540 PARAMETER Experiment Name: Zm_20percent_PEG_P Parameter: Plant Line Value: 35A19
  misc_feature: MA Experiment 108540 PARAMETER Experiment Name: Zm_20percent_PEG_P Parameter: Timepoint (hr) Value: 6
  misc_feature: MA Experiment 108540 PARAMETER Experiment Name: Zm_20percent_PEG_P Parameter: Tissue Value: Aerial
  misc_feature: MA Experiment 108540 PARAMETER Experiment Name: Zm_20percent_PEG_P Parameter: Treatment Value: 20percent PEG vs. No Treatment
  misc_feature: MA Experiment ID: 108543 Result: Up-regulated in Transcription
  misc_feature: MA Experiment ID: 108556 Result: Up-regulated in Transcription
  misc_feature: MA Experiment 108556 PARAMETER Experiment Name: Zm_Drought_P Parameter: Age (day) Value: 9
  misc_feature: MA Experiment 108556 PARAMETER Experiment Name: Zm_Drought_P Parameter: Organism Value: Zea mays
  misc_feature: MA Experiment 108556 PARAMETER Experiment Name: Zm_Drought_P Parameter: Plant Line Value: 35A19
  misc_feature: MA Experiment 108556 PARAMETER Experiment Name: Zm_Drought_P Parameter: Timepoint (hr) Value: 24
  misc_feature: MA Experiment 108556 PARAMETER Experiment Name: Zm_Drought_P Parameter: Tissue Value: Aerial
  misc_feature: MA Experiment 108556 PARAMETER Experiment Name: Zm_Drought_P Parameter: Treatment Value: Drought vs. No Drought
  misc_feature: MA Experiment ID: 108559 Result: Up-regulated in Transcription
  misc_feature: MA Experiment 108559 PARAMETER Experiment Name: Zm_5mM_NO_P Parameter: Age (day) Value: 8
  misc_feature: MA Experiment 108559 PARAMETER Experiment Name: Zm_5mM_NO_P Parameter: Organism Value: Zea mays
  misc_feature: MA Experiment 108559 PARAMETER Experiment Name: Zm_5mM_NO_P Parameter: Plant Line Value: 35A19
  misc_feature: MA Experiment 108559 PARAMETER Experiment Name: Zm_5mM_NO_P Parameter: Timepoint (hr) Value: 12
  misc_feature: MA Experiment 108559 PARAMETER Experiment Name: Zm_5mM_NO_P Parameter: Tissue Value: Aerial
  misc_feature: MA Experiment 108559 PARAMETER Experiment Name: Zm_5mM_NO_P Parameter: Treatment Value: 5mM NO vs. No Treatment
  misc_feature: MA Experiment ID: 108597 Result: Up-regulated in Transcription
  misc_feature: MA Experiment 108597 PARAMETER Experiment Name: Zm_100uM_ABA_P Parameter: Age (day) Value: 9
  misc_feature: MA Experiment 108597 PARAMETER Experiment Name: Zm_100uM_ABA_P Parameter: Organism Value: Zea mays
  misc_feature: MA Experiment 108597 PARAMETER Experiment Name: Zm_100uM_ABA_P Parameter: Plant Line Value: 35A19
  misc_feature: MA Experiment 108597 PARAMETER Experiment Name: Zm_100uM_ABA_P Parameter: Timepoint (hr) Value: 24
  misc_feature: MA Experiment 108597 PARAMETER Experiment Name: Zm_100uM_ABA_P Parameter: Tissue Value: Aerial
  misc_feature: MA Experiment 108597 PARAMETER Experiment Name: Zm_100uM_ABA_P Parameter: Treatment Value: 100uM ABA vs. No Treatment
  misc_feature: MA Experiment ID: 108687 Result: Down-regulated in Transcription
  misc_feature: MA Experiment 108687 PARAMETER Experiment Name: Zm_Embryos-Flowers__P Parameter: Tissue Value: Embryo vs. Aerial+
  misc_feature: MA Experiment ID: 108689 Result: Up-regulated in Transcription
  misc_feature: MA Experiment 108689 PARAMETER Experiment Name: Zm_Drought_Roots_P Parameter: Age (day) Value: 9
  misc_feature: MA Experiment 108689 PARAMETER Experiment Name: Zm_Drought_Roots_P Parameter: Organism Value: Zea mays
  misc_feature: MA Experiment 108689 PARAMETER Experiment Name: Zm_Drought_Roots_P Parameter: Plant Line Value: 35A19
  misc_feature: MA Experiment 108689 PARAMETER Experiment Name: Zm_Drought_Roots_P Parameter: Timepoint (hr) Value: 24
  misc_feature: MA Experiment 108689 PARAMETER Experiment Name: Zm_Drought_Roots_P Parameter: Tissue Value: Roots
  misc_feature: MA Experiment 108689 PARAMETER Experiment Name: Zm_Drought_Roots_P Parameter: Treatment Value: Drought vs. No Drought
  misc_feature: MA Experiment ID: 20000477 Result: Up-regulated in Transcription
  misc_feature: MA Experiment 20000477 PARAMETER Experiment Name: Zm_5mM_SA_P Parameter: Age (day) Value: 10
  misc_feature: MA Experiment 20000477 PARAMETER Experiment Name: Zm_5mM_SA_P Parameter: Organism Value: Zea mays
  misc_feature: MA Experiment 20000477 PARAMETER Experiment Name: Zm_5mM_SA_P Parameter: Plant Line Value: 35A19
  misc_feature: MA Experiment 20000477 PARAMETER Experiment Name: Zm_5mM_SA_P Parameter: Timepoint (hr) Value: 48
  misc_feature: MA Experiment 20000477 PARAMETER Experiment Name: Zm_5mM_SA_P Parameter: Tissue Value: Aerial
  misc_feature: MA Experiment 20000477 PARAMETER Experiment Name: Zm_5mM_SA_P Parameter: Treatment Value: 5mM SA vs. No Treatment
  misc_feature: MA Experiment ID: 20000478 Result: Up-regulated in Transcription
  misc_feature: MA Experiment 20000478 PARAMETER Experiment Name: Zm_5mM_SA_P Parameter: Age (day) Value: 11
  misc_feature: MA Experiment 20000478 PARAMETER Experiment Name: Zm_5mM_SA_P Parameter: Organism Value: Zea mays
  misc_feature: MA Experiment 20000478 PARAMETER Experiment Name: Zm_5mM_SA_P Parameter: Plant Line Value: 35A19
  misc_feature: MA Experiment 20000478 PARAMETER Experiment Name: Zm_5mM_SA_P Parameter: Timepoint (hr) Value: 72
  misc_feature: MA Experiment 20000478 PARAMETER Experiment Name: Zm_5mM_SA_P Parameter: Tissue Value: Aerial
  misc_feature: MA Experiment 20000478 PARAMETER Experiment Name: Zm_5mM_SA_P Parameter: Treatment Value: 5mM SA vs. No Treatment
  misc_feature: MA Experiment ID: 20000479 Result: Up-regulated in Transcription
  misc_feature: MA Experiment 20000479 PARAMETER Experiment Name: Zm_Drought_P Parameter: Age (day) Value: 10
  misc_feature: MA Experiment 20000479 PARAMETER Experiment Name: Zm_Drought_P Parameter: Organism Value: Zea mays
  misc_feature: MA Experiment 20000479 PARAMETER Experiment Name: Zm_Drought_P Parameter: Plant Line Value: 35A19
  misc_feature: MA Experiment 20000479 PARAMETER Experiment Name: Zm_Drought_P Parameter: Timepoint (hr) Value: 48
  misc_feature: MA Experiment 20000479 PARAMETER Experiment Name: Zm_Drought_P Parameter: Tissue Value: Aerial
  misc_feature: MA Experiment 20000479 PARAMETER Experiment Name: Zm_Drought_P Parameter: Treatment Value: Drought vs. No Drought
  misc_feature: MA Experiment ID: 20000480 Result: Up-regulated in Transcription
  misc_feature: MA Experiment 20000480 PARAMETER Experiment Name: Zm_Drought_P Parameter: Age (day) Value: 11
  misc_feature: MA Experiment 20000480 PARAMETER Experiment Name: Zm_Drought_P Parameter: Organism Value: Zea mays
  misc_feature: MA Experiment 20000480 PARAMETER Experiment Name: Zm_Drought_P Parameter: Plant Line Value: 35A19
  misc_feature: MA Experiment 20000480 PARAMETER Experiment Name: Zm_Drought_P Parameter: Timepoint (hr) Value: 72
  misc_feature: MA Experiment 20000480 PARAMETER Experiment Name: Zm_Drought_P Parameter: Tissue Value: Aerial
  misc_feature: MA Experiment 20000480 PARAMETER Experiment Name: Zm_Drought_P Parameter: Treatment Value: Drought vs. No Drought
  misc_feature: MA Experiment ID: 20000492 Result: Down-regulated in Transcription
  misc_feature: MA Experiment 20000492 PARAMETER Experiment Name: Zm_Hybrid_Seed_Dev_P Parameter: DAP Value: 12
  misc_feature: MA Experiment 20000492 PARAMETER Experiment Name: Zm_Hybrid_Seed_Dev_P Parameter: Organism Value: Zea mays
  misc_feature: MA Experiment 20000492 PARAMETER Experiment Name: Zm_Hybrid_Seed_Dev_P Parameter: Plant Line Value: 35A19
  misc_feature: MA Experiment 20000492 PARAMETER Experiment Name: Zm_Hybrid_Seed_Dev_P Parameter: Tissue Value: Fert Kernel vs. Unfert Floret
  misc_feature: MA Experiment ID: 20000532 Result: Up-regulated in Transcription
  misc_feature: MA Experiment 20000532 PARAMETER Experiment Name: Zm_0.001percent_MeJA_P Parameter: Age (day) Value: 10
  misc_feature: MA Experiment 20000532 PARAMETER Experiment Name: Zm_0.001percent_MeJA_P Parameter: Organism Value: Zea mays
  misc_feature: MA Experiment 20000532 PARAMETER Experiment Name: Zm_0.001percent_MeJA_P Parameter: Plant Line Value: 35A19
  misc_feature: MA Experiment 20000532 PARAMETER Experiment Name: Zm_0.001percent_MeJA_P Parameter: Timepoint (hr) Value: 48
  misc_feature: MA Experiment 20000532 PARAMETER Experiment Name: Zm_0.001percent_MeJA_P Parameter: Tissue Value: Aerial
  misc_feature: MA Experiment 20000532 PARAMETER Experiment Name: Zm_0.001percent_MeJA_P Parameter: Treatment Value: 0.001percent MeJA vs. No Treatment
  misc_feature: MA Experiment ID: 20000535 Result: Down-regulated in Transcription
  misc_feature: MA Experiment 20000535 PARAMETER Experiment Name: Zm_Hybrid_Seed_Dev_P Parameter: DAP Value: 30 vs. 12
  misc_feature: MA Experiment 20000535 PARAMETER Experiment Name: Zm_Hybrid_Seed_Dev_P Parameter: Organism Value: Zea mays
  misc_feature: MA Experiment 20000535 PARAMETER Experiment Name: Zm_Hybrid_Seed_Dev_P Parameter: Plant Line Value: 35A19
  misc_feature: MA Experiment 20000535 PARAMETER Experiment Name: Zm_Hybrid_Seed_Dev_P Parameter: Tissue Value: Embryo vs. Unfert Floret
  misc_feature: MA Experiment ID: 20000626 Result: Up-regulated in Transcription
  misc_feature: MA Experiment 20000626 PARAMETER Experiment Name: Zm_Herbicide-Treatments_P Parameter: Timepoint (hr) Value: 12
  misc_feature: MA Experiment 20000626 PARAMETER Experiment Name: Zm_Herbicide-Treatments_P Parameter: Tissue Value: Aerial
  misc_feature: MA Experiment 20000626 PARAMETER Experiment Name: Zm_Herbicide-Treatments_P Parameter: Treatment Value: Roundup vs. No Treatment
gcacgagaccattacctagaacatcctaatcgaaaaacactcgaacacttccaaagttctagcccctctcgtgagtcctgtccaaataatggcccacgcgcagcagtgtcctcctgcttctgacggcgctcgccgcagccacgcctgtgccgtcagcggcgaccaggaagctcatgttcctcgtccagccacagccgaacctcctcacgtaccacaacggcgccgtgctgagcggcgacatccccgtctccatcctctggtatggccgcttcacgccggcgcagaaggctgtggtctccgacttcctcctcgccctctccggcgccgcgccgccgcaggggtcgccgtccgttgcccagtggtggagcagcgtcaaccagctctacctctccaaggcggcggcggcggccgtcagcaagaacggcgcgcacggcggcggcgccaagagcgcgcgggtggtgctgtccgggcacggcctccgacgagggctgctcgctggggaagagcctgaagctgtcgcagcttccggcgctggcggccgcggcacgccccgcgaccgcggccgcgaggggcggcgtcgcgctggtgctcacggcgcgggacgtggccgtggagggcttctgcacgagccggtgcgggcaccacgggtcgtacggcggcggcgggcgcgcggcgtacgcgtgggtgggcgacgccgccgaccagtgcccgggccagtgcgcgtggccgttccaccagccggcgtacggcccgcaggcgccgccgctggtgccgcccagcggggacgcgggcacggacggcgtggtgatcaacgtggccagcatggtcgccggcgcggtcaccaacccgttcggcgacggcttctaccagggcgaccgcggctcgccgctggaggccgccacggcgtgcgcgggcgtgtacggcagcggcgcgtaccccgggtacgccgggcagctgctcgtggaccgggccacgggcgccagctacaacgcgcacggtgcgcgcgggaggaagtacctgctcccggcgctgttcgaccccgacacgtcggcgtgctccacgctggtgtagtgtagccgatctcacaggctaataaatgttggtatatgtaaatactgaacagtacacagtatgtatcatcgttcgtgacgggcagggcagtgctaaataaacgacctgtgcttgaagctgc

SEQ ID NO: 6838 - protein, 300 aa, Zea mays subsp. mays
  peptide (1)..(300): Ceres Seq. ID no. 12386907
  misc_feature (11)..(71): Pfam Name: Phosphate-induced protein 1 conserved region Pfam Description: Phosphate-induced protein 1 conserved region
  misc_feature (1)..(71): Homolog of NCBI NO: 3759184 NR Description: phi-1 [Nicotiana tabacum]
  misc_feature (3)..(82): Homolog of NCBI NO: 15237656 NR Description: phi-1-like protein; protein id: At5g64260.1, by cDNA: 37357., supported by cDNA: gi_11908087, supported by gi_12642895, supported by cDNA: gi_14190476, supported by cDNA:
  misc_feature (19)..(82): Homolog of NCBI NO: 15242420 NR Description: putative protein; protein id: At5g09440.1, by cDNA: 38576., supported by cDNA: gi_17473690, supported by
  misc_feature (11)..(104): Homolog of NCBI NO: 21592873 NR Description: unknown [Arabidopsis thaliana]
  misc_feature (11)..(104): Homolog of NCBI NO: 15242118 NR Description: putative protein; protein id: At5g51550.1, by cDNA: 33455., supported by cDNA: gi_16226761, supported by gi_16604526 [Arabidopsis thaliana] >gi|9758197|dbj|BAB08671.1|
  misc_feature (11)..(71): Homolog of NCBI NO: 25408357 NR Description: hypothetical protein At2g35150 [imported] -
  misc_feature (1)..(151): Homolog of NCBI NO: 37533672 NR Description: putative phosphate-induced protein [Oryza sativa
  misc_feature (1)..(146): Homolog of NCBI NO: 31074969 NR Description: erg-1 [Solanum tuberosum]
  misc_feature (3)..(147): Homolog of NCBI NO: 15236667 NR Description: putative phi-1-like phosphate-induced protein; id: At4g08950.1, supported by cDNA: 3552., supported by cDNA: supported by cDNA: gi_20259893, supported by cDNA: gi_20271141
  misc_feature (3)..(147): Homolog of NCBI NO: 21593043 NR Description: putative phi-1-like phosphate-induced protein
MFLVQPQPNLLTYHNGAVLSGDIPVSILWYGRFTPAQKAVVSDFLLALSGAAPPQGSPSVAQWWSSVNQLYLSKAAAAAVSKNGAHGGGAKSARVVLSGHGLRRGLLAGEEPEAVAASGAGGRGTPRDRGREGRRRAGAHGAGRGRGGLLHEPVRAPRVVRRRRARGVRVGGRRRRPVPGPVRVAVPPAGVRPAGAAAGAAQRGRGHGRRGDQRGQHGRRRGHQPVRRRLLPGRPRLAAGGRHGVRGRVRQRRVPRVRRAAARGPGHGRQLQRARCAREEVPAPGAVRPRHVGVLHAGVV

SEQ ID NO: 6839 - protein, 269 aa, Zea mays subsp. mays
  peptide (1)..(269): Ceres Seq. ID no. 12386908
  misc_feature (75)..(269): Pfam Name: Phosphate-induced protein 1 conserved region Pfam Description: Phosphate-induced protein 1 conserved region
  misc_feature (75)..(269): Homolog of NCBI NO: 3759184 NR Description: phi-1 [Nicotiana tabacum]
  misc_feature (75)..(269): Homolog of NCBI NO: 15237656 NR Description: phi-1-like protein; protein id: At5g64260.1, by cDNA: 37357., supported by cDNA: gi_11908087, supported by gi_12642895, supported by cDNA: gi_14190476, supported by cDNA:
  misc_feature (75)..(269): Homolog of NCBI NO: 15242420 NR Description: putative protein; protein id: At5g09440.1, by cDNA: 38576., supported by cDNA: gi_17473690, supported by
  misc_feature (32)..(268): Homolog of NCBI NO: 13194680 NR Description: phosphate-induced protein 1-like protein
  misc_feature (74)..(269): Homolog of NCBI NO: 31074969 NR Description: erg-1 [Solanum tuberosum]
  misc_feature (74)..(269): Homolog of NCBI NO: 15236667 NR Description: putative phi-1-like phosphate-induced protein; id: At4g08950.1, supported by cDNA: 3552., supported by cDNA: supported by cDNA: gi_20259893, supported by cDNA: gi_20271141
  misc_feature (74)..(269): Homolog of NCBI NO: 21593043 NR Description: putative phi-1-like phosphate-induced protein
  misc_feature (74)..(268): Homolog of NCBI NO: 15219504 NR Description: phosphate-induced (phi-1) protein, putative; id: At1g35140.1, supported by cDNA: 118937., supported by cDNA:
  misc_feature (74)..(265): Homolog of NCBI NO: 37533672 NR Description: putative phosphate-induced protein [Oryza sativa
  misc_feature (73)..(266): Homolog of NCBI NO: 21592873 NR Description: unknown [Arabidopsis thaliana]
MAASRRRRRLWSPTSSSPSPAPRRRRGRRPLPSGGAASTSSTSPRRRRRPSARTARTAAAPRARGWCCPGTASDEGCSLGKSLKLSQLPALAAAARPATAAARGGVALVLTARDVAVEGFCTSRCGHHGSYGGGGRAAYAWVGDAADQCPGQCAWPFHQPAYGPQAPPLVPPSGDAGTDGVVINVASMVAGAVTNPFGDGFYQGDRGSPLEAATACAGVYGSGAYPGYAGQLLVDRATGASYNAHGARGRKYLLPALFDPDTSACSTLV

SEQ ID NO: 6840 - DNA, 1752 bp, Zea mays subsp. mays
  misc_feature (1)..(1752): Ceres Seq. ID no. 12356447
  misc_feature: MA Experiment ID: 108504 Result: Up-regulated in Transcription
  misc_feature: MA Experiment 108504 PARAMETER Experiment Name: Zm_Drought_P Parameter: Age (day) Value: 8
  misc_feature: MA Experiment 108504 PARAMETER Experiment Name: Zm_Drought_P Parameter: Organism Value: Zea mays
  misc_feature: MA Experiment 108504 PARAMETER Experiment Name: Zm_Drought_P Parameter: Plant Line Value: 35A19
  misc_feature: MA Experiment 108504 PARAMETER Experiment Name: Zm_Drought_P Parameter: Timepoint (hr) Value: 12
  misc_feature: MA Experiment 108504 PARAMETER Experiment Name: Zm_Drought_P Parameter: Tissue Value: Aerial
  misc_feature: MA Experiment 108504 PARAMETER Experiment Name: Zm_Drought_P Parameter: Treatment Value: Drought vs. No Drought
  misc_feature: MA Experiment ID: 108534 Result: Up-regulated in Transcription
  misc_feature: MA Experiment 108534 PARAMETER Experiment Name: Zm_4deg_Cold_P Parameter: Age (hr) Value: 8
  misc_feature: MA Experiment 108534 PARAMETER Experiment Name: Zm_4deg_Cold_P Parameter: Organism Value: Zea mays
  misc_feature: MA Experiment 108534 PARAMETER Experiment Name: Zm_4deg_Cold_P Parameter: Plant Line Value: 35A19
  misc_feature: MA Experiment 108534 PARAMETER Experiment Name: Zm_4deg_Cold_P Parameter: Temperature (deg C) Value: 4 vs. 22
  misc_feature: MA Experiment 108534 PARAMETER Experiment Name: Zm_4deg_Cold_P Parameter: Timepoint (hr) Value: 6
  misc_feature: MA Experiment 108534 PARAMETER Experiment Name: Zm_4deg_Cold_P Parameter: Tissue Value: Aerial
  misc_feature: MA Experiment ID: 108689 Result: Down-regulated in Transcription
  misc_feature: MA Experiment 108689 PARAMETER Experiment Name: Zm_Drought_Roots_P Parameter: Age (day) Value: 9
  misc_feature: MA Experiment 108689 PARAMETER Experiment Name: Zm_Drought_Roots_P Parameter: Organism Value: Zea mays
  misc_feature: MA Experiment 108689 PARAMETER Experiment Name: Zm_Drought_Roots_P Parameter: Plant Line Value: 35A19
  misc_feature: MA Experiment 108689 PARAMETER Experiment Name: Zm_Drought_Roots_P Parameter: Timepoint (hr) Value: 24
  misc_feature: MA Experiment 108689 PARAMETER Experiment Name: Zm_Drought_Roots_P Parameter: Tissue Value: Roots
  misc_feature: MA Experiment 108689 PARAMETER Experiment Name: Zm_Drought_Roots_P Parameter: Treatment Value: Drought vs. No Drought
  misc_feature: MA Experiment ID: 20000626 Result: Up-regulated in Transcription
  misc_feature: MA Experiment 20000626 PARAMETER Experiment Name: Zm_Herbicide-Treatments_P Parameter: Timepoint (hr) Value: 12
  misc_feature: MA Experiment 20000626 PARAMETER Experiment Name: Zm_Herbicide-Treatments_P Parameter: Tissue Value: Aerial
  misc_feature: MA Experiment 20000626 PARAMETER Experiment Name: Zm_Herbicide-Treatments_P Parameter: Treatment Value: Roundup vs. No Treatment
  misc_feature: MA Experiment ID: 20000627 Result: Up-regulated in Transcription
  misc_feature: MA Experiment 20000627 PARAMETER Experiment Name: Zm_Herbicide-Treatments_P Parameter: Timepoint (hr) Value: 12
  misc_feature: MA Experiment 20000627 PARAMETER Experiment Name: Zm_Herbicide-Treatments_P Parameter: Tissue Value: Aerial
  misc_feature: MA Experiment 20000627 PARAMETER Experiment Name: Zm_Herbicide-Treatments_P Parameter: Treatment Value: Finale vs. No Treatment
  misc_feature: MA Experiment ID: 20000628 Result: Up-regulated in Transcription
  misc_feature: MA Experiment 20000628 PARAMETER Experiment Name: Zm_Herbicide-Treatments_P Parameter: Timepoint (hr) Value: 12
  misc_feature: MA Experiment 20000628 PARAMETER Experiment Name: Zm_Herbicide-Treatments_P Parameter: Tissue Value: Aerial
  misc_feature: MA Experiment 20000628 PARAMETER Experiment Name: Zm_Herbicide-Treatments_P Parameter: Treatment Value: Glean vs. No Treatment
  misc_feature: MA Experiment ID: 20000629 Result: Up-regulated in Transcription
  misc_feature: MA Experiment 20000629 PARAMETER Experiment Name: Zm_Herbicide-Treatments_P Parameter: Timepoint (hr) Value: 12
  misc_feature: MA Experiment 20000629 PARAMETER Experiment Name: Zm_Herbicide-Treatments_P Parameter: Tissue Value: Aerial
  misc_feature: MA Experiment 20000629 PARAMETER Experiment Name: Zm_Herbicide-Treatments_P Parameter: Treatment Value: Trimec vs. No Treatment
aggatcggagaacatccgccgcgactccatgctccaggagatcaagtctgcctaccagattcttgcccacaagtaccatcctgatatgaataagagtcccgaagcagaagaaaagttcaaggagatcagtgctgcatatgagccaagcttggatctgaccgctgtactttgtgtcgccgcttgaatctacggttctcttcttccttgttcatcccgtggatctgtcccgtggtggtccaagcattcgatttctgctattataacatccaacgttggcggtgaagagcaaggggacagataagcccaaaggcagcaaggggaacgtcgacaaggaccccaacaagcctgactcccaacattttttgtccgccggtgctgtagcggaagcccaaaggcagcaaggggaacgtcgacaaggaccccaacaaggctgactcccaacattttttgtccgccggtgctgtagcggcggcgctgggtgagctcccccatgctgggctctgggatgctcccaggcgccggggttcggcgagacggggactgatctggtgctgggctctgggatgctcccaggcgccgctgccttgcagttcctcggtcgattcaagggaatattatcagtggaagagactggtgaatcaaaggccgtcaacgctagatggaggcaaagtgcctgctgcattgggccaccatgtttttggtgcgggctgttcctcacggaaccaacatatctacatatatttttcatcttctcatcaagggagtatatgggtcgggagcaaggttctacatgacctactagggtatgtaaaaattatggaagtagggccacgagatggtctacagaatgagaaggacatcgtgccaacacctgtaaaggttgagcttatacgaagattggccacatccggattacctgttgtggaggcaacgagttttgtatctccaaaacgggtacctcaggcaggactgaggctgtttcatcctcctctgctgcggggtgggctaggtcgtcaccatggcgtcactcgtggcgtcttgtgcagtagggacgacagcagggagctgtcaagatgggttacctcaagatggacgaggagttcctcaagaggggcgagagcgggggcacgtgctgcgtcatagcccttctccgaaagggtagactagtcgtctccaatattggagactgtcatgtggtgctcagccgagcagggaaggcaaaggtgctcacctctgaccatcgggcctcccaggaggatgagaagcaaagaattgagaatttgggtggatttgtggtgaattaccatgggacatggagagtccagggctccctggcagtgtctaggggcaatggggatggacacctaaagcagtgggttgtggctgaccgagagactagaacgctcctcatcgaccaccagtgcgagttcttgatacttgcttctgatggcctatggggtaagattgataatcaggatgcagttgaccaaaactctaggcattagcactaacagagaccggtggaaggcaggactttgctgcctaaagtttccatgagtcagcgctatttttgggtgtttaacattcattctttgtcatagaaccatttgttatattattagatgtaattagatctatttgattcattcttcggaaatatttattgagataatgcggggtgatctctcgcttcatgatccattgactgtaaaaggcgatttgcctatgttaatacaatgatatattctattc

SEQ ID NO: 6841 - protein, 143 aa, Zea mays subsp. mays
  peptide (1)..(143): Ceres Seq. ID no. 12356448
  misc_feature (1)..(138): Pfam Name: Protein phosphatase 2C Pfam Description: Protein phosphatase 2C
  misc_feature (1)..(138): Homolog of NCBI NO: 6478146 NR Description: putative serine/threonine phosphatase type 2c
  misc_feature (1)..(138): Homolog of NCBI NO: 23506609 NR Description: putative serine/threonine phosphatase [Leymus
  misc_feature (1)..(138): Homolog of NCBI NO: 23506607 NR Description: putative serine/threonine phosphatase [Leymus
  misc_feature (1)..(138): Homolog of NCBI NO: 7488754 NR Description: protein phosphatase 2C - alfalfa
  misc_feature (1)..(138): Homolog of NCBI NO: 15225656 NR Description: protein phosphatase 2C (PP2C); protein id: [Arabidopsis thaliana] >gi|25352216|pir||C84826 protein
  misc_feature (1)..(138): Homolog of NCBI NO: 28393269 NR Description: putative protein phosphatase 2C (PP2C) thaliana] >gi|28827530|gb|AAO50609.1| putative protein
  misc_feature (1)..(138): Homolog of NCBI NO: 15227687 NR Description: protein phosphatase 2C (PP2C); protein id: supported by cDNA: gi_13877670 [Arabidopsis thaliana]
  misc_feature (1)..(138): Homolog of NCBI NO: 15222312 NR Description: protein phosphatase 2C (PP2C); protein id: supported by cDNA: gi_20258779 [Arabidopsis thaliana]
  misc_feature (1)..(138): Homolog of NCBI NO: 30013681 NR Description: Avr9/Cf-9 rapidly elicited protein 284 [Nicotiana
  misc_feature (1)..(69): Homolog of NCBI NO: 25352225 NR Description: hypothetical protein [imported] - Arabidopsis >gi|8954030|gb|AAF82204.1|AC067971_12 Contains similarity to phosphatase 2C from Arabidopsis thaliana gb|AF085279. It contains
MGYLKMDEEFLKRGESGGTCCVIALLRKGRLVVSNIGDCHVVLSRAGKAKVLTSDHRASQEDEKQRIENLGGFVVNYHGTWRVQGSLAVSRGNGDGHLKQWVVADRETRTLLIDHQCEFLILASDGLWGKIDNQDAVDQNSRH

SEQ ID NO: 6842 - protein, 138 aa, Zea mays subsp. mays
  peptide (1)..(138): Ceres Seq. ID no. 12356449
  misc_feature (1)..(133): Pfam Name: Protein phosphatase 2C Pfam Description: Protein phosphatase 2C
  misc_feature (1)..(133): Homolog of NCBI NO: 6478146 NR Description: putative serine/threonine phosphatase type 2c
  misc_feature (1)..(133): Homolog of NCBI NO: 23506609 NR Description: putative serine/threonine phosphatase [Leymus
  misc_feature (1)..(133): Homolog of NCBI NO: 23506607 NR Description: putative serine/threonine phosphatase [Leymus
  misc_feature (1)..(133): Homolog of NCBI NO: 7488754 NR Description: protein phosphatase 2C - alfalfa
  misc_feature (1)..(133): Homolog of NCBI NO: 15225656 NR Description: protein phosphatase 2C (PP2C); protein id: [Arabidopsis thaliana] >gi|25352216|pir||C84826 protein
  misc_feature (1)..(133): Homolog of NCBI NO: 28393269 NR Description: putative protein phosphatase 2C (PP2C) thaliana] >gi|28827530|gb|AAO50609.1| putative protein
  misc_feature (1)..(133): Homolog of NCBI NO: 15227687 NR Description: protein phosphatase 2C (PP2C); protein id: supported by cDNA: gi_13877670 [Arabidopsis thaliana]
  misc_feature (1)..(133): Homolog of NCBI NO: 15222312 NR Description: protein phosphatase 2C (PP2C); protein id: supported by cDNA: gi_20258779 [Arabidopsis thaliana]
  misc_feature (1)..(133): Homolog of NCBI NO: 30013681 NR Description: Avr9/Cf-9 rapidly elicited protein 284 [Nicotiana
  misc_feature (1)..(64): Homolog of NCBI NO: 25352225 NR Description: hypothetical protein [imported] - Arabidopsis >gi|8954030|gb|AAF82204.1|AC067971_12 Contains similarity to phosphatase 2C from Arabidopsis thaliana gb|AF085279. It contains
MDEEFLKRGESGGTCCVIALLRKGRLVVSNIGDCHVVLSRAGKAKVLTSDHRASQEDEKQRIENLGGFVVNYHGTWRVQGSLAVSRGNGDGHLKQWVVADRETRTLLIDHQCEFLILASDGLWGKIDNQDAVDQNSRH

SEQ ID NO: 6843 - protein, 108 aa, Zea mays subsp. mays
  peptide (1)..(108): Ceres Seq. ID no. 12356450
  misc_feature (1)..(49): Homolog of NCBI NO: 34903154 NR Description: unnamed protein product [Oryza sativa (japonica group)] >gi|6721541|dbj|BAA89571.1| unnamed protein product
  misc_feature (1)..(75): Homolog of NCBI NO: 19343556 NR Description: Hmgcl protein [Mus musculus]
  misc_feature (1)..(75): Homolog of NCBI NO: 33239379 NR Description: 3-hydroxymethyl-3-methylglutaryl-Coenzyme A
MEVGPRDGLQNEKDIVPTPVKVELIRRLATSGLPVVEATSFVSPKRVPQAGLRLFHPPLLRGGLGRHHGVTRGVLCSRDDSRELSRWVTSRWTRSSSRGARAGARAAS

SEQ ID NO: 6844 - DNA, 2067 bp, Zea mays subsp. mays
  misc_feature (1)..(2067): Ceres Seq. ID no. 12409009
  misc_feature: MA Experiment ID: 108527 Result: Up-regulated in Transcription
  misc_feature: MA Experiment 108527 PARAMETER Experiment Name: Zm_5mM_NO_P Parameter: Age (day) Value: 8
  misc_feature: MA Experiment 108527 PARAMETER Experiment Name: Zm_5mM_NO_P Parameter: Organism Value: Zea mays
  misc_feature: MA Experiment 108527 PARAMETER Experiment Name: Zm_5mM_NO_P Parameter: Plant Line Value: 35A19
  misc_feature: MA Experiment 108527 PARAMETER Experiment Name: Zm_5mM_NO_P Parameter: Timepoint (hr) Value: 6
  misc_feature: MA Experiment 108527 PARAMETER Experiment Name: Zm_5mM_NO_P Parameter: Tissue Value: Aerial
  misc_feature: MA Experiment 108527 PARAMETER Experiment Name: Zm_5mM_NO_P Parameter: Treatment Value: 5mM NO vs. No Treatment
  misc_feature: MA Experiment ID: 20000108 Result: Up-regulated in Transcription
  misc_feature: MA Experiment 20000108 PARAMETER Experiment Name: Zm_Root-Tips_P Parameter: Age (day) Value: 12
  misc_feature: MA Experiment 20000108 PARAMETER Experiment Name: Zm_Root-Tips_P Parameter: Organism Value: Zea mays
  misc_feature: MA Experiment 20000108 PARAMETER Experiment Name: Zm_Root-Tips_P Parameter: Tissue Value: Root tips vs. Root mid region    35
  misc_feature: MA Experiment 20000108 PARAMETER Experiment Name: Zm_Root-Tips_P Parameter: Tissue Value: Root tips vs. Root mid region   Sequence Listing-Misc Features (4)
ccatccagtcctggagcctgcgcggctgcgccttgcatcgcatctccgtcgtcgtcctcgcccacggaatccgtccaattccccacgccgcccgtcgtccttttctataaaattcactccgccaccaaatctcgaatccccatcgcgctgcttttccaccgaccccgacgccgacgccgacgccaccgccgctccctccccagtccccactccccttcccgggccgcggagcagagatccggggcgccgcgcgatggcgaacatcgacatggcgaagatcctggcggacctggaccgcggcgccagcggcggcgacgcgcgggtgcccaagaccaagctcgtatgcacgctcggcccggcctcccgcaccgtgcccatgctcgagaagctgctccgcgccggcatgaacgtcgcgcgcttcaacttctcccacggcacccacgagtaccaccaggagacgctcgacaacctccgccaggccatgcacaacaccggcatcctctgcgccgtcatgctcgacaccaagggtcctgagatccgtacagggtttttgaaggatggtaaaccgattaagctaaccaagggtcaagaaatcactgtcaccactgattatgatatcaagggtgacgaaaatacgattgctatgagttacaagaaactgcctgttgacgtgaagcctggaaatgtcatactctgcgcagatggtactatctctctggccgttctatcttgtgatcctgatgctggaactgtgaggtgtagatgcgagaacactgcaatgcttggtgagagaaagaactgcaatctgccaggaattgttgtggatcttcctacattgactgagaaagataaagaagacattttgggctggggtgttccaaatgatattgacatgattgctctatcctttgtccgtaaaggatcagatttggtgactgtgagacaggttcttgggcagcatgccaagcgcattaagttgatgtcaaaggttgaaaaccaagagggtgttgtaaactttgatgagatcttgagggagactgatgcttttatggttgctagaggtgatcttggaatggagattcctgttgagaagattttccttgcgcagaagatgatgatctacaagtgcaacattgctggcaaacctgttgttaccgctacccagatgctcgagtcgatgatcaaatcccctaggcccacccgcgcagaggccactgacgttgcaaatgctgttcttgatggaactgactgtgtcatgctcagtggtgagagtgctgctggagcctaccccgaggtggctgtgaagatcatggctcgtatctgcatcgaggcagagtcttccctggaccacgaggcagttttcaaggccatgatcaggtccgcgcctcttccaatgagccctctggagtctcttgcgtcatctgctgtgcgaactgccaacaaggccaaggccgcactgatcgtcgtcttgactcgcggtggcaccacggccaaactggtcgccaagtacccccagggttcccatcctctctgttgtggtacccgtgctaacgacggattctttcgactggaccatcagctccgagggcccagctaggcacagcctgatctatagaggcctcattcccctcctcgctgagggctccgcgaaggctacggattcagagtcaaccgaggtgatcctggaggctgcgctcaagtcggccgtgcagaagcaactttgcaagcctggtgatgccattgtggctctccatcgtatcggcgtcgcctccgtcatcaagatctgcatcgtgaagtgatcaccgtgacttgactcctaagtcccaggggggtggttctcaccgctgggacctatgaaacaacttttctgcctcctttttaactgcatttttcggagacagataattactgtatgttgtaagcccgcttctgttgtttgcagctgcaagatgtctttttttttgtttacatagtttttgagctggtaaatgaggagggagaggactccattgatgttagtggtaataagatttgtatctacggagttcagttaaaaggcttttctac

SEQ ID NO: 6845 - protein, 531 aa, Zea mays subsp. mays
  peptide (1)..(531): Ceres Seq. ID no. 12409010
  misc_feature (85)..(503): Homolog of NCBI NO: 38344200 NR Description: OSJNBa0064G10.16 [Oryza sativa (japonica
HPVLEPARLRLASHLRRRPRPRNPSNSPRRPSSFSIKFTPPPNLESPSRCFSTDPDADADATAAPSPVPTPLPGPRSRDPGRRAMANIDMAKILADLDRGASGGDARVPKTKLVCTLGPASRTVPMLEKLLRAGMNVARFNFSHGTHEYHQETLDNLRQAMHNTGILCAVMLDTKGPEIRTGFLKDGKPIKLTKGQEITVTTDYDIKGDENTIAMSYKKLPVDVKPGNVILCADGTISLAVLSCDPDAGTVRCRCENTAMLGERKNCNLPGIVVDLPTLTEKDKEDILGWGVPNDIDMIALSFVRKGSDLVTVRQVLGQHAKRIKLMSKVENQEGVVNFDEILRETDAFMVARGDLGMEIPVEKIFLAQKMMIYKCNIAGKPVVTATQMLESMIKSPRPTRAEATDVANAVLDGTDCVMLSGESAAGAYPEVAVKIMARICIEAESSLDHEAVFKAMIRSAPLPMSPLESLASSAVRTANKAKAALIVVLTRGGTTAKLVAKYPQGSHPLCCGTRANDGFFRLDHQLRGPS

SEQ ID NO: 6846 - protein, 447 aa, Zea mays subsp. mays
  peptide (1)..(447): Ceres Seq. ID no. 12409011
  misc_feature (1)..(419): Homolog of NCBI NO: 38344200 NR Description: OSJNBa0064G10.16 [Oryza sativa (japonica
MANIDMAKILADLDRGASGGDARVPKTKLVCTLGPASRTVPMLEKLLRAGMNVARFNFSHGTHEYHQETLDNLRQAMHNTGILCAVMLDTKGPEIRTGFLKDGKPIKLTKGQEITVTTDYDIKGDENTIAMSYKKLPVDVKPGNVILCADGTISLAVLSCDPDAGTVRCRCENTAMLGERKNCNLPGIVVDLPTLTEKDKEDILGWGVPNDIDMIALSFVRKGSDLVTVRQVLGQHAKRIKLMSKVENQEGVVNFDEILRETDAFMVARGDLGMEIPVEKIFLAQKMMIYKCNIAGKPVVTATQMLESMIKSPRPTRAEATDVANAVLDGTDCVMLSGESAAGAYPEVAVKIMARICIEAESSLDHEAVFKAMIRSAPLPMSPLESLASSAVRTANKAKAALIVVLTRGGTTAKLVAKYPQGSHPLCCGTRANDGFFRLDHQLRGPS

SEQ ID NO: 6847 - protein, 442 aa, Zea mays subsp. mays
  peptide (1)..(442): Ceres Seq. ID no. 12409012
  misc_feature (1)..(414): Homolog of NCBI NO: 38344200 NR Description: OSJNBa0064G10.16 [Oryza sativa (japonica
MAKILADLDRGASGGDARVPKTKLVCTLGPASRTVPMLEKLLRAGMNVARFNFSHGTHEYHQETLDNLRQAMHNTGILCAVMLDTKGPEIRTGFLKDGKPIKLTKGQEITVTTDYDIKGDENTIAMSYKKLPVDVKPGNVILCADGTISLAVLSCDPDAGTVRCRCENTAMLGERKNCNLPGIVVDLPTLTEKDKEDILGWGVPNDIDMIALSFVRKGSDLVTVRQVLGQHAKRIKLMSKVENQEGVVNFDEILRETDAFMVARGDLGMEIPVEKIFLAQKMMIYKCNIAGKPVVTATQMLESMIKSPRPTRAEATDVANAVLDGTDCVMLSGESAAGAYPEVAVKIMARICIEAESSLDHEAVFKAMIRSAPLPMSPLESLASSAVRTANKAKAALIVVLTRGGTTAKLVAKYPQGSHPLCCGTRANDGFFRLDHQLRGPS

SEQ ID NO: 6848 - DNA, 1386 bp, Zea mays subsp. mays
  misc_feature (1)..(1386): Ceres Seq. ID no. 13492826
  misc_feature: MA Experiment ID: 108515 Result: Up-regulated in Transcription
  misc_feature: MA Experiment 108515 PARAMETER Experiment Name: Zm_2mM_SA_P Parameter: Age (day) Value: 8
  misc_feature: MA Experiment 108515 PARAMETER Experiment Name: Zm_2mM_SA_P Parameter: Organism Value: Zea mays
  misc_feature: MA Experiment 108515 PARAMETER Experiment Name: Zm_2mM_SA_P Parameter: Plant Line Value: 35A19
  misc_feature: MA Experiment 108515 PARAMETER Experiment Name: Zm_2mM_SA_P Parameter: Timepoint (hr) Value: 12
  misc_feature: MA Experiment 108515 PARAMETER Experiment Name: Zm_2mM_SA_P Parameter: Tissue Value: Aerial
  misc_feature: MA Experiment 108515 PARAMETER Experiment Name: Zm_2mM_SA_P Parameter: Treatment Value: 2mM SA vs. No Treatment
  misc_feature: MA Experiment ID: 108522 Result: Down-regulated in Transcription
  misc_feature: MA Experiment 108522 PARAMETER Experiment Name: Zm_42deg_Heat_P Parameter: Age (day) Value: 8
  misc_feature: MA Experiment 108522 PARAMETER Experiment Name: Zm_42deg_Heat_P Parameter: Organism Value: Zea mays
  misc_feature: MA Experiment 108522 PARAMETER Experiment Name: Zm_42deg_Heat_P Parameter: Plant Line Value: 35A19
  misc_feature: MA Experiment 108522 PARAMETER Experiment Name: Zm_42deg_Heat_P Parameter: Temperature (deg C) Value: 42 vs. 22
  misc_feature: MA Experiment 108522 PARAMETER Experiment Name: Zm_42deg_Heat_P Parameter: Timepoint (hr) Value: 1
  misc_feature: MA Experiment 108522 PARAMETER Experiment Name: Zm_42deg_Heat_P Parameter: Tissue Value: Aerial
  misc_feature: MA Experiment ID: 108535 Result: Up-regulated in Transcription
  misc_feature: MA Experiment 108535 PARAMETER Experiment Name: Zm_Meristem_P Parameter: Age (day) Value: 8
  misc_feature: MA Experiment 108535 PARAMETER Experiment Name: Zm_Meristem_P Parameter: Organism Value: Zea mays
  misc_feature: MA Experiment 108535 PARAMETER Experiment Name: Zm_Meristem_P Parameter: Plant Line Value: 35A19
  misc_feature: MA Experiment 108535 PARAMETER Experiment Name: Zm_Meristem_P Parameter: Tissue Value: Root Meristem vs. Above Root Meristem
  misc_feature: MA Experiment ID: 108543 Result: Down-regulated in Transcription
  misc_feature: MA Experiment ID: 20000108 Result: Up-regulated in Transcription
  misc_feature: MA Experiment 20000108 PARAMETER Experiment Name: Zm_Root-Tips_P Parameter: Age (day) Value: 12
  misc_feature: MA Experiment 20000108 PARAMETER Experiment Name: Zm_Root-Tips_P Parameter: Organism Value: Zea mays
  misc_feature: MA Experiment 20000108 PARAMETER Experiment Name: Zm_Root-Tips_P Parameter: Tissue Value: Root tips vs. Root mid region    35
  misc_feature: MA Experiment 20000108 PARAMETER Experiment Name: Zm_Root-Tips_P Parameter: Tissue Value: Root tips vs. Root mid region   Sequence Listing-Misc Features (4)
  misc_feature: MA Experiment ID: 20000492 Result: Up-regulated in Transcription
  misc_feature: MA Experiment 20000492 PARAMETER Experiment Name: Zm_Hybrid_Seed_Dev_P Parameter: DAP Value: 12
  misc_feature: MA Experiment 20000492 PARAMETER Experiment Name: Zm_Hybrid_Seed_Dev_P Parameter: Organism Value: Zea mays
  misc_feature: MA Experiment 20000492 PARAMETER Experiment Name: Zm_Hybrid_Seed_Dev_P Parameter: Plant Line Value: 35A19
  misc_feature: MA Experiment 20000492 PARAMETER Experiment Name: Zm_Hybrid_Seed_Dev_P Parameter: Tissue Value: Fert Kernel vs. Unfert Floret
  misc_feature: MA Experiment ID: 20000535 Result: Up-regulated in Transcription
  misc_feature: MA Experiment 20000535 PARAMETER Experiment Name: Zm_Hybrid_Seed_Dev_P Parameter: DAP Value: 30 vs. 12
  misc_feature: MA Experiment 20000535 PARAMETER Experiment Name: Zm_Hybrid_Seed_Dev_P Parameter: Organism Value: Zea mays
  misc_feature: MA Experiment 20000535 PARAMETER Experiment Name: Zm_Hybrid_Seed_Dev_P Parameter: Plant Line Value: 35A19
  misc_feature: MA Experiment 20000535 PARAMETER Experiment Name: Zm_Hybrid_Seed_Dev_P Parameter: Tissue Value: Embryo vs. Unfert Floret
actgagcaactcaaaaaggccaaaacccttccccaggggccgtctcgctagtcgctactcactgtaccgcaccgccgccgccgtctcgcacacggggcacaggacgcgcgcgatccccttgagtccggattgccatggccaccacggcgttcgccgccgccaggttcttccccgcccacctcgactcctccccacgcatcgcgccccaccgcgtcgggcccaccgcgaatctctccttctcaccgctttccgccaactcctcgtccctgcgccgcctccattccccctgcccatccggccccgggggtaggctgcccccgccgccgcgatcgtacggcggcgccggcggatctggcgacgccgcgaactccggtggcggcgaaggccgccgcggaggcatcctcgggctcctcctcgccgggtgggccgcccgcgtcgctgcggacccgcagttccctttcaaggtgctcatggaggagctcgtcggcgtcaccgcttgcgtgcttggcgacatggcctcccgccctaacttcggcctcaacgagttggacttcgtcttctccacgctcgtcgtcggatccatcctcaacttcgtcctcatgtacctcctcgcccccaccgccggcgtcgccgccgccgcgtcgtccgccgcgtccgcgctccccagccacatgttcgagcccggcgcgtactccctcggctcccgcgtcgccacgatcatgtccaagggcgccaccttcgcggtggtcgggttcgcggccgggctcaccggaaccgcgatctccaacgggctgatcgcgatgcggaagcgcatggacccggcgttcgagacgcccaacaagccgccgcccacgctgctcaacgcggccacctgggcgctccacatgggtgtcagcagcaacctgcggtaccagacgctgaatgggatcgagtacctgctcggcaaggtcgcaccggcgccggtgttcaaggtgtccgttgttgctctccgctgcatgaacaacgtgctgggtgggatgtccttcgtgctgcttgccaggctgaccggggcgcagaaatcagacaagccagcgacggtcgcggaagagaaggagaggttgatagctgtgggcaatgccgcagcagatgccatcaacgaggcgaggcatggagagggtaagtaggtggtagaggagagagacgagtaagttgatggtgcatcatctcagactcgtttgctggttcttggacatagaccaagaaactcacctagtcacctgtagagttggttggaataaggagtggagtgaggttcagaacttcttttttaaaaaactctgtttgtggtttatcggtgttgatgatgacatgcttagtgatggtagaataaagtttttttttcctccc

SEQ ID NO: 6849 - protein, 342 aa, Zea mays subsp. mays
  peptide (1)..(342): Ceres Seq. ID no. 13492827
  misc_feature (1)..(342): Homolog of NCBI NO: 34909204 NR Description: P0425G02.25 [Oryza sativa (japonica
  misc_feature (20)..(320): Homolog of NCBI NO: 15231951 NR Description: glycine-rich protein [Arabidopsis thaliana]
  misc_feature (20)..(321): Homolog of NCBI NO: 15231950 NR Description: expressed protein [Arabidopsis thaliana]
  misc_feature (100)..(307): Homolog of NCBI NO: 6934300 NR Description: unknown [Euphorbia esula]
  misc_feature (88)..(307): Homolog of NCBI NO: 30687286 NR Description: expressed protein [Arabidopsis thaliana]
  misc_feature (90)..(307): Homolog of NCBI NO: 15242979 NR Description: expressed protein [Arabidopsis thaliana] gb|AAF31706.1~gene_id:K8E10.2~similar to unknown protein
  misc_feature (100)..(307): Homolog of NCBI NO: 34395170 NR Description: chloroplast lumen common protein family-like
  misc_feature (100)..(307): Homolog of NCBI NO: 34900644 NR Description: hypothetical protein~similar to Arabidopsis
  misc_feature (96)..(309): Homolog of NCBI NO: 18416870 NR Description: expressed protein [Arabidopsis thaliana] putative protein [Arabidopsis thaliana] unknown protein [Arabidopsis thaliana]
MATTAFAAARFFPAHLDSSPRIAPHRVGPTANLSFSPLSANSSSLRRLHSPCPSGPGGRLPPPPRSYGGAGGSGDAANSGGGEGRRGGILGLLLAGWAARVAADPQFPFKVLMEELVGVTACVLGDMASRPNFGLNELDFVFSTLVVGSILNFVLMYLLAPTAGVAAAASSAASALPSHMFEPGAYSLGSRVATIMSKGATFAVVGFAAGLTGTAISNGLIAMRKRMDPAFETPNKPPPTLLNAATWALHMGVSSNLRYQTLNGIEYLLGKVAPAPVFKVSVVALRCMNNVLGGMSFVLLARLTGAQKSDKPATVAEEKERLIAVGNAAADAINEARHGEGK

SEQ ID NO: 6850 - protein, 230 aa, Zea mays subsp. mays
  peptide (1)..(230): Ceres Seq. ID no. 13492828
  misc_feature (1)..(230): Homolog of NCBI NO: 34909204 NR Description: P0425G02.25 [Oryza sativa (japonica
  misc_feature (1)..(208): Homolog of NCBI NO: 15231951 NR Description: glycine-rich protein [Arabidopsis thaliana]
  misc_feature (1)..(209): Homolog of NCBI NO: 15231950 NR Description: expressed protein [Arabidopsis thaliana]
  misc_feature (1)..(195): Homolog of NCBI NO: 6934300 NR Description: unknown [Euphorbia esula]
  misc_feature (1)..(195): Homolog of NCBI NO: 30687286 NR Description: expressed protein [Arabidopsis thaliana]
  misc_feature (1)..(195): Homolog of NCBI NO: 15242979 NR Description: expressed protein [Arabidopsis thaliana] gb|AAF31706.1~gene_id:K8E10.2~similar to unknown protein
  misc_feature (1)..(195): Homolog of NCBI NO: 34395170 NR Description: chloroplast lumen common protein family-like
  misc_feature (1)..(195): Homolog of NCBI NO: 34900644 NR Description: hypothetical protein~similar to Arabidopsis
  misc_feature (1)..(197): Homolog of NCBI NO: 18416870 NR Description: expressed protein [Arabidopsis thaliana] putative protein [Arabidopsis thaliana] unknown protein [Arabidopsis thaliana]
MEELVGVTACVLGDMASRPNFGLNELDFVFSTLVVGSILNFVLMYLLAPTAGVAAAASSAASALPSHMFEPGAYSLGSRVATIMSKGATFAVVGFAAGLTGTAISNGLIAMRKRMDPAFETPNKPPPTLLNAATWALHMGVSSNLRYQTLNGIEYLLGKVAPAPVFKVSVVALRCMNNVLGGMSFVLLARLTGAQKSDKPATVAEEKERLIAVGNAAADAINEARHGEGK

SEQ ID NO: 6851 - protein, 216 aa, Zea mays subsp. mays
  peptide (1)..(216): Ceres Seq. ID no. 13492829
  misc_feature (1)..(183): Homolog of NCBI NO: 18416870 NR Description: expressed protein [Arabidopsis thaliana] putative protein [Arabidopsis thaliana] unknown protein [Arabidopsis thaliana]
  misc_feature (1)..(216): Homolog of NCBI NO: 34909204 NR Description: P0425G02.25 [Oryza sativa (japonica
  misc_feature (1)..(194): Homolog of NCBI NO: 15231951 NR Description: glycine-rich protein [Arabidopsis thaliana]
  misc_feature (1)..(195): Homolog of NCBI NO: 15231950 NR Description: expressed protein [Arabidopsis thaliana]
  misc_feature (1)..(181): Homolog of NCBI NO: 6934300 NR Description: unknown [Euphorbia esula]
  misc_feature (1)..(181): Homolog of NCBI NO: 30687286 NR Description: expressed protein [Arabidopsis thaliana]
  misc_feature (1)..(181): Homolog of NCBI NO: 15242979 NR Description: expressed protein [Arabidopsis thaliana] gb|AAF31706.1~gene_id:K8E10.2~similar to unknown protein
  misc_feature (1)..(181): Homolog of NCBI NO: 34395170 NR Description: chloroplast lumen common protein family-like
  misc_feature (1)..(181): Homolog of NCBI NO: 34900644 NR Description: hypothetical protein~similar to Arabidopsis
MASRPNFGLNELDFVFSTLVVGSILNFVLMYLLAPTAGVAAAASSAASALPSHMFEPGAYSLGSRVATIMSKGATFAVVGFAAGLTGTAISNGLIAMRKRMDPAFETPNKPPPTLLNAATWALHMGVSSNLRYQTLNGIEYLLGKVAPAPVFKVSVVALRCMNNVLGGMSFVLLARLTGAQKSDKPATVAEEKERLIAVGNAAADAINEARHGEGK

SEQ ID NO: 6852 - DNA, 1216 bp, Zea mays subsp. mays
  misc_feature (1)..(1216): Ceres Seq. ID no. 12350011
  misc_feature: MA Experiment ID: 108523 Result: Down-regulated in Transcription
  misc_feature: MA Experiment 108523 PARAMETER Experiment Name: Zm_42deg_Heat_P Parameter: Age (day) Value: 8
  misc_feature: MA Experiment 108523 PARAMETER Experiment Name: Zm_42deg_Heat_P Parameter: Organism Value: Zea mays
  misc_feature: MA Experiment 108523 PARAMETER Experiment Name: Zm_42deg_Heat_P Parameter: Plant Line Value: 35A19
  misc_feature: MA Experiment 108523 PARAMETER Experiment Name: Zm_42deg_Heat_P Parameter: Temperature (deg C) Value: 42 vs. 22
  misc_feature: MA Experiment 108523 PARAMETER Experiment Name: Zm_42deg_Heat_P Parameter: Timepoint (hr) Value: 6
  misc_feature: MA Experiment 108523 PARAMETER Experiment Name: Zm_42deg_Heat_P Parameter: Tissue Value: Aerial
  misc_feature: MA Experiment ID: 108543 Result: Up-regulated in Transcription
  misc_feature: MA Experiment ID: 108544 Result: Down-regulated in Transcription
  misc_feature: MA Experiment ID: 20000477 Result: Down-regulated in Transcription
  misc_feature: MA Experiment 20000477 PARAMETER Experiment Name: Zm_5mM_SA_P Parameter: Age (day) Value: 10
  misc_feature: MA Experiment 20000477 PARAMETER Experiment Name: Zm_5mM_SA_P Parameter: Organism Value: Zea mays
  misc_feature: MA Experiment 20000477 PARAMETER Experiment Name: Zm_5mM_SA_P Parameter: Plant Line Value: 35A19
  misc_feature: MA Experiment 20000477 PARAMETER Experiment Name: Zm_5mM_SA_P Parameter: Timepoint (hr) Value: 48
  misc_feature: MA Experiment 20000477 PARAMETER Experiment Name: Zm_5mM_SA_P Parameter: Tissue Value: Aerial
  misc_feature: MA Experiment 20000477 PARAMETER Experiment Name: Zm_5mM_SA_P Parameter: Treatment Value: 5mM SA vs. No Treatment
  misc_feature: MA Experiment ID: 20000479 Result: Down-regulated in Transcription
  misc_feature: MA Experiment 20000479 PARAMETER Experiment Name: Zm_Drought_P Parameter: Age (day) Value: 10
  misc_feature: MA Experiment 20000479 PARAMETER Experiment Name: Zm_Drought_P Parameter: Organism Value: Zea mays
  misc_feature: MA Experiment 20000479 PARAMETER Experiment Name: Zm_Drought_P Parameter: Plant Line Value: 35A19
  misc_feature: MA Experiment 20000479 PARAMETER Experiment Name: Zm_Drought_P Parameter: Timepoint (hr) Value: 48
  misc_feature: MA Experiment 20000479 PARAMETER Experiment Name: Zm_Drought_P Parameter: Tissue Value: Aerial
  misc_feature: MA Experiment 20000479 PARAMETER Experiment Name: Zm_Drought_P Parameter: Treatment Value: Drought vs. No Drought
  misc_feature: MA Experiment ID: 20000535 Result: Down-regulated in Transcription
  misc_feature: MA Experiment 20000535 PARAMETER Experiment Name: Zm_Hybrid_Seed_Dev_P Parameter: DAP Value: 30 vs. 12
  misc_feature: MA Experiment 20000535 PARAMETER Experiment Name: Zm_Hybrid_Seed_Dev_P Parameter: Organism Value: Zea mays
  misc_feature: MA Experiment 20000535 PARAMETER Experiment Name: Zm_Hybrid_Seed_Dev_P Parameter: Plant Line Value: 35A19
  misc_feature: MA Experiment 20000535 PARAMETER Experiment Name: Zm_Hybrid_Seed_Dev_P Parameter: Tissue Value: Embryo vs. Unfert Floret
cccctggcattgcttgccacccctgcaactgcaactgcaacacagagaaagatagcgctatccagaggatcagctccggtcatccagtgaagctcaggctactctacctcgctctcggccatggcgtcaggggaagcagcagagccactgcagtacacggtgagcgagagcttcttctgcacgcacgcgctacatttccctgtcatatcgcctggcgtcttactctctgcagaccaccgcgctgcgggtgtccatccactgcgagggctgcaagaagaaggtcaagaaggtgctccacagcatcgaaggcgtgtacaaggtgacggtggacgcggcgcagcacaaggtgacggtcaccggcagcgtggaagccgacgcgctcgtccggcgcctgcacaaggccggcaagcaggcggcgctctggcccagctcgccggcacccgtcgaggccaagatgaagcccgaggaggtcgcgcctgccgcgttgcctgcggcagccgccaacaaggacgctagggcccaggagaagaagccggccaaggacaagaaggccgactacgccgaggccgcggcgaaaccgagcaaggacaagacggtcgacataggcgaggccgcggcgaagcccagcaaggacgagaaggccgacaaaggcgaggccgcggcgaaacccagccaggacgagaaggctggcaaaggcgagccggccccggagacgaagaagggctcccctgcgccggggaagcaggacgccgcggaggaggctggcgcggacaagcccggcggcggcggcggcggcaagaagggcaagaagaacaagaatcccaacaaaccgctggactgcggcggcgaggccccggccgagaagcaggcgtcgccggggcccgagagcccgcacgtgcacggcggcgccttcccgtactacgcggcgcacccggtgctgagctgctacaacgtggcgcacccgagctcgagcgtgtcgtactacgcgcccgccgccgtggtgccgtacggcgggttcccgcccatggtgccggcggagttcatgtacggcccgccgggcatgcaggagtctagcatgctcacgaggacaacgccaactcgtgcagcctcatgtgatgtctgtcacgcacgcgccgccgctatacctacctacattgtcaaattaggcggtcaaagctcttgcttgttgaccagagattagttctttgaattgctc

SEQ ID NO: 6853 - protein, 248 aa, Zea mays subsp. mays
  peptide (1)..(248): Ceres Seq. ID no. 12350012
  misc_feature (1)..(201): Homolog of NCBI NO: 27754505 NR Description: putative copper chaperone (CCH) protein
  misc_feature (1)..(201): Homolog of NCBI NO: 18405728 NR Description: copper chaperone (CCH)-related; protein id: supported by cDNA: 107869. [Arabidopsis thaliana]
  misc_feature (1)..(201): Homolog of NCBI NO: 21536659 NR Description: unknown [Arabidopsis thaliana]
  misc_feature (1)..(202): Homolog of NCBI NO: 12083536 NR Description: hypothetical protein [Oryza sativa]
  misc_feature (1)..(222): Homolog of NCBI NO: 33146848 NR Description: copper chaperone (CCH)-related protein-like
MKPEEVAPAALPAAAANKDARAQEKKPAKDKKADYAEAAAKPSKDKTVDIGEAAAKPSKDEKADKGEAAAKPSQDEKAGKGEPAPETKKGSPAPGKQDAAEEAGADKPGGGGGGKKGKKNKNPNKPLDCGGEAPAEKQASPGPESPHVHGGAFPYYAAHPVLSCYNVAHPSSSVSYYAPAAVVPYGGFPPMVPAEFMYGPPGMQESSMLTRTTPTRAASCDVCHARAAAIPTYIVKLGGQSSCLLTRD

SEQ ID NO: 6854 - protein, 131 aa, Zea mays subsp. mays
  peptide (1)..(131): Ceres Seq. ID no. 12350013
  misc_feature (31)..(131): Pfam Name: High molecular weight glutenin subunit Pfam Description: High molecular weight glutenin subunit
  misc_feature (48)..(131): Homolog of NCBI NO: 23480318 NR Description: Drosophila melanogaster CG8797 gene
  misc_feature (43)..(131): Homolog of NCBI NO: 24664664 NR Description: Argonaute 2 CG7439-PB >gi|23093413|gb|AAF49619.2|
  misc_feature (43)..(131): Homolog of NCBI NO: 28317062 NR Description: RE04347p [Drosophila melanogaster]
  misc_feature (40)..(131): Homolog of NCBI NO: 23480318 NR Description: Drosophila melanogaster CG8797 gene
  misc_feature (53)..(131): Homolog of NCBI NO: 24664664 NR Description: Argonaute 2 CG7439-PB >gi|23093413|gb|AAF49619.2|
  misc_feature (51)..(131): Homolog of NCBI NO: 23480318 NR Description: Drosophila melanogaster CG8797 gene
  misc_feature (53)..(131): Homolog of NCBI NO: 24664664 NR Description: Argonaute 2 CG7439-PB >gi|23093413|gb|AAF49619.2|
  misc_feature (53)..(131): Homolog of NCBI NO: 28317062 NR Description: RE04347p [Drosophila melanogaster]
  misc_feature (53)..(131): Homolog of NCBI NO: 28317062 NR Description: RE04347p [Drosophila melanogaster]
  misc_feature (49)..(131): Homolog of NCBI NO: 28317062 NR Description: RE04347p [Drosophila melanogaster]
MASGEAAEPLQYTVSESFFCTHALHFPVISPGVLLSADHRAAGVHPLRGLQEEGQEGAPQHRRRVQGDGGRGAAQGDGHRQRGSRRARPAPAQGRQAGGALAQLAGTRRGQDEARGGRACRVACGSRQQGR

SEQ ID NO: 6855 - DNA, 1561 bp, Zea mays subsp. mays
  misc_feature (1)..(1561): Ceres Seq. ID no. 12344531
  misc_feature: MA Experiment ID: 108515 Result: Down-regulated in Transcription
  misc_feature: MA Experiment 108515 PARAMETER Experiment Name: Zm_2mM_SA_P Parameter: Age (day) Value: 8
  misc_feature: MA Experiment 108515 PARAMETER Experiment Name: Zm_2mM_SA_P Parameter: Organism Value: Zea mays
  misc_feature: MA Experiment 108515 PARAMETER Experiment Name: Zm_2mM_SA_P Parameter: Plant Line Value: 35A19
  misc_feature: MA Experiment 108515 PARAMETER Experiment Name: Zm_2mM_SA_P Parameter: Timepoint (hr) Value: 12
  misc_feature: MA Experiment 108515 PARAMETER Experiment Name: Zm_2mM_SA_P Parameter: Tissue Value: Aerial
  misc_feature: MA Experiment 108515 PARAMETER Experiment Name: Zm_2mM_SA_P Parameter: Treatment Value: 2mM SA vs. No Treatment
  misc_feature: MA Experiment ID: 108528 Result: Up-regulated in Transcription
  misc_feature: MA Experiment 108528 PARAMETER Experiment Name: Zm_Imbibed_Seeds_P Parameter: Age (day) Value: 5 vs. 2
  misc_feature: MA Experiment 108528 PARAMETER Experiment Name: Zm_Imbibed_Seeds_P Parameter: Organism Value: Zea mays
  misc_feature: MA Experiment 108528 PARAMETER Experiment Name: Zm_Imbibed_Seeds_P Parameter: Plant Line Value: 35A19
  misc_feature: MA Experiment 108528 PARAMETER Experiment Name: Zm_Imbibed_Seeds_P Parameter: Tissue Value: Aerial vs. Embryo
  misc_feature: MA Experiment ID: 108529 Result: Up-regulated in Transcription
  misc_feature: MA Experiment 108529 PARAMETER Experiment Name: Zm_Imbibed_Seeds_P Parameter: Age (day) Value: 5 vs. 2
  misc_feature: MA Experiment 108529 PARAMETER Experiment Name: Zm_Imbibed_Seeds_P Parameter: Organism Value: Zea mays
  misc_feature: MA Experiment 108529 PARAMETER Experiment Name: Zm_Imbibed_Seeds_P Parameter: Plant Line Value: 35A19
  misc_feature: MA Experiment 108529 PARAMETER Experiment Name: Zm_Imbibed_Seeds_P Parameter: Tissue Value: Roots vs. Embryo
  misc_feature: MA Experiment ID: 108530 Result: Up-regulated in Transcription
  misc_feature: MA Experiment 108530 PARAMETER Experiment Name: Zm_Imbibed_Seeds_P Parameter: Age (day) Value: 6 vs. 2
  misc_feature: MA Experiment 108530 PARAMETER Experiment Name: Zm_Imbibed_Seeds_P Parameter: Organism Value: Zea mays
  misc_feature: MA Experiment 108530 PARAMETER Experiment Name: Zm_Imbibed_Seeds_P Parameter: Plant Line Value: 35A19
  misc_feature: MA Experiment 108530 PARAMETER Experiment Name: Zm_Imbibed_Seeds_P Parameter: Tissue Value: Aerial vs. Embryo
  misc_feature: MA Experiment ID: 108543 Result: Up-regulated in Transcription
  misc_feature: MA Experiment ID: 108556 Result: Down-regulated in Transcription
  misc_feature: MA Experiment 108556 PARAMETER Experiment Name: Zm_Drought_P Parameter: Age (day) Value: 9
  misc_feature: MA Experiment 108556 PARAMETER Experiment Name: Zm_Drought_P Parameter: Organism Value: Zea mays
  misc_feature: MA Experiment 108556 PARAMETER Experiment Name: Zm_Drought_P Parameter: Plant Line Value: 35A19
  misc_feature: MA Experiment 108556 PARAMETER Experiment Name: Zm_Drought_P Parameter: Timepoint (hr) Value: 24
  misc_feature: MA Experiment 108556 PARAMETER Experiment Name: Zm_Drought_P Parameter: Tissue Value: Aerial
  misc_feature: MA Experiment 108556 PARAMETER Experiment Name: Zm_Drought_P Parameter: Treatment Value: Drought vs. No Drought
  misc_feature: MA Experiment ID: 108687 Result: Down-regulated in Transcription
  misc_feature: MA Experiment 108687 PARAMETER Experiment Name: Zm_Embryos-Flowers__P Parameter: Tissue Value: Embryo vs. Aerial+
  misc_feature: MA Experiment ID: 20000478 Result: Down-regulated in Transcription
  misc_feature: MA Experiment 20000478 PARAMETER Experiment Name: Zm_5mM_SA_P Parameter: Age (day) Value: 11
  misc_feature: MA Experiment 20000478 PARAMETER Experiment Name: Zm_5mM_SA_P Parameter: Organism Value: Zea mays
  misc_feature: MA Experiment 20000478 PARAMETER Experiment Name: Zm_5mM_SA_P Parameter: Plant Line Value: 35A19
  misc_feature: MA Experiment 20000478 PARAMETER Experiment Name: Zm_5mM_SA_P Parameter: Timepoint (hr) Value: 72
  misc_feature: MA Experiment 20000478 PARAMETER Experiment Name: Zm_5mM_SA_P Parameter: Tissue Value: Aerial
  misc_feature: MA Experiment 20000478 PARAMETER Experiment Name: Zm_5mM_SA_P Parameter: Treatment Value: 5mM SA vs. No Treatment
  misc_feature: MA Experiment ID: 20000479 Result: Down-regulated in Transcription
  misc_feature: MA Experiment 20000479 PARAMETER Experiment Name: Zm_Drought_P Parameter: Age (day) Value: 10
  misc_feature: MA Experiment 20000479 PARAMETER Experiment Name: Zm_Drought_P Parameter: Organism Value: Zea mays
  misc_feature: MA Experiment 20000479 PARAMETER Experiment Name: Zm_Drought_P Parameter: Plant Line Value: 35A19
  misc_feature: MA Experiment 20000479 PARAMETER Experiment Name: Zm_Drought_P Parameter: Timepoint (hr) Value: 48
  misc_feature: MA Experiment 20000479 PARAMETER Experiment Name: Zm_Drought_P Parameter: Tissue Value: Aerial
  misc_feature: MA Experiment 20000479 PARAMETER Experiment Name: Zm_Drought_P Parameter: Treatment Value: Drought vs. No Drought
  misc_feature: MA Experiment ID: 20000480 Result: Down-regulated in Transcription
  misc_feature: MA Experiment 20000480 PARAMETER Experiment Name: Zm_Drought_P Parameter: Age (day) Value: 11
  misc_feature: MA Experiment 20000480 PARAMETER Experiment Name: Zm_Drought_P Parameter: Organism Value: Zea mays
  misc_feature: MA Experiment 20000480 PARAMETER Experiment Name: Zm_Drought_P Parameter: Plant Line Value: 35A19
  misc_feature: MA Experiment 20000480 PARAMETER Experiment Name: Zm_Drought_P Parameter: Timepoint (hr) Value: 72
  misc_feature: MA Experiment 20000480 PARAMETER Experiment Name: Zm_Drought_P Parameter: Tissue Value: Aerial
  misc_feature: MA Experiment 20000480 PARAMETER Experiment Name: Zm_Drought_P Parameter: Treatment Value: Drought vs. No Drought
  misc_feature: MA Experiment ID: 20000492 Result: Down-regulated in Transcription
  misc_feature: MA Experiment 20000492 PARAMETER Experiment Name: Zm_Hybrid_Seed_Dev_P Parameter: DAP Value: 12
  misc_feature: MA Experiment 20000492 PARAMETER Experiment Name: Zm_Hybrid_Seed_Dev_P Parameter: Organism Value: Zea mays
  misc_feature: MA Experiment 20000492 PARAMETER Experiment Name: Zm_Hybrid_Seed_Dev_P Parameter: Plant Line Value: 35A19
  misc_feature: MA Experiment 20000492 PARAMETER Experiment Name: Zm_Hybrid_Seed_Dev_P Parameter: Tissue Value: Fert Kernel vs. Unfert Floret
  misc_feature: MA Experiment ID: 20000534 Result: Down-regulated in Transcription
  misc_feature: MA Experiment 20000534 PARAMETER Experiment Name: Zm_Hybrid_Pollen_P Parameter: Age (day) Value: 8
  misc_feature: MA Experiment 20000534 PARAMETER Experiment Name: Zm_Hybrid_Pollen_P Parameter: Organism Value: Zea mays
  misc_feature: MA Experiment 20000534 PARAMETER Experiment Name: Zm_Hybrid_Pollen_P Parameter: Plant Line Value: 35A19
  misc_feature: MA Experiment 20000534 PARAMETER Experiment Name: Zm_Hybrid_Pollen_P Parameter: Tissue Value: Pollen vs. Aerial
  misc_feature: MA Experiment ID: 20000535 Result: Down-regulated in Transcription
  misc_feature: MA Experiment 20000535 PARAMETER Experiment Name: Zm_Hybrid_Seed_Dev_P Parameter: DAP Value: 30 vs. 12
  misc_feature: MA Experiment 20000535 PARAMETER Experiment Name: Zm_Hybrid_Seed_Dev_P Parameter: Organism Value: Zea mays
  misc_feature: MA Experiment 20000535 PARAMETER Experiment Name: Zm_Hybrid_Seed_Dev_P Parameter: Plant Line Value: 35A19
  misc_feature: MA Experiment 20000535 PARAMETER Experiment Name: Zm_Hybrid_Seed_Dev_P Parameter: Tissue Value: Embryo vs. Unfert Floret
  misc_feature: MA Experiment ID: 20000626 Result: Down-regulated in Transcription
  misc_feature: MA Experiment 20000626 PARAMETER Experiment Name: Zm_Herbicide-Treatments_P Parameter: Timepoint (hr) Value: 12
  misc_feature: MA Experiment 20000626 PARAMETER Experiment Name: Zm_Herbicide-Treatments_P Parameter: Tissue Value: Aerial
  misc_feature: MA Experiment 20000626 PARAMETER Experiment Name: Zm_Herbicide-Treatments_P Parameter: Treatment Value: Roundup vs. No Treatment
acaacaagcagaagcagaagcagaagctagcagctagtagacgagcgacgagtagctagctagctagctatctagagagctcatcatatcgctgctcgctctcatccaccattatagagaagagcagatcgagctgcagctggcagaggccgagttgttgctagctagctcctgcttgctaaatttgcatcgtatccgatccattccatgaagaagtcgtcgatgatggcgcccatgacgatcatggcgagagttgccgctgtgctcgtcctctcgtcggctgccatggcttccgccgcaggagcagctgggctggacatgaatttctacggcagcacgtgcccgcgcgtggaggccatcgtcaaggaggagatggtggcgatcctcaaggcggcgccgacgctggccggcccgctgctccgcctccatttccacgactgcttcgtcaggggctgcgacgcctccgtgctcctggactcgactcccaccagcacggcggagaaggacgccaccccgaacctcaccctccggggcttcggctccgtgcagcgcgtcaaggaccggctggaggaggcgtgcccgggcaccgtctcctgctccgacgtcctggcgctcatggcgcgcgacgccgtcgtgctggccaacggcccctcctggcccgtcgcgctgggccgccgcgacggccgcgtctccctcgccaacgagaccaaccagctgcccccgcccaccgccaacttcacccgcctcgtcagcatgttcgccgccaagggcctctccgtcagggacctcgtcgtgctctccggcggccacaccctcggcaccgcgcactgcaacctcttcagcgaccgcctctacaacttcaccggcgccaacagcctcgccgacgtcgacccggcgctcgacgccgcctacctcgcccgcctcaggtccaggtgccggagcctcgccgacaacaccacgctcaacgagatggaccccggcagcttcctcagcttcgactccagctactacagcctggtggccaggcgccgggggctcttccactccgacgccgcgctgctcaccgacccggccaccagggcgtacgtccagcgccaggccacggggctcttcaccgccgagttcttccgcgacttcgccgactccatggtcaagatgtccaccatcgacgtgctcaccggccagcagcagggcgagatcagaaagaaatgcaacctcgtcaactgacaaataatacgtacattaattgctgctggttttgacgatgcctttcacttacgttcatccacttaattcatgcatccatgttggttgggttcattcaattattatattcgttgcttacctttacttttgcttggttaatcttaattaaatcgtgtgagttttcttttcttttcttgagtatatatatgtatgtacgtagagcgtgatgagtgtcttttcaagtttattgtttttttttactttttcctctcgtgcatatggttcaaatccatgatgatgatgtaatgcatgtaattaataatgacaatcaagtcaataaacacacatgcaattt

SEQ ID NO: 6856 - protein, 339 aa, Zea mays subsp. mays
  peptide (1)..(339): Ceres Seq. ID no. 12344532
  misc_feature (2)..(339): Homolog of NCBI NO: 34915480 NR Description: putative peroxidase [Oryza sativa (japonica
  misc_feature (13)..(339): Homolog of NCBI NO: 585661 NR Description: Peroxidase 1 precursor >gi|7433074|pir||T03928
  misc_feature (9)..(339): Homolog of NCBI NO: 39546236 NR Description: OSJNBa0089N06.6 [Oryza sativa (japonica
  misc_feature (12)..(339): Homolog of NCBI NO: 34915484 NR Description: putative peroxidase [Oryza sativa (japonica >gi|22324451|dbj|BAC10366.1| putative peroxidase 1 precursor
  misc_feature (13)..(339): Homolog of NCBI NO: 27261038 NR Description: putative peroxidase [Oryza sativa (japonica
  misc_feature (31)..(339): Homolog of NCBI NO: 15232058 NR Description: peroxidase, putative; protein id: At3g01190.1, by cDNA: 37597., supported by cDNA: gi_17065467, supported by gi_20148488 [Arabidopsis thaliana]
  misc_feature (7)..(339): Homolog of NCBI NO: 1086111 NR Description: peroxidase (EC 1.11.1.7) precursor - Spirodela
  misc_feature (34)..(339): Homolog of NCBI NO: 15220463 NR Description: peroxidase, putative; protein id: At1g05260.1, by cDNA: 114862., supported by cDNA: gi_2738253 [Arabidopsis >gi|25453190|sp|O23044|PER3_ARATH Peroxidase 3 precursor (Atperox
  misc_feature (34)..(339): Homolog of NCBI NO: 21536908 NR Description: putative peroxidase [Arabidopsis thaliana]
  misc_feature (7)..(337): Homolog of NCBI NO: 1402920 NR Description: peroxidase [Arabidopsis thaliana]
MKKSSMMAPMTIMARVAAVLVLSSAAMASAAGAAGLDMNFYGSTCPRVEAIVKEEMVAILKAAPTLAGPLLRLHFHDCFVRGCDASVLLDSTPTSTAEKDATPNLTLRGFGSVQRVKDRLEEACPGTVSCSDVLALMARDAVVLANGPSWPVALGRRDGRVSLANETNQLPPPTANFTRLVSMFAAKGLSVRDLVVLSGGHTLGTAHCNLFSDRLYNFTGANSLADVDPALDAAYLARLRSRCRSLADNTTLNEMDPGSFLSFDSSYYSLVARRRGLFHSDAALLTDPATRAYVQRQATGLFTAEFFRDFADSMVKMSTIDVLTGQQQGEIRKKCNLVN

SEQ ID NO: 6857 - protein, 334 aa, Zea mays subsp. mays
  peptide (1)..(334): Ceres Seq. ID no. 12344533
  misc_feature (1)..(334): Homolog of NCBI NO: 34915480 NR Description: putative peroxidase [Oryza sativa (japonica
  misc_feature (8)..(334): Homolog of NCBI NO: 585661 NR Description: Peroxidase 1 precursor >gi|7433074|pir||T03928
  misc_feature (4)..(334): Homolog of NCBI NO: 39546236 NR Description: OSJNBa0089N06.6 [Oryza sativa (japonica
  misc_feature (7)..(334): Homolog of NCBI NO: 34915484 NR Description: putative peroxidase [Oryza sativa (japonica >gi|22324451|dbj|BAC10366.1| putative peroxidase 1 precursor
  misc_feature (8)..(334): Homolog of NCBI NO: 27261038 NR Description: putative peroxidase [Oryza sativa (japonica
  misc_feature (26)..(334): Homolog of NCBI NO: 15232058 NR Description: peroxidase, putative; protein id: At3g01190.1, by cDNA: 37597., supported by cDNA: gi_17065467, supported by gi_20148488 [Arabidopsis thaliana]
  misc_feature (2)..(334): Homolog of NCBI NO: 1086111 NR Description: peroxidase (EC 1.11.1.7) precursor - Spirodela
  misc_feature (29)..(334): Homolog of NCBI NO: 15220463 NR Description: peroxidase, putative; protein id: At1g05260.1, by cDNA: 114862., supported by cDNA: gi_2738253 [Arabidopsis >gi|25453190|sp|O23044|PER3_ARATH Peroxidase 3 precursor (Atperox
  misc_feature (29)..(334): Homolog of NCBI NO: 21536908 NR Description: putative peroxidase [Arabidopsis thaliana]
  misc_feature (2)..(332): Homolog of NCBI NO: 1402920 NR Description: peroxidase [Arabidopsis thaliana]
MMAPMTIMARVAAVLVLSSAAMASAAGAAGLDMNFYGSTCPRVEAIVKEEMVAILKAAPTLAGPLLRLHFHDCFVRGCDASVLLDSTPTSTAEKDATPNLTLRGFGSVQRVKDRLEEACPGTVSCSDVLALMARDAVVLANGPSWPVALGRRDGRVSLANETNQLPPPTANFTRLVSMFAAKGLSVRDLVVLSGGHTLGTAHCNLFSDRLYNFTGANSLADVDPALDAAYLARLRSRCRSLADNTTLNEMDPGSFLSFDSSYYSLVARRRGLFHSDAALLTDPATRAYVQRQATGLFTAEFFRDFADSMVKMSTIDVLTGQQQGEIRKKCNLVN

SEQ ID NO: 6858 - protein, 333 aa, Zea mays subsp. mays
  peptide (1)..(333): Ceres Seq. ID no. 12344534
  misc_feature (1)..(333): Homolog of NCBI NO: 34915480 NR Description: putative peroxidase [Oryza sativa (japonica
  misc_feature (7)..(333): Homolog of NCBI NO: 585661 NR Description: Peroxidase 1 precursor >gi|7433074|pir||T03928
  misc_feature (3)..(333): Homolog of NCBI NO: 39546236 NR Description: OSJNBa0089N06.6 [Oryza sativa (japonica
  misc_feature (6)..(333): Homolog of NCBI NO: 34915484 NR Description: putative peroxidase [Oryza sativa (japonica >gi|22324451|dbj|BAC10366.1| putative peroxidase 1 precursor
  misc_feature (7)..(333): Homolog of NCBI NO: 27261038 NR Description: putative peroxidase [Oryza sativa (japonica
  misc_feature (25)..(333): Homolog of NCBI NO: 15232058 NR Description: peroxidase, putative; protein id: At3g01190.1, by cDNA: 37597., supported by cDNA: gi_17065467, supported by gi_20148488 [Arabidopsis thaliana]
  misc_feature (1)..(333): Homolog of NCBI NO: 1086111 NR Description: peroxidase (EC 1.11.1.7) precursor - Spirodela
  misc_feature (28)..(333): Homolog of NCBI NO: 15220463 NR Description: peroxidase, putative; protein id: At1g05260.1, by cDNA: 114862., supported by cDNA: gi_2738253 [Arabidopsis >gi|25453190|sp|O23044|PER3_ARATH Peroxidase 3 precursor (Atperox
  misc_feature (28)..(333): Homolog of NCBI NO: 21536908 NR Description: putative peroxidase [Arabidopsis thaliana]
  misc_feature (1)..(331): Homolog of NCBI NO: 1402920 NR Description: peroxidase [Arabidopsis thaliana]
MAPMTIMARVAAVLVLSSAAMASAAGAAGLDMNFYGSTCPRVEAIVKEEMVAILKAAPTLAGPLLRLHFHDCFVRGCDASVLLDSTPTSTAEKDATPNLTLRGFGSVQRVKDRLEEACPGTVSCSDVLALMARDAVVLANGPSWPVALGRRDGRVSLANETNQLPPPTANFTRLVSMFAAKGLSVRDLVVLSGGHTLGTAHCNLFSDRLYNFTGANSLADVDPALDAAYLARLRSRCRSLADNTTLNEMDPGSFLSFDSSYYSLVARRRGLFHSDAALLTDPATRAYVQRQATGLFTAEFFRDFADSMVKMSTIDVLTGQQQGEIRKKCNLVN

SEQ ID NO: 6859 - DNA, 1220 bp, Zea mays subsp. mays
  misc_feature (1)..(1220): Ceres Seq. ID no. 13492573
  misc_feature: MA Experiment ID: 108543 Result: Up-regulated in Transcription
  misc_feature: MA Experiment ID: 20000477 Result: Up-regulated in Transcription
  misc_feature: MA Experiment 20000477 PARAMETER Experiment Name: Zm_5mM_SA_P Parameter: Age (day) Value: 10
  misc_feature: MA Experiment 20000477 PARAMETER Experiment Name: Zm_5mM_SA_P Parameter: Organism Value: Zea mays
  misc_feature: MA Experiment 20000477 PARAMETER Experiment Name: Zm_5mM_SA_P Parameter: Plant Line Value: 35A19
  misc_feature: MA Experiment 20000477 PARAMETER Experiment Name: Zm_5mM_SA_P Parameter: Timepoint (hr) Value: 48
  misc_feature: MA Experiment 20000477 PARAMETER Experiment Name: Zm_5mM_SA_P Parameter: Tissue Value: Aerial
  misc_feature: MA Experiment 20000477 PARAMETER Experiment Name: Zm_5mM_SA_P Parameter: Treatment Value: 5mM SA vs. No Treatment
  misc_feature: MA Experiment ID: 20000492 Result: Down-regulated in Transcription
  misc_feature: MA Experiment 20000492 PARAMETER Experiment Name: Zm_Hybrid_Seed_Dev_P Parameter: DAP Value: 12
  misc_feature: MA Experiment 20000492 PARAMETER Experiment Name: Zm_Hybrid_Seed_Dev_P Parameter: Organism Value: Zea mays
  misc_feature: MA Experiment 20000492 PARAMETER Experiment Name: Zm_Hybrid_Seed_Dev_P Parameter: Plant Line Value: 35A19
  misc_feature: MA Experiment 20000492 PARAMETER Experiment Name: Zm_Hybrid_Seed_Dev_P Parameter: Tissue Value: Fert Kernel vs. Unfert Floret
agccgctttacaactccccaccccatcccatccacacacacttcacccagcgcggcggccgccggccgccggcaatggaggccgtggcgcacagcggcgactacctttggcggttcgtggcggagacagagtggtacaacgaggttgtcctcagcgccgtggcgccaggcgactggtggcgcggcctgccgcacccggtgcagtcatggatgcgcaactgcgtcggcggttacctcctctatttcatctctggtttcctctggtgcttcgtcatctactactggaagcgccacgcctacatccccaaagatgccatccccacaaatgacgctatgaagaagcaaatagttgtagcatcgaaggctatgcctttttactgcgctcttccaactttatctgaatatatgattgagagcggatggactcagtgctacttcaatatcagcgaaattggtttttctatgtacctctgttatatggctatgtatctcatctttgtggagtttggaatttactggatgcacagggagttgcatgacataaaaccattatacaaatatctgcatgcaacccaccatatttacaacaaggagaataccttgtctccatttgctggacttgcatttcatccactggatggtattctgcaagcaataccacatgtgttcgcgctcttcctctttccaacgcacttcaggacacatattgcactcttgttcctagaggctgtgtggacaacaaacatccacgactgcattcatggcaagatatggccagtcatgggtgctggatatcacaccattcaccatacgacttaccgtcacaactatggccactacaccatctggatggactggatgtttggtacgctcaatgagccagaagatatcctcaagaaggcttgagtttctcggagctgtggtattcctatggtgctgctgctggaactgctcgatctgttcccagtgtttctaatccgttgagcctgttcagcactgtctgtttatgtaggcatcagtgtgttaattactttgctaggttcatatggctttgtgcttattctgtaatttagcgatgtttgtctcatgacgcaacggagttcaggacgaataaaactttgctagacacattctggattccagttgcttgtacaatgttggaactcaactgtcaatataggatgtaaaacggattccttctagtcttgtacctggtgagtt

SEQ ID NO: 6860 - protein, 300 aa, Zea mays subsp. mays
  peptide (1)..(300): Ceres Seq. ID no. 13492574
  misc_feature (32)..(204): Homolog of NCBI NO: 34895618 NR Description: putative sterol-C5(6)-desaturase [Oryza sativa
  misc_feature (239)..(299): Homolog of NCBI NO: 34895618 NR Description: putative sterol-C5(6)-desaturase [Oryza sativa
  misc_feature (33)..(299): Homolog of NCBI NO: 4426627 NR Description: sterol-C5(6)-desaturase homolog [Nicotiana
  misc_feature (33)..(299): Homolog of NCBI NO: 33301670 NR Description: Delta-7-sterol-C5(6)-desaturase (Delta-7-C-5
  misc_feature (28)..(293): Homolog of NCBI NO: 5031219 NR Description: delta7 sterol C-5 desaturase [Arabidopsis
  misc_feature (28)..(293): Homolog of NCBI NO: 15232935 NR Description: delta 7-sterol-C5-desaturase (STE1) [Arabidopsis
  misc_feature (28)..(293): Homolog of NCBI NO: 21594971 NR Description: sterol-C5-desaturase [Arabidopsis thaliana]
  misc_feature (28)..(293): Homolog of NCBI NO: 2129741 NR Description: C-5 sterol desaturase (EC 1.-.-.-) - Arabidopsis
  misc_feature (29)..(293): Homolog of NCBI NO: 15232937 NR Description: delta 7-sterol-C5-desaturase, putative
  misc_feature (74)..(293): Homolog of NCBI NO: 25742651 NR Description: sterol-C5-desaturase (fungal ERG3,
PLYNSPPHPIHTHFTQRGGRRPPAMEAVAHSGDYLWRFVAETEWYNEVVLSAVAPGDWWRGLPHPVQSWMRNCVGGYLLYFISGFLWCFVIYYWKRHAYIPKDAIPTNDAMKKQIVVASKAMPFYCALPTLSEYMIESGWTQCYFNISEIGFSMYLCYMAMYLIFVEFGIYWMHRELHDIKPLYKYLHATHHIYNKENTLSPFAGLAFHPLDGILQAIPHVFALFLFPTHFRTHIALLFLEAVWTTNIHDCIHGKIWPVMGAGYHTIHHTTYRHNYGHYTIWMDWMFGTLNEPEDILKKA

SEQ ID NO: 6861 - protein, 276 aa, Zea mays subsp. mays
  peptide (1)..(276): Ceres Seq. ID no. 13492575
  misc_feature (8)..(180): Homolog of NCBI NO: 34895618 NR Description: putative sterol-C5(6)-desaturase [Oryza sativa
  misc_feature (215)..(275): Homolog of NCBI NO: 34895618 NR Description: putative sterol-C5(6)-desaturase [Oryza sativa
  misc_feature (9)..(275): Homolog of NCBI NO: 4426627 NR Description: sterol-C5(6)-desaturase homolog [Nicotiana
  misc_feature (9)..(275): Homolog of NCBI NO: 33301670 NR Description: Delta-7-sterol-C5(6)-desaturase (Delta-7-C-5
  misc_feature (4)..(269): Homolog of NCBI NO: 5031219 NR Description: delta7 sterol C-5 desaturase [Arabidopsis
  misc_feature (4)..(269): Homolog of NCBI NO: 15232935 NR Description: delta 7-sterol-C5-desaturase (STE1) [Arabidopsis
  misc_feature (4)..(269): Homolog of NCBI NO: 21594971 NR Description: sterol-C5-desaturase [Arabidopsis thaliana]
  misc_feature (4)..(269): Homolog of NCBI NO: 2129741 NR Description: C-5 sterol desaturase (EC 1.-.-.-) - Arabidopsis
  misc_feature (5)..(269): Homolog of NCBI NO: 15232937 NR Description: delta 7-sterol-C5-desaturase, putative
  misc_feature (50)..(269): Homolog of NCBI NO: 25742651 NR Description: sterol-C5-desaturase (fungal ERG3,
MEAVAHSGDYLWRFVAETEWYNEVVLSAVAPGDWWRGLPHPVQSWMRNCVGGYLLYFISGFLWCFVIYYWKRHAYIPKDAIPTNDAMKKQIVVASKAMPFYCALPTLSEYMIESGWTQCYFNISEIGFSMYLCYMAMYLIFVEFGIYWMHRELHDIKPLYKYLHATHHIYNKENTLSPFAGLAFHPLDGILQAIPHVFALFLFPTHFRTHIALLFLEAVWTTNIHDCIHGKIWPVMGAGYHTIHHTTYRHNYGHYTIWMDWMFGTLNEPEDILKKA

SEQ ID NO: 6862 - protein, 231 aa, Zea mays subsp. mays
  peptide (1)..(231): Ceres Seq. ID no. 13492576
  misc_feature (1)..(135): Homolog of NCBI NO: 34895618 NR Description: putative sterol-C5(6)-desaturase [Oryza sativa
  misc_feature (170)..(230): Homolog of NCBI NO: 34895618 NR Description: putative sterol-C5(6)-desaturase [Oryza sativa
  misc_feature (1)..(230): Homolog of NCBI NO: 4426627 NR Description: sterol-C5(6)-desaturase homolog [Nicotiana
  misc_feature (1)..(230): Homolog of NCBI NO: 33301670 NR Description: Delta-7-sterol-C5(6)-desaturase (Delta-7-C-5
  misc_feature (1)..(224): Homolog of NCBI NO: 5031219 NR Description: delta7 sterol C-5 desaturase [Arabidopsis
  misc_feature (1)..(224): Homolog of NCBI NO: 15232935 NR Description: delta 7-sterol-C5-desaturase (STE1) [Arabidopsis
  misc_feature (1)..(224): Homolog of NCBI NO: 21594971 NR Description: sterol-C5-desaturase [Arabidopsis thaliana]
  misc_feature (1)..(224): Homolog of NCBI NO: 2129741 NR Description: C-5 sterol desaturase (EC 1.-.-.-) - Arabidopsis
  misc_feature (1)..(224): Homolog of NCBI NO: 15232937 NR Description: delta 7-sterol-C5-desaturase, putative
  misc_feature (5)..(224): Homolog of NCBI NO: 25742651 NR Description: sterol-C5-desaturase (fungal ERG3,
MRNCVGGYLLYFISGFLWCFVIYYWKRHAYIPKDAIPTNDAMKKQIVVASKAMPFYCALPTLSEYMIESGWTQCYFNISEIGFSMYLCYMAMYLIFVEFGIYWMHRELHDIKPLYKYLHATHHIYNKENTLSPFAGLAFHPLDGILQAIPHVFALFLFPTHFRTHIALLFLEAVWTTNIHDCIHGKIWPVMGAGYHTIHHTTYRHNYGHYTIWMDWMFGTLNEPEDILKKA

SEQ ID NO: 6863 - DNA, 1998 bp, Zea mays subsp. mays
  misc_feature (1)..(1998): Ceres Seq. ID no. 12356403
  misc_feature: MA Experiment ID: 108689 Result: Down-regulated in Transcription
  misc_feature: MA Experiment 108689 PARAMETER Experiment Name: Zm_Drought_Roots_P Parameter: Age (day) Value: 9
  misc_feature: MA Experiment 108689 PARAMETER Experiment Name: Zm_Drought_Roots_P Parameter: Organism Value: Zea mays
  misc_feature: MA Experiment 108689 PARAMETER Experiment Name: Zm_Drought_Roots_P Parameter: Plant Line Value: 35A19
  misc_feature: MA Experiment 108689 PARAMETER Experiment Name: Zm_Drought_Roots_P Parameter: Timepoint (hr) Value: 24
  misc_feature: MA Experiment 108689 PARAMETER Experiment Name: Zm_Drought_Roots_P Parameter: Tissue Value: Roots
  misc_feature: MA Experiment 108689 PARAMETER Experiment Name: Zm_Drought_Roots_P Parameter: Treatment Value: Drought vs. No Drought
  misc_feature: MA Experiment ID: 20000626 Result: Up-regulated in Transcription
  misc_feature: MA Experiment 20000626 PARAMETER Experiment Name: Zm_Herbicide-Treatments_P Parameter: Timepoint (hr) Value: 12
  misc_feature: MA Experiment 20000626 PARAMETER Experiment Name: Zm_Herbicide-Treatments_P Parameter: Tissue Value: Aerial
  misc_feature: MA Experiment 20000626 PARAMETER Experiment Name: Zm_Herbicide-Treatments_P Parameter: Treatment Value: Roundup vs. No Treatment
  misc_feature: MA Experiment ID: 20000627 Result: Up-regulated in Transcription
  misc_feature: MA Experiment 20000627 PARAMETER Experiment Name: Zm_Herbicide-Treatments_P Parameter: Timepoint (hr) Value: 12
  misc_feature: MA Experiment 20000627 PARAMETER Experiment Name: Zm_Herbicide-Treatments_P Parameter: Tissue Value: Aerial
  misc_feature: MA Experiment 20000627 PARAMETER Experiment Name: Zm_Herbicide-Treatments_P Parameter: Treatment Value: Finale vs. No Treatment
actacgcccaggacacgacagggcgctgcttgttgccgattgctagctggtaaagggtaggccggtgcgtctagctaccttggttggttgggtgccggaatttccatggaggtcgcggtcgtggaaagtcctcgtcctcctccgccgccgccgcaggccaaggaggagaagaggtccgacgccaccaagccagagatcgccgcatcgatggtaggaagcgctctcccaatagtcttcgaaagctttccgtcgacgcaaagagaagcggcggcggcgggcgtcaaacaggaggagcgcaggctggaggcggccagggcggagatgggcgaggtgagggaggagaacgagcgcctcaagtcgatgctgtcccgcatcgtcggccagtaccagtccctgcagacgcacttcctcgacgtcgtcaaggtgcgcgagctggcatcatcgtcagccaagcggcggcagagaacaagatccccgcggcgccggctctgctgcccggcaccgacgacggcgacgaaccctacgacgacctcgtctccctgagcctcggcacgagggcgaatagcagcggcggcggccctcgccgcaaggggcacgacgacaggtcggcgtcctcgtctggcaccgctgacgagatgcccaataccgccgacgacgaacgccgccaccagatctccctcggtctcggcttcgcgcgcgggcttccgccatcgggcacggcggcggccgcggacgacgacaaggccagccacgacgcgtccacggcgccggtcctgaacctgagctccgacagcagcggcagcgccggggacaccgacaccacgaagcctgccctggccgccgcgggcgccgcccgtaagagcccgagtgccggtgccggagacgggtcagctgacgacgaggtgcagcagcaggccaagaaggctagggtttccgtcagggtcaagtgtgacactcccacgatgcccgatggctgccaatggcggaagtacgggcagaagatctccaaggggaacccgtccccgcgcgcctactaccgctgcacggtggcgccgcactgcccggtgaggaagcaggtgcagcggtgcgcggaggacacgtcggtcctgatcaccacgtacgattgcgcgcacaaccacccgctcccgccggcggcgacggccatggcgtccacgacctccgcggcggtggccatgctcacctatggatccaccacctccgccgcctcggcctcgctcgtccacggccaccaataccactcgctggcggccgccgccgggcttctcggcccccaccaccatggtctccaccgccgcgtcctgccccaccatcacgctcgacctcacctcccccgccgcgccgcactccctcgtgcactcctccttgccctacgccgccgccgccgccgcagcagcagcggggttcgagtccaaggcggtccccgcggcgtggagcagcgggtacctggcgtacggcggcgcccacccgtcctacgacaccaagatctcgtcggcgttggggcacctgttcggtgggaagcctgggcgtgccatcgagaccggaacagcctgtacgcccagtcgtacctgcagagagctaatagcctgggcgacggccatggtgcggtggcgcccgccgtcacggacacgctcgcgaaggcgatcacgtcggatccgagcttccagtcggtgctggcagcggcgatcacgtccgtcatggggcgcggcggagccgctgctacccagaagtgatcaagatcgatggcgcatgcagcattcgctcatgcataagatcgacttgcaagggcagatcgccgtttttgaccccacacacataggcatgcatggatcggtggttcatgtgtaattaataattccatcacatggttaatttttctttgttcattggagtgttagtaattggccggcttgggaaatgggaatagtgatcataatatgtcaatgtaacagggataatcaatttgatcgatagatgtac

SEQ ID NO: 6864 - protein, 371 aa, Zea mays subsp. mays
  peptide (1)..(371): Ceres Seq. ID no. 12356404
  misc_feature (110)..(170): Pfam Name: WRKY DNA -binding domain Pfam Description: WRKY DNA -binding domain
  misc_feature (24)..(368): Homolog of NCBI NO: 5042446 NR Description: putative WRKY DNA binding protein [Oryza sativa
  misc_feature (24)..(368): Homolog of NCBI NO: 34904618 NR Description: putative WRKY DNA binding protein [Oryza sativa
  misc_feature (82)..(204): Homolog of NCBI NO: 30686070 NR Description: WRKY family transcription factor [Arabidopsis >gi|20978774|sp|Q8VWV6|WR61_ARATH Probable WRKY transcription
  misc_feature (333)..(362): Homolog of NCBI NO: 30686070 NR Description: WRKY family transcription factor [Arabidopsis >gi|20978774|sp|Q8VWV6|WR61_ARATH Probable WRKY transcription
  misc_feature (85)..(198): Homolog of NCBI NO: 30013667 NR Description: Avr9/Cf-9 rapidly elicited protein 126 [Nicotiana
  misc_feature (321)..(362): Homolog of NCBI NO: 30013667 NR Description: Avr9/Cf-9 rapidly elicited protein 126 [Nicotiana
  misc_feature (73)..(195): Homolog of NCBI NO: 15233516 NR Description: WRKY family transcription factor; protein id: supported by cDNA: gi_15990593 [Arabidopsis thaliana]
  misc_feature (82)..(204): Homolog of NCBI NO: 25518561 NR Description: hypothetical protein F6A14.5 - Arabidopsis >gi|6730700|gb|AAF27095.1|AC011809_4 Hypothetical protein
  misc_feature (333)..(362): Homolog of NCBI NO: 25518561 NR Description: hypothetical protein F6A14.5 - Arabidopsis >gi|6730700|gb|AAF27095.1|AC011809_4 Hypothetical protein
  misc_feature (1)..(149): Homolog of NCBI NO: 34906312 NR Description: unnamed protein product [Oryza sativa (japonica group)] >gi|9558430|dbj|BAB03366.1| unnamed protein product
MPNTADDERRHQISLGLGFARGLPPSGTAAAADDDKASHDASTAPVLNLSSDSSGSAGDTDTTKPALAAAGAARKSPSAGAGDGSADDEVQQQAKKARVSVRVKCDTPTMPDGCQWRKYGQKISKGNPSPRAYYRCTVAPHCPVRKQVQRCAEDTSVLITTYDCAHNHPLPPAATAMASTTSAAVAMLTYGSTTSAASASLVHGHQYHSLAAAAGLLGPHHHGLHRRVLPHHHARPHLPRRAALPRALLLALRRRRRRSSSGVRVQGGPRGVEQRVPGVRRRPPVLRHQDLVGVGAPVRWEAWACHRDRNSLYAQSYLQRANSLGDGHGAVAPAVTDTLAKAITSDPSFQSVLAAAITSVMGRGGAAATQK

SEQ ID NO: 6865 - protein, 262 aa, Zea mays subsp. mays
  peptide (1)..(262): Ceres Seq. ID no. 12356405
  misc_feature (1)..(61): Pfam Name: WRKY DNA -binding domain Pfam Description: WRKY DNA -binding domain
  misc_feature (1)..(259): Homolog of NCBI NO: 5042446 NR Description: putative WRKY DNA binding protein [Oryza sativa
  misc_feature (1)..(259): Homolog of NCBI NO: 34904618 NR Description: putative WRKY DNA binding protein [Oryza sativa
  misc_feature (1)..(95): Homolog of NCBI NO: 30686070 NR Description: WRKY family transcription factor [Arabidopsis >gi|20978774|sp|Q8VWV6|WR61_ARATH Probable WRKY transcription
  misc_feature (224)..(253): Homolog of NCBI NO: 30686070 NR Description: WRKY family transcription factor [Arabidopsis >gi|20978774|sp|Q8VWV6|WR61_ARATH Probable WRKY transcription
  misc_feature (1)..(89): Homolog of NCBI NO: 30013667 NR Description: Avr9/Cf-9 rapidly elicited protein 126 [Nicotiana
  misc_feature (212)..(253): Homolog of NCBI NO: 30013667 NR Description: Avr9/Cf-9 rapidly elicited protein 126 [Nicotiana
  misc_feature (1)..(86): Homolog of NCBI NO: 15233516 NR Description: WRKY family transcription factor; protein id: supported by cDNA: gi_15990593 [Arabidopsis thaliana]
  misc_feature (1)..(95): Homolog of NCBI NO: 25518561 NR Description: hypothetical protein F6A14.5 - Arabidopsis >gi|6730700|gb|AAF27095.1|AC011809_4 Hypothetical protein
  misc_feature (224)..(253): Homolog of NCBI NO: 25518561 NR Description: hypothetical protein F6A14.5 - Arabidopsis >gi|6730700|gb|AAF27095.1|AC011809_4 Hypothetical protein
  misc_feature (1)..(40): Homolog of NCBI NO: 34906312 NR Description: unnamed protein product [Oryza sativa (japonica group)] >gi|9558430|dbj|BAB03366.1| unnamed protein product
MPDGCQWRKYGQKISKGNPSPRAYYRCTVAPHCPVRKQVQRCAEDTSVLITTYDCAHNHPLPPAATAMASTTSAAVAMLTYGSTTSAASASLVHGHQYHSLAAAAGLLGPHHHGLHRRVLPHHHARPHLPRRAALPRALLLALRRRRRRSSSGVRVQGGPRGVEQRVPGVRRRPPVLRHQDLVGVGAPVRWEAWACHRDRNSLYAQSYLQRANSLGDGHGAVAPAVTDTLAKAITSDPSFQSVLAAAITSVMGRGGAAATQK

SEQ ID NO: 6866 - protein, 220 aa, Zea mays subsp. mays
  peptide (1)..(220): Ceres Seq. ID no. 12356406
  misc_feature (1)..(31): Homolog of NCBI NO: 34872074 NR Description: similar to Ser/Arg-related nuclear matrix
  misc_feature (1)..(193): Homolog of NCBI NO: 11360318 NR Description: probable mucin DKFZp434C196.1 - human (fragment)
  misc_feature (1)..(39): Homolog of NCBI NO: 34872074 NR Description: similar to Ser/Arg-related nuclear matrix
MDPPPPPPRPRSSTATNTTRWRPPPGFSAPTTMVSTAASCPTITLDLTSPAAPHSLVHSSLPYAAAAAAAAAGFESKAVPAAWSSGYLAYGGAHPSYDTKISSALGHLFGGKPGRAIETGTACTPSRTCRELIAWATAMVRWRPPSRTRSRRRSRRIRASSRCWQRRSRPSWGAAEPLLPRSDQDRWRMQHSLMHKIDLQGQIAVFDPTHIGMHGSVVHV

SEQ ID NO: 6867 - DNA, 1407 bp, Zea mays subsp. mays
  misc_feature (1)..(1407): Ceres Seq. ID no. 12353910
  misc_feature: MA Experiment ID: 108535 Result: Up-regulated in Transcription
  misc_feature: MA Experiment 108535 PARAMETER Experiment Name: Zm_Meristem_P Parameter: Age (day) Value: 8
  misc_feature: MA Experiment 108535 PARAMETER Experiment Name: Zm_Meristem_P Parameter: Organism Value: Zea mays
  misc_feature: MA Experiment 108535 PARAMETER Experiment Name: Zm_Meristem_P Parameter: Plant Line Value: 35A19
  misc_feature: MA Experiment 108535 PARAMETER Experiment Name: Zm_Meristem_P Parameter: Tissue Value: Root Meristem vs. Above Root Meristem
  misc_feature: MA Experiment ID: 108543 Result: Up-regulated in Transcription
  misc_feature: MA Experiment ID: 108556 Result: Down-regulated in Transcription
  misc_feature: MA Experiment 108556 PARAMETER Experiment Name: Zm_Drought_P Parameter: Age (day) Value: 9
  misc_feature: MA Experiment 108556 PARAMETER Experiment Name: Zm_Drought_P Parameter: Organism Value: Zea mays
  misc_feature: MA Experiment 108556 PARAMETER Experiment Name: Zm_Drought_P Parameter: Plant Line Value: 35A19
  misc_feature: MA Experiment 108556 PARAMETER Experiment Name: Zm_Drought_P Parameter: Timepoint (hr) Value: 24
  misc_feature: MA Experiment 108556 PARAMETER Experiment Name: Zm_Drought_P Parameter: Tissue Value: Aerial
  misc_feature: MA Experiment 108556 PARAMETER Experiment Name: Zm_Drought_P Parameter: Treatment Value: Drought vs. No Drought
  misc_feature: MA Experiment ID: 108559 Result: Down-regulated in Transcription
  misc_feature: MA Experiment 108559 PARAMETER Experiment Name: Zm_5mM_NO_P Parameter: Age (day) Value: 8
  misc_feature: MA Experiment 108559 PARAMETER Experiment Name: Zm_5mM_NO_P Parameter: Organism Value: Zea mays
  misc_feature: MA Experiment 108559 PARAMETER Experiment Name: Zm_5mM_NO_P Parameter: Plant Line Value: 35A19
  misc_feature: MA Experiment 108559 PARAMETER Experiment Name: Zm_5mM_NO_P Parameter: Timepoint (hr) Value: 12
  misc_feature: MA Experiment 108559 PARAMETER Experiment Name: Zm_5mM_NO_P Parameter: Tissue Value: Aerial
  misc_feature: MA Experiment 108559 PARAMETER Experiment Name: Zm_5mM_NO_P Parameter: Treatment Value: 5mM NO vs. No Treatment
  misc_feature: MA Experiment ID: 108689 Result: Up-regulated in Transcription
  misc_feature: MA Experiment 108689 PARAMETER Experiment Name: Zm_Drought_Roots_P Parameter: Age (day) Value: 9
  misc_feature: MA Experiment 108689 PARAMETER Experiment Name: Zm_Drought_Roots_P Parameter: Organism Value: Zea mays
  misc_feature: MA Experiment 108689 PARAMETER Experiment Name: Zm_Drought_Roots_P Parameter: Plant Line Value: 35A19
  misc_feature: MA Experiment 108689 PARAMETER Experiment Name: Zm_Drought_Roots_P Parameter: Timepoint (hr) Value: 24
  misc_feature: MA Experiment 108689 PARAMETER Experiment Name: Zm_Drought_Roots_P Parameter: Tissue Value: Roots
  misc_feature: MA Experiment 108689 PARAMETER Experiment Name: Zm_Drought_Roots_P Parameter: Treatment Value: Drought vs. No Drought
  misc_feature: MA Experiment ID: 20000477 Result: Down-regulated in Transcription
  misc_feature: MA Experiment 20000477 PARAMETER Experiment Name: Zm_5mM_SA_P Parameter: Age (day) Value: 10
  misc_feature: MA Experiment 20000477 PARAMETER Experiment Name: Zm_5mM_SA_P Parameter: Organism Value: Zea mays
  misc_feature: MA Experiment 20000477 PARAMETER Experiment Name: Zm_5mM_SA_P Parameter: Plant Line Value: 35A19
  misc_feature: MA Experiment 20000477 PARAMETER Experiment Name: Zm_5mM_SA_P Parameter: Timepoint (hr) Value: 48
  misc_feature: MA Experiment 20000477 PARAMETER Experiment Name: Zm_5mM_SA_P Parameter: Tissue Value: Aerial
  misc_feature: MA Experiment 20000477 PARAMETER Experiment Name: Zm_5mM_SA_P Parameter: Treatment Value: 5mM SA vs. No Treatment
  misc_feature: MA Experiment ID: 20000478 Result: Down-regulated in Transcription
  misc_feature: MA Experiment 20000478 PARAMETER Experiment Name: Zm_5mM_SA_P Parameter: Age (day) Value: 11
  misc_feature: MA Experiment 20000478 PARAMETER Experiment Name: Zm_5mM_SA_P Parameter: Organism Value: Zea mays
  misc_feature: MA Experiment 20000478 PARAMETER Experiment Name: Zm_5mM_SA_P Parameter: Plant Line Value: 35A19
  misc_feature: MA Experiment 20000478 PARAMETER Experiment Name: Zm_5mM_SA_P Parameter: Timepoint (hr) Value: 72
  misc_feature: MA Experiment 20000478 PARAMETER Experiment Name: Zm_5mM_SA_P Parameter: Tissue Value: Aerial
  misc_feature: MA Experiment 20000478 PARAMETER Experiment Name: Zm_5mM_SA_P Parameter: Treatment Value: 5mM SA vs. No Treatment
  misc_feature: MA Experiment ID: 20000479 Result: Down-regulated in Transcription
  misc_feature: MA Experiment 20000479 PARAMETER Experiment Name: Zm_Drought_P Parameter: Age (day) Value: 10
  misc_feature: MA Experiment 20000479 PARAMETER Experiment Name: Zm_Drought_P Parameter: Organism Value: Zea mays
  misc_feature: MA Experiment 20000479 PARAMETER Experiment Name: Zm_Drought_P Parameter: Plant Line Value: 35A19
  misc_feature: MA Experiment 20000479 PARAMETER Experiment Name: Zm_Drought_P Parameter: Timepoint (hr) Value: 48
  misc_feature: MA Experiment 20000479 PARAMETER Experiment Name: Zm_Drought_P Parameter: Tissue Value: Aerial
  misc_feature: MA Experiment 20000479 PARAMETER Experiment Name: Zm_Drought_P Parameter: Treatment Value: Drought vs. No Drought
  misc_feature: MA Experiment ID: 20000480 Result: Down-regulated in Transcription
  misc_feature: MA Experiment 20000480 PARAMETER Experiment Name: Zm_Drought_P Parameter: Age (day) Value: 11
  misc_feature: MA Experiment 20000480 PARAMETER Experiment Name: Zm_Drought_P Parameter: Organism Value: Zea mays
  misc_feature: MA Experiment 20000480 PARAMETER Experiment Name: Zm_Drought_P Parameter: Plant Line Value: 35A19
  misc_feature: MA Experiment 20000480 PARAMETER Experiment Name: Zm_Drought_P Parameter: Timepoint (hr) Value: 72
  misc_feature: MA Experiment 20000480 PARAMETER Experiment Name: Zm_Drought_P Parameter: Tissue Value: Aerial
  misc_feature: MA Experiment 20000480 PARAMETER Experiment Name: Zm_Drought_P Parameter: Treatment Value: Drought vs. No Drought
  misc_feature: MA Experiment ID: 20000492 Result: Up-regulated in Transcription
  misc_feature: MA Experiment 20000492 PARAMETER Experiment Name: Zm_Hybrid_Seed_Dev_P Parameter: DAP Value: 12
  misc_feature: MA Experiment 20000492 PARAMETER Experiment Name: Zm_Hybrid_Seed_Dev_P Parameter: Organism Value: Zea mays
  misc_feature: MA Experiment 20000492 PARAMETER Experiment Name: Zm_Hybrid_Seed_Dev_P Parameter: Plant Line Value: 35A19
  misc_feature: MA Experiment 20000492 PARAMETER Experiment Name: Zm_Hybrid_Seed_Dev_P Parameter: Tissue Value: Fert Kernel vs. Unfert Floret
  misc_feature: MA Experiment ID: 20000535 Result: Up-regulated in Transcription
  misc_feature: MA Experiment 20000535 PARAMETER Experiment Name: Zm_Hybrid_Seed_Dev_P Parameter: DAP Value: 30 vs. 12
  misc_feature: MA Experiment 20000535 PARAMETER Experiment Name: Zm_Hybrid_Seed_Dev_P Parameter: Organism Value: Zea mays
  misc_feature: MA Experiment 20000535 PARAMETER Experiment Name: Zm_Hybrid_Seed_Dev_P Parameter: Plant Line Value: 35A19
  misc_feature: MA Experiment 20000535 PARAMETER Experiment Name: Zm_Hybrid_Seed_Dev_P Parameter: Tissue Value: Embryo vs. Unfert Floret
aaaaaaaactgcgctccgaataccccagacccccgatcctcccaatggccaccgcattttcgctgcgcgctgcggccccggccaccgctccccgcgccgtctcccgatccacctccgcggcgagggtcgtgcccatggcatcggcactggcgggacgcggaaggctggtggcgcgtgcagcagttacagcaaaggcggatgtgccatcgagcacgtccgacggccatgaggtcttgctgtttgaagctcttcgtgaggccttgatggaagagatggaattagatccaacagtgtgtgtgtttggtgaagatgttggccattacggtggttcttacaaggtgacaaaaggtttggctgatacgtttggtgaccttcgagttctggacacccctattgcggagaactcgtttactggcatgggagttggagcgggaatgaaagggctgaggcccgtcgttgaaggcatgaacatgggattcctgctccttgcttacaaccagatctcaaataactgtggcatgcttcattacacttccggcggccagttcaaaatcccacttgtgatccgtggccccggtggtgtgggtcgtcagcttggagcagagcactcgcagcgcctggaatcgtatttccagtccatcccaggcctgcagatggtcgcctgctcgactccttacaacgctaagggcctgatgaaagctgccatcaggagcgagaaccctgtggtgctgtttgagcacgtccttctgtacaacctgaaggagaaaatcccggacgaggagtacgtgctctgcttggaggaggccgagatggtgcggcctggggagcacgtgactatactcacatactcgcgcatgaggtaccacgtgatgcaggcagcgaagacgctggtgaacaaagggtacgatcccgaggtcatcgacatcaggtcgttgaagccgtttgatctgcacactattggcaactccatcaagaagacccaccgcgtgctgatcgtggaggagtgcatgcgcacgggtgggatcggcgccagccttaggtcggccatcgtcgacaatttctgggactaccttgacgcccccatcatgtgcctgtcatctcaggatgtgcctacgccatatgctgcgactctggaggatgcaaccgttgtgcagcctgcccagatcgtggctgcggtggaacaactatgtgcatagattgtggcctgggacgtttgggagactgttgttgccatgaaaaagccttccgtttgttagttttgtgctgtaacaagcattctttggagacttaaggtgtaggcttatagtcgttttgttcttgttttaagaagtataatccagcttcgtagctgcacggactcgatcttcttgttcctaaatctgcgctatgcaatgccgaatttgatgc

SEQ ID NO: 6868 - protein, 397 aa, Zea mays subsp. mays
  peptide (1)..(397): Ceres Seq. ID no. 12353911
  misc_feature (266)..(388): Pfam Name: Transketolase, C-terminal domain Pfam Description: Transketolase, C-terminal domain
  misc_feature (54)..(396): Homolog of NCBI NO: 15220670 NR Description: pyruvate dehydrogenase E1 beta subunit, putative; id: At1g30120.1, supported by cDNA: 38062., supported by cDNA: supported by cDNA: gi_20334775, supported by cDNA: beta subunit,
  misc_feature (54)..(396): Homolog of NCBI NO: 2454184 NR Description: pyruvate dehydrogenase E1 beta subunit thaliana] >gi|21593321|gb|AAM65270.1| pyruvate dehydrogenase E1
  misc_feature (46)..(396): Homolog of NCBI NO: 15226781 NR Description: putative pyruvate dehydrogenase E1 beta subunit; id: At2g34590.1, supported by cDNA: 38439., supported by cDNA: [Arabidopsis thaliana] >gi|25284457|pir||E84758 probable E1 beta
  misc_feature (46)..(396): Homolog of NCBI NO: 21593379 NR Description: putative pyruvate dehydrogenase E1 beta subunit
  misc_feature (111)..(396): Homolog of NCBI NO: 2982328 NR Description: pyruvate dehydrogenase E1 beta subunit [Picea
  misc_feature (76)..(396): Homolog of NCBI NO: 22711921 NR Description: pyruvate dehydrogenase E1 component beta subunit globosum] >gi|22416925|gb|AAM96525.1| beta subunit of pyruvate
  misc_feature (76)..(395): Homolog of NCBI NO: 22297748 NR Description: pyruvate dehydrogenase E1 component beta subunit
  misc_feature (76)..(397): Homolog of NCBI NO: 23041427 NR Description: hypothetical protein [Trichodesmium erythraeum
  misc_feature (76)..(397): Homolog of NCBI NO: 17227618 NR Description: pyruvate dehydrogenase E1 beta subunit [Nostoc
  misc_feature (76)..(397): Homolog of NCBI NO: 23124048 NR Description: hypothetical protein [Nostoc punctiforme]
KKLRSEYPRPPILPMATAFSLRAAAPATAPRAVSRSTSAARVVPMASALAGRGRLVARAAVTAKADVPSSTSDGHEVLLFEALREALMEEMELDPTVCVFGEDVGHYGGSYKVTKGLADTFGDLRVLDTPIAENSFTGMGVGAGMKGLRPVVEGMNMGFLLLAYNQISNNCGMLHYTSGGQFKIPLVIRGPGGVGRQLGAEHSQRLESYFQSIPGLQMVACSTPYNAKGLMKAAIRSENPVVLFEHVLLYNLKEKIPDEEYVLCLEEAEMVRPGEHVTILTYSRMRYHVMQAAKTLVNKGYDPEVIDIRSLKPFDLHTIGNSIKKTHRVLIVEECMRTGGIGASLRSAIVDNFWDYLDAPIMCLSSQDVPTPYAATLEDATVVQPAQIVAAVEQLCA

SEQ ID NO: 6869 - protein, 383 aa, Zea mays subsp. mays
  peptide (1)..(383): Ceres Seq. ID no. 12353912
  misc_feature (252)..(374): Pfam Name: Transketolase, C-terminal domain Pfam Description: Transketolase, C-terminal domain
  misc_feature (32)..(382): Homolog of NCBI NO: 15226781 NR Description: putative pyruvate dehydrogenase E1 beta subunit; id: At2g34590.1, supported by cDNA: 38439., supported by cDNA: [Arabidopsis thaliana] >gi|25284457|pir||E84758 probable E1 beta
  misc_feature (32)..(382): Homolog of NCBI NO: 21593379 NR Description: putative pyruvate dehydrogenase E1 beta subunit
  misc_feature (97)..(382): Homolog of NCBI NO: 2982328 NR Description: pyruvate dehydrogenase E1 beta subunit [Picea
  misc_feature (62)..(382): Homolog of NCBI NO: 22711921 NR Description: pyruvate dehydrogenase E1 component beta subunit globosum] >gi|22416925|gb|AAM96525.1| beta subunit of pyruvate
  misc_feature (40)..(382): Homolog of NCBI NO: 15220670 NR Description: pyruvate dehydrogenase E1 beta subunit, putative; id: At1g30120.1, supported by cDNA: 38062., supported by cDNA: supported by cDNA: gi_20334775, supported by cDNA: beta subunit,
  misc_feature (40)..(382): Homolog of NCBI NO: 2454184 NR Description: pyruvate dehydrogenase E1 beta subunit thaliana] >gi|21593321|gb|AAM65270.1| pyruvate dehydrogenase E1
  misc_feature (62)..(381): Homolog of NCBI NO: 22297748 NR Description: pyruvate dehydrogenase E1 component beta subunit
  misc_feature (62)..(383): Homolog of NCBI NO: 23041427 NR Description: hypothetical protein [Trichodesmium erythraeum
  misc_feature (62)..(383): Homolog of NCBI NO: 17227618 NR Description: pyruvate dehydrogenase E1 beta subunit [Nostoc
  misc_feature (62)..(383): Homolog of NCBI NO: 23124048 NR Description: hypothetical protein [Nostoc punctiforme]
MATAFSLRAAAPATAPRAVSRSTSAARVVPMASALAGRGRLVARAAVTAKADVPSSTSDGHEVLLFEALREALMEEMELDPTVCVFGEDVGHYGGSYKVTKGLADTFGDLRVLDTPIAENSFTGMGVGAGMKGLRPVVEGMNMGFLLLAYNQISNNCGMLHYTSGGQFKIPLVIRGPGGVGRQLGAEHSQRLESYFQSIPGLQMVACSTPYNAKGLMKAAIRSENPVVLFEHVLLYNLKEKIPDEEYVLCLEEAEMVRPGEHVTILTYSRMRYHVMQAAKTLVNKGYDPEVIDIRSLKPFDLHTIGNSIKKTHRVLIVEECMRTGGIGASLRSAIVDNFWDYLDAPIMCLSSQDVPTPYAATLEDATVVQPAQIVAAVEQLCA

SEQ ID NO: 6870 - protein, 353 aa, Zea mays subsp. mays
  peptide (1)..(353): Ceres Seq. ID no. 12353913
  misc_feature (222)..(344): Pfam Name: Transketolase, C-terminal domain Pfam Description: Transketolase, C-terminal domain
  misc_feature (10)..(352): Homolog of NCBI NO: 15220670 NR Description: pyruvate dehydrogenase E1 beta subunit, putative; id: At1g30120.1, supported by cDNA: 38062., supported by cDNA: supported by cDNA: gi_20334775, supported by cDNA: beta subunit,
  misc_feature (10)..(352): Homolog of NCBI NO: 2454184 NR Description: pyruvate dehydrogenase E1 beta subunit thaliana] >gi|21593321|gb|AAM65270.1| pyruvate dehydrogenase E1
  misc_feature (2)..(352): Homolog of NCBI NO: 15226781 NR Description: putative pyruvate dehydrogenase E1 beta subunit; id: At2g34590.1, supported by cDNA: 38439., supported by cDNA: [Arabidopsis thaliana] >gi|25284457|pir||E84758 probable E1 beta
  misc_feature (2)..(352): Homolog of NCBI NO: 21593379 NR Description: putative pyruvate dehydrogenase E1 beta subunit
  misc_feature (67)..(352): Homolog of NCBI NO: 2982328 NR Description: pyruvate dehydrogenase E1 beta subunit [Picea
  misc_feature (32)..(352): Homolog of NCBI NO: 22711921 NR Description: pyruvate dehydrogenase E1 component beta subunit globosum] >gi|22416925|gb|AAM96525.1| beta subunit of pyruvate
  misc_feature (32)..(351): Homolog of NCBI NO: 22297748 NR Description: pyruvate dehydrogenase E1 component beta subunit
  misc_feature (32)..(353): Homolog of NCBI NO: 23041427 NR Description: hypothetical protein [Trichodesmium erythraeum
  misc_feature (32)..(353): Homolog of NCBI NO: 17227618 NR Description: pyruvate dehydrogenase E1 beta subunit [Nostoc
  misc_feature (32)..(353): Homolog of NCBI NO: 23124048 NR Description: hypothetical protein [Nostoc punctiforme]
MASALAGRGRLVARAAVTAKADVPSSTSDGHEVLLFEALREALMEEMELDPTVCVFGEDVGHYGGSYKVTKGLADTFGDLRVLDTPIAENSFTGMGVGAGMKGLRPVVEGMNMGFLLLAYNQISNNCGMLHYTSGGQFKIPLVIRGPGGVGRQLGAEHSQRLESYFQSIPGLQMVACSTPYNAKGLMKAAIRSENPVVLFEHVLLYNLKEKIPDEEYVLCLEEAEMVRPGEHVTILTYSRMRYHVMQAAKTLVNKGYDPEVIDIRSLKPFDLHTIGNSIKKTHRVLIVEECMRTGGIGASLRSAIVDNFWDYLDAPIMCLSSQDVPTPYAATLEDATVVQPAQIVAAVEQLCA

SEQ ID NO: 6871 - DNA, 1521 bp, Zea mays subsp. mays
  misc_feature (1)..(1521): Ceres Seq. ID no. 12409001
  misc_feature: MA Experiment ID: 20000480 Result: Down-regulated in Transcription
  misc_feature: MA Experiment 20000480 PARAMETER Experiment Name: Zm_Drought_P Parameter: Age (day) Value: 11
  misc_feature: MA Experiment 20000480 PARAMETER Experiment Name: Zm_Drought_P Parameter: Organism Value: Zea mays
  misc_feature: MA Experiment 20000480 PARAMETER Experiment Name: Zm_Drought_P Parameter: Plant Line Value: 35A19
  misc_feature: MA Experiment 20000480 PARAMETER Experiment Name: Zm_Drought_P Parameter: Timepoint (hr) Value: 72
  misc_feature: MA Experiment 20000480 PARAMETER Experiment Name: Zm_Drought_P Parameter: Tissue Value: Aerial
  misc_feature: MA Experiment 20000480 PARAMETER Experiment Name: Zm_Drought_P Parameter: Treatment Value: Drought vs. No Drought
agaaatctccgtgcgtgtttggccgaaatccacgggagggtgctcgtctttgctgagctgctccggcctccggagcggagctctgcctacttaagttcaggcttgttccgccatccgaggacaagattcggagcgtcgccgaagggaggcgatgaaggggaaaggcggggcgatggaccgcaggtcctccgccaggtggagggtgttgctgctctgcgcattcagcttcggcctcggcatgctcttcaccgaccggttctggacagcaccggatagcagtaaccatatcatgtctcaaagccggaggcaagagcaagagctccaacttgtatcagaggattgcagcacaaagaggaagcatggggaagacaaggatataatgggagaggtaaccaagacccatgaagctatacaatcattggataagtccatctcaacgctgcagatggagcttgcagcaaagcggagcacacttgagctgctccgatctagtggttcaccagtaacctttgaaactagccaaccaaggaaaaaggcatttgttgtcattggagtcaatactgcattcagcagccgcaagcgccgtgattctgtccgggagacatggatgcctcaaggagaaaaactgcaacaattagaagaacaaaagggaatagtaatccgcttcactatcgggcacagtgctacatctgacagtatactggacaaagctatagattcagaggacgctcagcatcatgactttcttaggctggaccatgttgagggataccatgaactctcagctaagacaaaaatattcttctctactgctcttggcatctgggatgctgacttctacgtcaaggttgatgatgatgtgcatgtaaacttaggaatgcttgccactacccttgctcggcataaattgaaaccaagaacttatattggctgcatgaagtcaggcccagttctcgctgacaagaatgttaagtaccatgaacctgagtactggaaatttggggaggaaggaaataaatacttccgtcatgccacggggcagatatatgccatttcgaaagatctcgctacttatatttcaatcaaccagcctatcttgcacaaatatgcaaatgaagacgtgtcgcttggatcatggttcattggtttggaagttaatcacattgatgaaaggaacatgtgctgtggaactccaccagattgtgagtggaaagggcaagctggtaatgtctgtgtagcgtccttcgattggagctgcagtggcatatgcaagtctgttgagaggatcaaagatgtacatgctcgctgtggtgagggggattcagcagtttggagtgctcttttctagcgcataccttctttgcccgtaaatatgtagcatacttgctaagctctcgcggcggacaccataggcaactcaagtaaacttgacaaaaaccaaagatcgtggagtatgatctgaaactgcagaaacagtatgttgcttggaaatattctgcaacaacataattttgctccggc

SEQ ID NO: 6872 - protein, 398 aa, Zea mays subsp. mays
  peptide (1)..(398): Ceres Seq. ID no. 12409002
  misc_feature (143)..(341): Pfam Name: Galactosyltransferase Pfam Description: Galactosyltransferase
  misc_feature (13)..(398): Homolog of NCBI NO: 4138265 NR Description: Avr9 elicitor response protein [Nicotiana tabacum]
  misc_feature (13)..(397): Homolog of NCBI NO: 30699558 NR Description: Avr9 elicitor response protein -related
  misc_feature (13)..(397): Homolog of NCBI NO: 12323294 NR Description: putative (Avr9) elicitor response protein;
  misc_feature (6)..(398): Homolog of NCBI NO: 15220440 NR Description: putative AVR9 elicitor response protein; protein At1g05170.1, supported by cDNA: gi_14488077 [Arabidopsis
  misc_feature (2)..(398): Homolog of NCBI NO: 15225684 NR Description: unknown protein; protein id: At2g32430.1
  misc_feature (8)..(396): Homolog of NCBI NO: 18395060 NR Description: Expressed protein; protein id: At1g22015.1, by cDNA: 115483. [Arabidopsis thaliana] >gi|25370622|pir||B86353
  misc_feature (13)..(398): Homolog of NCBI NO: 18416895 NR Description: Avr9 elicitor response like protein; protein id:
  misc_feature (13)..(398): Homolog of NCBI NO: 7485336 NR Description: hypothetical protein F10M23.280 - Arabidopsis >gi|4455217|emb|CAB36540.1| Avr9 elicitor response like protein thaliana] >gi|7269547|emb|CAB79549.1| Avr9 elicitor response like
  misc_feature (13)..(398): Homolog of NCBI NO: 15223337 NR Description: Avr9 elicitor response protein, putative; protein At1g32930.1 [Arabidopsis thaliana] >gi|25370618|pir||H86453 avr9
  misc_feature (8)..(391): Homolog of NCBI NO: 15217544 NR Description: elicitor response protein, putative; protein id: [Arabidopsis thaliana] >gi|25370623|pir||A86458 probasble
MKGKGGAMDRRSSARWRVLLLCAFSFGLGMLFTDRFWTAPDSSNHIMSQSRRQEQELQLVSEDCSTKRKHGEDKDIMGEVTKTHEAIQSLDKSISTLQMELAAKRSTLELLRSSGSPVTFETSQPRKKAFVVIGVNTAFSSRKRRDSVRETWMPQGEKLQQLEEQKGIVIRFTIGHSATSDSILDKAIDSEDAQHHDFLRLDHVEGYHELSAKTKIFFSTALGIWDADFYVKVDDDVHVNLGMLATTLARHKLKPRTYIGCMKSGPVLADKNVKYHEPEYWKFGEEGNKYFRHATGQIYAISKDLATYISINQPILHKYANEDVSLGSWFIGLEVNHIDERNMCCGTPPDCEWKGQAGNVCVASFDWSCSGICKSVERIKDVHARCGEGDSAVWSALF

SEQ ID NO: 6873 - protein, 391 aa, Zea mays subsp. mays
  peptide (1)..(391): Ceres Seq. ID no. 12409003
  misc_feature (136)..(334): Pfam Name: Galactosyltransferase Pfam Description: Galactosyltransferase
  misc_feature (6)..(391): Homolog of NCBI NO: 4138265 NR Description: Avr9 elicitor response protein [Nicotiana tabacum]
  misc_feature (6)..(390): Homolog of NCBI NO: 30699558 NR Description: Avr9 elicitor response protein -related
  misc_feature (6)..(390): Homolog of NCBI NO: 12323294 NR Description: putative (Avr9) elicitor response protein;
  misc_feature (1)..(391): Homolog of NCBI NO: 15220440 NR Description: putative AVR9 elicitor response protein; protein At1g05170.1, supported by cDNA: gi_14488077 [Arabidopsis
  misc_feature (1)..(391): Homolog of NCBI NO: 15225684 NR Description: unknown protein; protein id: At2g32430.1
  misc_feature (1)..(389): Homolog of NCBI NO: 18395060 NR Description: Expressed protein; protein id: At1g22015.1, by cDNA: 115483. [Arabidopsis thaliana] >gi|25370622|pir||B86353
  misc_feature (6)..(391): Homolog of NCBI NO: 18416895 NR Description: Avr9 elicitor response like protein; protein id:
  misc_feature (6)..(391): Homolog of NCBI NO: 7485336 NR Description: hypothetical protein F10M23.280 - Arabidopsis >gi|4455217|emb|CAB36540.1| Avr9 elicitor response like protein thaliana] >gi|7269547|emb|CAB79549.1| Avr9 elicitor response like
  misc_feature (6)..(391): Homolog of NCBI NO: 15223337 NR Description: Avr9 elicitor response protein, putative; protein At1g32930.1 [Arabidopsis thaliana] >gi|25370618|pir||H86453 avr9
  misc_feature (1)..(384): Homolog of NCBI NO: 15217544 NR Description: elicitor response protein, putative; protein id: [Arabidopsis thaliana] >gi|25370623|pir||A86458 probasble
MDRRSSARWRVLLLCAFSFGLGMLFTDRFWTAPDSSNHIMSQSRRQEQELQLVSEDCSTKRKHGEDKDIMGEVTKTHEAIQSLDKSISTLQMELAAKRSTLELLRSSGSPVTFETSQPRKKAFVVIGVNTAFSSRKRRDSVRETWMPQGEKLQQLEEQKGIVIRFTIGHSATSDSILDKAIDSEDAQHHDFLRLDHVEGYHELSAKTKIFFSTALGIWDADFYVKVDDDVHVNLGMLATTLARHKLKPRTYIGCMKSGPVLADKNVKYHEPEYWKFGEEGNKYFRHATGQIYAISKDLATYISINQPILHKYANEDVSLGSWFIGLEVNHIDERNMCCGTPPDCEWKGQAGNVCVASFDWSCSGICKSVERIKDVHARCGEGDSAVWSALF

SEQ ID NO: 6874 - protein, 369 aa, Zea mays subsp. mays
  peptide (1)..(369): Ceres Seq. ID no. 12409004
  misc_feature (114)..(312): Pfam Name: Galactosyltransferase Pfam Description: Galactosyltransferase
  misc_feature (1)..(369): Homolog of NCBI NO: 4138265 NR Description: Avr9 elicitor response protein [Nicotiana tabacum]
  misc_feature (1)..(368): Homolog of NCBI NO: 30699558 NR Description: Avr9 elicitor response protein -related
  misc_feature (1)..(368): Homolog of NCBI NO: 12323294 NR Description: putative (Avr9) elicitor response protein;
  misc_feature (1)..(369): Homolog of NCBI NO: 15220440 NR Description: putative AVR9 elicitor response protein; protein At1g05170.1, supported by cDNA: gi_14488077 [Arabidopsis
  misc_feature (1)..(369): Homolog of NCBI NO: 15225684 NR Description: unknown protein; protein id: At2g32430.1
  misc_feature (1)..(367): Homolog of NCBI NO: 18395060 NR Description: Expressed protein; protein id: At1g22015.1, by cDNA: 115483. [Arabidopsis thaliana] >gi|25370622|pir||B86353
  misc_feature (1)..(369): Homolog of NCBI NO: 18416895 NR Description: Avr9 elicitor response like protein; protein id:
  misc_feature (1)..(369): Homolog of NCBI NO: 7485336 NR Description: hypothetical protein F10M23.280 - Arabidopsis >gi|4455217|emb|CAB36540.1| Avr9 elicitor response like protein thaliana] >gi|7269547|emb|CAB79549.1| Avr9 elicitor response like
  misc_feature (1)..(369): Homolog of NCBI NO: 15223337 NR Description: Avr9 elicitor response protein, putative; protein At1g32930.1 [Arabidopsis thaliana] >gi|25370618|pir||H86453 avr9
  misc_feature (1)..(362): Homolog of NCBI NO: 15217544 NR Description: elicitor response protein, putative; protein id: [Arabidopsis thaliana] >gi|25370623|pir||A86458 probasble
MLFTDRFWTAPDSSNHIMSQSRRQEQELQLVSEDCSTKRKHGEDKDIMGEVTKTHEAIQSLDKSISTLQMELAAKRSTLELLRSSGSPVTFETSQPRKKAFVVIGVNTAFSSRKRRDSVRETWMPQGEKLQQLEEQKGIVIRFTIGHSATSDSILDKAIDSEDAQHHDFLRLDHVEGYHELSAKTKIFFSTALGIWDADFYVKVDDDVHVNLGMLATTLARHKLKPRTYIGCMKSGPVLADKNVKYHEPEYWKFGEEGNKYFRHATGQIYAISKDLATYISINQPILHKYANEDVSLGSWFIGLEVNHIDERNMCCGTPPDCEWKGQAGNVCVASFDWSCSGICKSVERIKDVHARCGEGDSAVWSALF

SEQ ID NO: 6875 - DNA, 1164 bp, Zea mays subsp. mays
  misc_feature (1)..(1164): Ceres Seq. ID no. 12365653
  misc_feature: MA Experiment ID: 108504 Result: Up-regulated in Transcription
  misc_feature: MA Experiment 108504 PARAMETER Experiment Name: Zm_Drought_P Parameter: Age (day) Value: 8
  misc_feature: MA Experiment 108504 PARAMETER Experiment Name: Zm_Drought_P Parameter: Organism Value: Zea mays
  misc_feature: MA Experiment 108504 PARAMETER Experiment Name: Zm_Drought_P Parameter: Plant Line Value: 35A19
  misc_feature: MA Experiment 108504 PARAMETER Experiment Name: Zm_Drought_P Parameter: Timepoint (hr) Value: 12
  misc_feature: MA Experiment 108504 PARAMETER Experiment Name: Zm_Drought_P Parameter: Tissue Value: Aerial
  misc_feature: MA Experiment 108504 PARAMETER Experiment Name: Zm_Drought_P Parameter: Treatment Value: Drought vs. No Drought
  misc_feature: MA Experiment ID: 108527 Result: Up-regulated in Transcription
  misc_feature: MA Experiment 108527 PARAMETER Experiment Name: Zm_5mM_NO_P Parameter: Age (day) Value: 8
  misc_feature: MA Experiment 108527 PARAMETER Experiment Name: Zm_5mM_NO_P Parameter: Organism Value: Zea mays
  misc_feature: MA Experiment 108527 PARAMETER Experiment Name: Zm_5mM_NO_P Parameter: Plant Line Value: 35A19
  misc_feature: MA Experiment 108527 PARAMETER Experiment Name: Zm_5mM_NO_P Parameter: Timepoint (hr) Value: 6
  misc_feature: MA Experiment 108527 PARAMETER Experiment Name: Zm_5mM_NO_P Parameter: Tissue Value: Aerial
  misc_feature: MA Experiment 108527 PARAMETER Experiment Name: Zm_5mM_NO_P Parameter: Treatment Value: 5mM NO vs. No Treatment
  misc_feature: MA Experiment ID: 108529 Result: Up-regulated in Transcription
  misc_feature: MA Experiment 108529 PARAMETER Experiment Name: Zm_Imbibed_Seeds_P Parameter: Age (day) Value: 5 vs. 2
  misc_feature: MA Experiment 108529 PARAMETER Experiment Name: Zm_Imbibed_Seeds_P Parameter: Organism Value: Zea mays
  misc_feature: MA Experiment 108529 PARAMETER Experiment Name: Zm_Imbibed_Seeds_P Parameter: Plant Line Value: 35A19
  misc_feature: MA Experiment 108529 PARAMETER Experiment Name: Zm_Imbibed_Seeds_P Parameter: Tissue Value: Roots vs. Embryo
  misc_feature: MA Experiment ID: 108535 Result: Down-regulated in Transcription
  misc_feature: MA Experiment 108535 PARAMETER Experiment Name: Zm_Meristem_P Parameter: Age (day) Value: 8
  misc_feature: MA Experiment 108535 PARAMETER Experiment Name: Zm_Meristem_P Parameter: Organism Value: Zea mays
  misc_feature: MA Experiment 108535 PARAMETER Experiment Name: Zm_Meristem_P Parameter: Plant Line Value: 35A19
  misc_feature: MA Experiment 108535 PARAMETER Experiment Name: Zm_Meristem_P Parameter: Tissue Value: Root Meristem vs. Above Root Meristem
  misc_feature: MA Experiment ID: 108545 Result: Down-regulated in Transcription
  misc_feature: MA Experiment 108545 PARAMETER Experiment Name: Zm_Imbibed_Seeds_P Parameter: Age (day) Value: 3 vs. 2
  misc_feature: MA Experiment 108545 PARAMETER Experiment Name: Zm_Imbibed_Seeds_P Parameter: Organism Value: Zea mays
  misc_feature: MA Experiment 108545 PARAMETER Experiment Name: Zm_Imbibed_Seeds_P Parameter: Plant Line Value: 35A19
  misc_feature: MA Experiment 108545 PARAMETER Experiment Name: Zm_Imbibed_Seeds_P Parameter: Tissue Value: Aerial vs. Embryo
  misc_feature: MA Experiment ID: 108556 Result: Up-regulated in Transcription
  misc_feature: MA Experiment 108556 PARAMETER Experiment Name: Zm_Drought_P Parameter: Age (day) Value: 9
  misc_feature: MA Experiment 108556 PARAMETER Experiment Name: Zm_Drought_P Parameter: Organism Value: Zea mays
  misc_feature: MA Experiment 108556 PARAMETER Experiment Name: Zm_Drought_P Parameter: Plant Line Value: 35A19
  misc_feature: MA Experiment 108556 PARAMETER Experiment Name: Zm_Drought_P Parameter: Timepoint (hr) Value: 24
  misc_feature: MA Experiment 108556 PARAMETER Experiment Name: Zm_Drought_P Parameter: Tissue Value: Aerial
  misc_feature: MA Experiment 108556 PARAMETER Experiment Name: Zm_Drought_P Parameter: Treatment Value: Drought vs. No Drought
  misc_feature: MA Experiment ID: 108689 Result: Up-regulated in Transcription
  misc_feature: MA Experiment 108689 PARAMETER Experiment Name: Zm_Drought_Roots_P Parameter: Age (day) Value: 9
  misc_feature: MA Experiment 108689 PARAMETER Experiment Name: Zm_Drought_Roots_P Parameter: Organism Value: Zea mays
  misc_feature: MA Experiment 108689 PARAMETER Experiment Name: Zm_Drought_Roots_P Parameter: Plant Line Value: 35A19
  misc_feature: MA Experiment 108689 PARAMETER Experiment Name: Zm_Drought_Roots_P Parameter: Timepoint (hr) Value: 24
  misc_feature: MA Experiment 108689 PARAMETER Experiment Name: Zm_Drought_Roots_P Parameter: Tissue Value: Roots
  misc_feature: MA Experiment 108689 PARAMETER Experiment Name: Zm_Drought_Roots_P Parameter: Treatment Value: Drought vs. No Drought
  misc_feature: MA Experiment ID: 20000108 Result: Down-regulated in Transcription
  misc_feature: MA Experiment 20000108 PARAMETER Experiment Name: Zm_Root-Tips_P Parameter: Age (day) Value: 12
  misc_feature: MA Experiment 20000108 PARAMETER Experiment Name: Zm_Root-Tips_P Parameter: Organism Value: Zea mays
  misc_feature: MA Experiment 20000108 PARAMETER Experiment Name: Zm_Root-Tips_P Parameter: Tissue Value: Root tips vs. Root mid region    35
  misc_feature: MA Experiment 20000108 PARAMETER Experiment Name: Zm_Root-Tips_P Parameter: Tissue Value: Root tips vs. Root mid region   Sequence Listing-Misc Features (4)
  misc_feature: MA Experiment ID: 20000480 Result: Up-regulated in Transcription
  misc_feature: MA Experiment 20000480 PARAMETER Experiment Name: Zm_Drought_P Parameter: Age (day) Value: 11
  misc_feature: MA Experiment 20000480 PARAMETER Experiment Name: Zm_Drought_P Parameter: Organism Value: Zea mays
  misc_feature: MA Experiment 20000480 PARAMETER Experiment Name: Zm_Drought_P Parameter: Plant Line Value: 35A19
  misc_feature: MA Experiment 20000480 PARAMETER Experiment Name: Zm_Drought_P Parameter: Timepoint (hr) Value: 72
  misc_feature: MA Experiment 20000480 PARAMETER Experiment Name: Zm_Drought_P Parameter: Tissue Value: Aerial
  misc_feature: MA Experiment 20000480 PARAMETER Experiment Name: Zm_Drought_P Parameter: Treatment Value: Drought vs. No Drought
  misc_feature: MA Experiment ID: 20000535 Result: Down-regulated in Transcription
  misc_feature: MA Experiment 20000535 PARAMETER Experiment Name: Zm_Hybrid_Seed_Dev_P Parameter: DAP Value: 30 vs. 12
  misc_feature: MA Experiment 20000535 PARAMETER Experiment Name: Zm_Hybrid_Seed_Dev_P Parameter: Organism Value: Zea mays
  misc_feature: MA Experiment 20000535 PARAMETER Experiment Name: Zm_Hybrid_Seed_Dev_P Parameter: Plant Line Value: 35A19
  misc_feature: MA Experiment 20000535 PARAMETER Experiment Name: Zm_Hybrid_Seed_Dev_P Parameter: Tissue Value: Embryo vs. Unfert Floret
ctcgtaatctctcctgcgtccatcctctcctcgcggcgggggaagaatggccgacccgagcttcctcgtcgggatcgtagggaacgtaatctccatcctcgtcttcgcgtcgccgatagcgacgttccggcgcatcgtgaggagcaggagcacggaggacttcaggtggctgccgtacgtcaccaccctgctcagcaccagcctctggaccttctacggcctcctcaagcccggctgcctcctcgtcgtcaccgtcaacggcgccggcgccgcgctcgaggccgcctacgtcgcgctctacctcgtctacgcgccaagggagaccaaggcgaagatggccaaggtggtggtggccgtgaacgtcgccttccttgccgcggtcgtcgcggtggcgcctgctggcgctgcacggcggcgcccgcctgttcgcggtgggcctgctgtgcgccgcgctcacggtcgggatgtacgcggcaccgctcggcgcgatgcggacggtggtgaagacccggagcgtggagtacatgcccttctccctctccttcttcctcttcctcaacggcggcgtctggagcatctactccctgctcgtcaaggactacttcatcggggtccccaacgccatcggcctcgtcctgggcacggcgcagctgctgctgtacctggcgtaccggaaggcgccggcgagcaaggacgacgacgaggaggcggccgctgctgcgtcgggggacgacggcgacgacgaggaggaggaggaagggctgacgcacctgatggggcagcaggtggagatggcgcagcgcggccgcctgcgcctgcacaaggggcagagcctgcccaagccgccgccgggcgggccgctgtcgtcgccgcgccacgggttcgggagcatcatcaagtccctgtccgccacccccgtcgagctgcactccgtcctgtaccagcacgcccggttccagcccgtcaagaaggacgacgacgacgtggaggccaacgactgactgatatgatgcattaattgatgctgctattgttcgaccgacgtggtagcggtacagaggcgcccttttagtattcaggccagggtagcgttccaatggacagggtttgagtgtgttcttcacatatttgcaggttcgaaacccagatgaattaatatgtttg

SEQ ID NO: 6876 - protein, 323 aa, Zea mays subsp. mays
  peptide (1)..(323): Ceres Seq. ID no. 12365654
  misc_feature (6)..(91): Pfam Name: MtN3/saliva family Pfam Description: MtN3/saliva family
  misc_feature (1)..(118): Homolog of NCBI NO: 27754697 NR Description: putative cytochrome c oxidoreductase [Arabidopsis
  misc_feature (1)..(118): Homolog of NCBI NO: 30683457 NR Description: nodulin MtN3 family protein [Arabidopsis thaliana]
  misc_feature (1)..(116): Homolog of NCBI NO: 30684193 NR Description: nodulin MtN3 family protein [Arabidopsis thaliana]
  misc_feature (6)..(123): Homolog of NCBI NO: 34907420 NR Description: P0018C10.36 [Oryza sativa (japonica
  misc_feature (5)..(115): Homolog of NCBI NO: 21593422 NR Description: senescence-associated protein (SAG29)
  misc_feature (5)..(115): Homolog of NCBI NO: 15240040 NR Description: senescence-associated protein (SAG29); protein At5g13170.1, supported by cDNA: 38843., supported by cDNA:
  misc_feature (5)..(115): Homolog of NCBI NO: 1619602 NR Description: MtN3 [Medicago truncatula]
  misc_feature (5)..(133): Homolog of NCBI NO: 15241278 NR Description: MtN3-like protein; protein id: At5g50800.1,
  misc_feature (5)..(133): Homolog of NCBI NO: 21593109 NR Description: MtN3-like protein [Arabidopsis thaliana]
  misc_feature (5)..(113): Homolog of NCBI NO: 14715258 NR Description: N3 like protein [Medicago truncatula]
MADPSFLVGIVGNVISILVFASPIATFRRIVRSRSTEDFRWLPYVTTLLSTSLWTFYGLLKPGCLLVVTVNGAGAALEAAYVALYLVYAPRETKAKMAKVVVAVNVAFLAAVVAVAPAGAARRRPPVRGGPAVRRAHGRDVRGTARRDADGGEDPERGVHALLPLLLPLPQRRRLEHLLPARQGLLHRGPQRHRPRPGHGAAAAVPGVPEGAGEQGRRRGGGRCCVGGRRRRRGGGGRADAPDGAAGGDGAARPPAPAQGAEPAQAAAGRAAVVAAPRVREHHQVPVRHPRRAALRPVPARPVPARQEGRRRRGGQRLTDMMH

SEQ ID NO: 6877 - protein, 227 aa, Zea mays subsp. mays
  peptide (1)..(227): Ceres Seq. ID no. 12365655
  misc_feature (101)..(159): Pfam Name: Collagen triple helix repeat (20 copies) Pfam Description: Collagen triple helix repeat (20 copies)
  misc_feature (1)..(22): Homolog of NCBI NO: 27754697 NR Description: putative cytochrome c oxidoreductase [Arabidopsis
  misc_feature (1)..(22): Homolog of NCBI NO: 30683457 NR Description: nodulin MtN3 family protein [Arabidopsis thaliana]
  misc_feature (1)..(20): Homolog of NCBI NO: 30684193 NR Description: nodulin MtN3 family protein [Arabidopsis thaliana]
  misc_feature (1)..(27): Homolog of NCBI NO: 34907420 NR Description: P0018C10.36 [Oryza sativa (japonica
  misc_feature (1)..(19): Homolog of NCBI NO: 21593422 NR Description: senescence-associated protein (SAG29)
  misc_feature (1)..(19): Homolog of NCBI NO: 15240040 NR Description: senescence-associated protein (SAG29); protein At5g13170.1, supported by cDNA: 38843., supported by cDNA:
  misc_feature (1)..(19): Homolog of NCBI NO: 1619602 NR Description: MtN3 [Medicago truncatula]
  misc_feature (1)..(37): Homolog of NCBI NO: 15241278 NR Description: MtN3-like protein; protein id: At5g50800.1,
  misc_feature (1)..(37): Homolog of NCBI NO: 21593109 NR Description: MtN3-like protein [Arabidopsis thaliana]
  misc_feature (1)..(17): Homolog of NCBI NO: 14715258 NR Description: N3 like protein [Medicago truncatula]
MAKVVVAVNVAFLAAVVAVAPAGAARRRPPVRGGPAVRRAHGRDVRGTARRDADGGEDPERGVHALLPLLLPLPQRRRLEHLLPARQGLLHRGPQRHRPRPGHGAAAAVPGVPEGAGEQGRRRGGGRCCVGGRRRRRGGGGRADAPDGAAGGDGAARPPAPAQGAEPAQAAAGRAAVVAAPRVREHHQVPVRHPRRAALRPVPARPVPARQEGRRRRGGQRLTDMMH

SEQ ID NO: 6878 - protein, 178 aa, Zea mays subsp. mays
  peptide (1)..(178): Ceres Seq. ID no. 12365656
  misc_feature (1)..(101): Homolog of NCBI NO: 27754697 NR Description: putative cytochrome c oxidoreductase [Arabidopsis
  misc_feature (1)..(101): Homolog of NCBI NO: 30683457 NR Description: nodulin MtN3 family protein [Arabidopsis thaliana]
  misc_feature (1)..(80): Homolog of NCBI NO: 30684193 NR Description: nodulin MtN3 family protein [Arabidopsis thaliana]
  misc_feature (1)..(96): Homolog of NCBI NO: 34907420 NR Description: P0018C10.36 [Oryza sativa (japonica
  misc_feature (1)..(81): Homolog of NCBI NO: 21593422 NR Description: senescence-associated protein (SAG29)
  misc_feature (1)..(72): Homolog of NCBI NO: 15240040 NR Description: senescence-associated protein (SAG29); protein At5g13170.1, supported by cDNA: 38843., supported by cDNA:
  misc_feature (1)..(70): Homolog of NCBI NO: 1619602 NR Description: MtN3 [Medicago truncatula]
  misc_feature (1)..(80): Homolog of NCBI NO: 15241278 NR Description: MtN3-like protein; protein id: At5g50800.1,
  misc_feature (1)..(80): Homolog of NCBI NO: 21593109 NR Description: MtN3-like protein [Arabidopsis thaliana]
  misc_feature (1)..(72): Homolog of NCBI NO: 14715258 NR Description: N3 like protein [Medicago truncatula]
MYAAPLGAMRTVVKTRSVEYMPFSLSFFLFLNGGVWSIYSLLVKDYFIGVPNAIGLVLGTAQLLLYLAYRKAPASKDDDEEAAAAASGDDGDDEEEEEGLTHLMGQQVEMAQRGRLRLHKGQSLPKPPPGGPLSSPRHGFGSIIKSLSATPVELHSVLYQHARFQPVKKDDDDVEAND

SEQ ID NO: 6879 - DNA, 1951 bp, Zea mays subsp. mays
  misc_feature (1)..(1951): Ceres Seq. ID no. 12372631
  misc_feature: MA Experiment ID: 108523 Result: Down-regulated in Transcription
  misc_feature: MA Experiment 108523 PARAMETER Experiment Name: Zm_42deg_Heat_P Parameter: Age (day) Value: 8
  misc_feature: MA Experiment 108523 PARAMETER Experiment Name: Zm_42deg_Heat_P Parameter: Organism Value: Zea mays
  misc_feature: MA Experiment 108523 PARAMETER Experiment Name: Zm_42deg_Heat_P Parameter: Plant Line Value: 35A19
  misc_feature: MA Experiment 108523 PARAMETER Experiment Name: Zm_42deg_Heat_P Parameter: Temperature (deg C) Value: 42 vs. 22
  misc_feature: MA Experiment 108523 PARAMETER Experiment Name: Zm_42deg_Heat_P Parameter: Timepoint (hr) Value: 6
  misc_feature: MA Experiment 108523 PARAMETER Experiment Name: Zm_42deg_Heat_P Parameter: Tissue Value: Aerial
  misc_feature: MA Experiment ID: 108535 Result: Down-regulated in Transcription
  misc_feature: MA Experiment 108535 PARAMETER Experiment Name: Zm_Meristem_P Parameter: Age (day) Value: 8
  misc_feature: MA Experiment 108535 PARAMETER Experiment Name: Zm_Meristem_P Parameter: Organism Value: Zea mays
  misc_feature: MA Experiment 108535 PARAMETER Experiment Name: Zm_Meristem_P Parameter: Plant Line Value: 35A19
  misc_feature: MA Experiment 108535 PARAMETER Experiment Name: Zm_Meristem_P Parameter: Tissue Value: Root Meristem vs. Above Root Meristem
  misc_feature: MA Experiment ID: 108543 Result: Down-regulated in Transcription
  misc_feature: MA Experiment ID: 20000108 Result: Down-regulated in Transcription
  misc_feature: MA Experiment 20000108 PARAMETER Experiment Name: Zm_Root-Tips_P Parameter: Age (day) Value: 12
  misc_feature: MA Experiment 20000108 PARAMETER Experiment Name: Zm_Root-Tips_P Parameter: Organism Value: Zea mays
  misc_feature: MA Experiment 20000108 PARAMETER Experiment Name: Zm_Root-Tips_P Parameter: Tissue Value: Root tips vs. Root mid region    35
  misc_feature: MA Experiment 20000108 PARAMETER Experiment Name: Zm_Root-Tips_P Parameter: Tissue Value: Root tips vs. Root mid region   Sequence Listing-Misc Features (4)
  misc_feature: MA Experiment ID: 20000535 Result: Down-regulated in Transcription
  misc_feature: MA Experiment 20000535 PARAMETER Experiment Name: Zm_Hybrid_Seed_Dev_P Parameter: DAP Value: 30 vs. 12
  misc_feature: MA Experiment 20000535 PARAMETER Experiment Name: Zm_Hybrid_Seed_Dev_P Parameter: Organism Value: Zea mays
  misc_feature: MA Experiment 20000535 PARAMETER Experiment Name: Zm_Hybrid_Seed_Dev_P Parameter: Plant Line Value: 35A19
  misc_feature: MA Experiment 20000535 PARAMETER Experiment Name: Zm_Hybrid_Seed_Dev_P Parameter: Tissue Value: Embryo vs. Unfert Floret
gcacgagaccattacctagaacatcctaatcgaaaaaacggatcaagcgaggtagacgactccgcgtctaattaaacctgtggtctgcggacgggcggtcgtcggttagagcattgcttccgtgtggtgcggttgatagctcggatcttctgctggcggagttcgtcttggaggagaagagagagagagagcgcgcgcgccgggatcggagccaggaagcatccagcagcgatggcgggcggcggggtggcggcgctgggcgtgaagacggaccgcgcggcgcagtacaaggggcgcatgacgctcgccgtcgccacgacctgcctcgtggccgccgtcgggggcgccatcttcggctacgacatcggcatctccggaggcgtgacatccatggacccattcctggagaaattcttcccggtagtgttccaccggaagaactccggcgggaagaacaactactgtaagtacgacaaccagggactagcggcgttcacatcgtcactctacctcgccggcctcgttgcctccctcgtcgcgtcccccgtgacgaggaactacggccgcaaagctagcattgtctgcggcggcgtgagcttcctcatcggcgcggccctcaacgtggccgccgtgaatctggctatgctcatcctcgggcgcatcatgctcggcgtcggcatcggttttggcaaccaggctgtgccgctgtacctgtcggagatggcgccggcgcacctccgcggcggcctgaacatgatgttccagctcgcgacgacgctgggcatcttcacggcgaacctgatcaactatggcacgcagaacatcaagccgtgggggtggcggctgtcgctgggcctcgcggcggtgccggcgctgctgatgacgttgggcgggctctttcttccggagactcccaacagcctcattgagcgcgggcgcgtggaggagggtcggcgcgtgctggagcgcatccggggcacggccgacgtggacgccgagttcacggacatggtggaggcgagcgagctggccaacaccgtcgagcacccgttccggaacatcctgcagccgcgcaaccggccgcagctggtgatggccgtgtgcatgccggcgttccagatcctgacgggcatcaactccatcctcttctacgcgccggtcctgttccagagcatgggtttcggcgggaacgcgtcccctctactcctccgtgctcaccggcgccgtgctcttctcctcgacgctcatctccatcggcatcgtcgaccgcctcggccgccggaagctcctcatcagcggcgggatccagatgatcgtctgccaggtgatcgtggcggtgatcctgggcgtgaagttcggggcggagaagcaactggcgcggagctactcggtcgcggtggtggtggtgatctgcctgttcgttctggcgttcgggtggtcgtggggcccgctgggatggacggtgccgagcgagatcttcccgctggagacgcggtcggcggggcagagcatcacggtggccgtgaacctgctcttcaccttcgccatcgcgcaggcgttcctgtcgctgctgtgcgccttcaagttcggcatcttcctctttttcgcggggtggatcaccgtcatgaccgtgttcgtctacgtcttcctgccggagaccaagggcgtgcccatcgaagagatggtgctgctatggcggaagcactggttctggaagaaggtcatgccggacatgccgctcgaggatggctggggcgcggctgagggtcatgcggcacctgccagcaacaatcacaagggatgactggagtgaagcatgcatggttgcctggttggtttcgtggacactttatataataactgaagaaaacaagacacacactaacatgtaggcggctgcttattcttattgtattttgtataaagcaggctgtgtgatatgcaggggtag

SEQ ID NO: 6880 - protein, 510 aa, Zea mays subsp. mays
  peptide (1)..(510): Ceres Seq. ID no. 12372632
  misc_feature (30)..(322): Pfam Name: Sugar (and other) transporter Pfam Description: Sugar (and other) transporter
  misc_feature (1)..(322): Homolog of NCBI NO: 347855 NR Description: glucose transporter [Saccharum hybrid cultivar
  misc_feature (1)..(322): Homolog of NCBI NO: 15235215 NR Description: putative hexose transporter; protein id: [Arabidopsis thaliana] >gi|7446742|pir||T01506 probable hexose
  misc_feature (1)..(322): Homolog of NCBI NO: 1723182 NR Description: Sugar carrier protein A >gi|7446730|pir||T10150
  misc_feature (1)..(322): Homolog of NCBI NO: 15240313 NR Description: hexose transporter - like protein; protein id: supported by cDNA: gi_15010579, supported by cDNA: gi_15450648, by cDNA: gi_9965738 [Arabidopsis thaliana]
  misc_feature (1)..(322): Homolog of NCBI NO: 5734440 NR Description: hexose transporter [Lycopersicon esculentum]
  misc_feature (1)..(322): Homolog of NCBI NO: 7446737 NR Description: hexose transport protein - tomato
  misc_feature (4)..(322): Homolog of NCBI NO: 7446723 NR Description: probable monosaccharide transport protein Mst-1 -
  misc_feature (1)..(322): Homolog of NCBI NO: 100347 NR Description: monosaccharide transport protein MST1 - common >gi|19885|emb|CAA47324.1| monosaccharid transporter [Nicotiana
  misc_feature (1)..(338): Homolog of NCBI NO: 15223861 NR Description: sugar carrier protein, putative; protein id: [Arabidopsis thaliana] >gi|7446743|pir||T00450 probable
  misc_feature (90)..(324): Homolog of NCBI NO: 27467165 NR Description: bicyclomycin resistance protein TcaB epidermidis ATCC 12228] >gi|27314707|gb|AAO03844.1|AE016744_247
MAGGGVAALGVKTDRAAQYKGRMTLAVATTCLVAAVGGAIFGYDIGISGGVTSMDPFLEKFFPVVFHRKNSGGKNNYCKYDNQGLAAFTSSLYLAGLVASLVASPVTRNYGRKASIVCGGVSFLIGAALNVAAVNLAMLILGRIMLGVGIGFGNQAVPLYLSEMAPAHLRGGLNMMFQLATTLGIFTANLINYGTQNIKPWGWRLSLGLAAVPALLMTLGGLFLPETPNSLIERGRVEEGRRVLERIRGTADVDAEFTDMVEASELANTVEHPFRNILQPRNRPQLVMAVCMPAFQILTGINSILFYAPVLFQSMGFGGNASPLLLRAHRRRALLLDAHLHRHRRPPRPPEAPHQRRDPDDRLPGDRGGDPGREVRGGEATGAELLGRGGGGDLPVRSGVRVVVGPAGMDGAERDLPAGDAVGGAEHHGGREPALHLRHRAGVPVAAVRLQVRHLPLFRGVDHRHDRVRLRLPAGDQGRAHRRDGAAMAEALVLEEGHAGHAARGWLGRG

SEQ ID NO: 6881 - protein, 488 aa, Zea mays subsp. mays
  peptide (1)..(488): Ceres Seq. ID no. 12372633
  misc_feature (8)..(300): Pfam Name: Sugar (and other) transporter Pfam Description: Sugar (and other) transporter
  misc_feature (1)..(300): Homolog of NCBI NO: 347855 NR Description: glucose transporter [Saccharum hybrid cultivar
  misc_feature (1)..(300): Homolog of NCBI NO: 15235215 NR Description: putative hexose transporter; protein id: [Arabidopsis thaliana] >gi|7446742|pir||T01506 probable hexose
  misc_feature (1)..(300): Homolog of NCBI NO: 1723182 NR Description: Sugar carrier protein A >gi|7446730|pir||T10150
  misc_feature (1)..(300): Homolog of NCBI NO: 15240313 NR Description: hexose transporter - like protein; protein id: supported by cDNA: gi_15010579, supported by cDNA: gi_15450648, by cDNA: gi_9965738 [Arabidopsis thaliana]
  misc_feature (1)..(300): Homolog of NCBI NO: 5734440 NR Description: hexose transporter [Lycopersicon esculentum]
  misc_feature (1)..(300): Homolog of NCBI NO: 7446737 NR Description: hexose transport protein - tomato
  misc_feature (1)..(300): Homolog of NCBI NO: 7446723 NR Description: probable monosaccharide transport protein Mst-1 -
  misc_feature (1)..(300): Homolog of NCBI NO: 100347 NR Description: monosaccharide transport protein MST1 - common >gi|19885|emb|CAA47324.1| monosaccharid transporter [Nicotiana
  misc_feature (1)..(316): Homolog of NCBI NO: 15223861 NR Description: sugar carrier protein, putative; protein id: [Arabidopsis thaliana] >gi|7446743|pir||T00450 probable
  misc_feature (68)..(302): Homolog of NCBI NO: 27467165 NR Description: bicyclomycin resistance protein TcaB epidermidis ATCC 12228] >gi|27314707|gb|AAO03844.1|AE016744_247
MTLAVATTCLVAAVGGAIFGYDIGISGGVTSMDPFLEKFFPVVFHRKNSGGKNNYCKYDNQGLAAFTSSLYLAGLVASLVASPVTRNYGRKASIVCGGVSFLIGAALNVAAVNLAMLILGRIMLGVGIGFGNQAVPLYLSEMAPAHLRGGLNMMFQLATTLGIFTANLINYGTQNIKPWGWRLSLGLAAVPALLMTLGGLFLPETPNSLIERGRVEEGRRVLERIRGTADVDAEFTDMVEASELANTVEHPFRNILQPRNRPQLVMAVCMPAFQILTGINSILFYAPVLFQSMGFGGNASPLLLRAHRRRALLLDAHLHRHRRPPRPPEAPHQRRDPDDRLPGDRGGDPGREVRGGEATGAELLGRGGGGDLPVRSGVRVVVGPAGMDGAERDLPAGDAVGGAEHHGGREPALHLRHRAGVPVAAVRLQVRHLPLFRGVDHRHDRVRLRLPAGDQGRAHRRDGAAMAEALVLEEGHAGHAARGWLGRG

SEQ ID NO: 6882 - protein, 457 aa, Zea mays subsp. mays
  peptide (1)..(457): Ceres Seq. ID no. 12372634
  misc_feature (1)..(269): Pfam Name: Sugar (and other) transporter Pfam Description: Sugar (and other) transporter
  misc_feature (1)..(269): Homolog of NCBI NO: 7446737 NR Description: hexose transport protein - tomato
  misc_feature (1)..(269): Homolog of NCBI NO: 7446723 NR Description: probable monosaccharide transport protein Mst-1 -
  misc_feature (1)..(269): Homolog of NCBI NO: 100347 NR Description: monosaccharide transport protein MST1 - common >gi|19885|emb|CAA47324.1| monosaccharid transporter [Nicotiana
  misc_feature (1)..(269): Homolog of NCBI NO: 15235215 NR Description: putative hexose transporter; protein id: [Arabidopsis thaliana] >gi|7446742|pir||T01506 probable hexose
  misc_feature (1)..(269): Homolog of NCBI NO: 15240313 NR Description: hexose transporter - like protein; protein id: supported by cDNA: gi_15010579, supported by cDNA: gi_15450648, by cDNA: gi_9965738 [Arabidopsis thaliana]
  misc_feature (1)..(269): Homolog of NCBI NO: 5734440 NR Description: hexose transporter [Lycopersicon esculentum]
  misc_feature (1)..(269): Homolog of NCBI NO: 1723182 NR Description: Sugar carrier protein A >gi|7446730|pir||T10150
  misc_feature (1)..(269): Homolog of NCBI NO: 347855 NR Description: glucose transporter [Saccharum hybrid cultivar
  misc_feature (1)..(285): Homolog of NCBI NO: 15223861 NR Description: sugar carrier protein, putative; protein id: [Arabidopsis thaliana] >gi|7446743|pir||T00450 probable
  misc_feature (37)..(271): Homolog of NCBI NO: 27467165 NR Description: bicyclomycin resistance protein TcaB epidermidis ATCC 12228] >gi|27314707|gb|AAO03844.1|AE016744_247
MDPFLEKFFPVVFHRKNSGGKNNYCKYDNQGLAAFTSSLYLAGLVASLVASPVTRNYGRKASIVCGGVSFLIGAALNVAAVNLAMLILGRIMLGVGIGFGNQAVPLYLSEMAPAHLRGGLNMMFQLATTLGIFTANLINYGTQNIKPWGWRLSLGLAAVPALLMTLGGLFLPETPNSLIERGRVEEGRRVLERIRGTADVDAEFTDMVEASELANTVEHPFRNILQPRNRPQLVMAVCMPAFQILTGINSILFYAPVLFQSMGFGGNASPLLLRAHRRRALLLDAHLHRHRRPPRPPEAPHQRRDPDDRLPGDRGGDPGREVRGGEATGAELLGRGGGGDLPVRSGVRVVVGPAGMDGAERDLPAGDAVGGAEHHGGREPALHLRHRAGVPVAAVRLQVRHLPLFRGVDHRHDRVRLRLPAGDQGRAHRRDGAAMAEALVLEEGHAGHAARGWLGRG

SEQ ID NO: 6883 - DNA, 1435 bp, Zea mays subsp. mays
  misc_feature (1)..(1435): Ceres Seq. ID no. 12359747
  misc_feature: MA Experiment ID: 108527 Result: Down-regulated in Transcription
  misc_feature: MA Experiment 108527 PARAMETER Experiment Name: Zm_5mM_NO_P Parameter: Age (day) Value: 8
  misc_feature: MA Experiment 108527 PARAMETER Experiment Name: Zm_5mM_NO_P Parameter: Organism Value: Zea mays
  misc_feature: MA Experiment 108527 PARAMETER Experiment Name: Zm_5mM_NO_P Parameter: Plant Line Value: 35A19
  misc_feature: MA Experiment 108527 PARAMETER Experiment Name: Zm_5mM_NO_P Parameter: Timepoint (hr) Value: 6
  misc_feature: MA Experiment 108527 PARAMETER Experiment Name: Zm_5mM_NO_P Parameter: Tissue Value: Aerial
  misc_feature: MA Experiment 108527 PARAMETER Experiment Name: Zm_5mM_NO_P Parameter: Treatment Value: 5mM NO vs. No Treatment
  misc_feature: MA Experiment ID: 108528 Result: Up-regulated in Transcription
  misc_feature: MA Experiment 108528 PARAMETER Experiment Name: Zm_Imbibed_Seeds_P Parameter: Age (day) Value: 5 vs. 2
  misc_feature: MA Experiment 108528 PARAMETER Experiment Name: Zm_Imbibed_Seeds_P Parameter: Organism Value: Zea mays
  misc_feature: MA Experiment 108528 PARAMETER Experiment Name: Zm_Imbibed_Seeds_P Parameter: Plant Line Value: 35A19
  misc_feature: MA Experiment 108528 PARAMETER Experiment Name: Zm_Imbibed_Seeds_P Parameter: Tissue Value: Aerial vs. Embryo
  misc_feature: MA Experiment ID: 108529 Result: Down-regulated in Transcription
  misc_feature: MA Experiment 108529 PARAMETER Experiment Name: Zm_Imbibed_Seeds_P Parameter: Age (day) Value: 5 vs. 2
  misc_feature: MA Experiment 108529 PARAMETER Experiment Name: Zm_Imbibed_Seeds_P Parameter: Organism Value: Zea mays
  misc_feature: MA Experiment 108529 PARAMETER Experiment Name: Zm_Imbibed_Seeds_P Parameter: Plant Line Value: 35A19
  misc_feature: MA Experiment 108529 PARAMETER Experiment Name: Zm_Imbibed_Seeds_P Parameter: Tissue Value: Roots vs. Embryo
  misc_feature: MA Experiment ID: 108530 Result: Up-regulated in Transcription
  misc_feature: MA Experiment 108530 PARAMETER Experiment Name: Zm_Imbibed_Seeds_P Parameter: Age (day) Value: 6 vs. 2
  misc_feature: MA Experiment 108530 PARAMETER Experiment Name: Zm_Imbibed_Seeds_P Parameter: Organism Value: Zea mays
  misc_feature: MA Experiment 108530 PARAMETER Experiment Name: Zm_Imbibed_Seeds_P Parameter: Plant Line Value: 35A19
  misc_feature: MA Experiment 108530 PARAMETER Experiment Name: Zm_Imbibed_Seeds_P Parameter: Tissue Value: Aerial vs. Embryo
  misc_feature: MA Experiment ID: 108536 Result: Down-regulated in Transcription
  misc_feature: MA Experiment 108536 PARAMETER Experiment Name: Zm_Meristem_P Parameter: Age (day) Value: 8
  misc_feature: MA Experiment 108536 PARAMETER Experiment Name: Zm_Meristem_P Parameter: Organism Value: Zea mays
  misc_feature: MA Experiment 108536 PARAMETER Experiment Name: Zm_Meristem_P Parameter: Plant Line Value: 35A19
  misc_feature: MA Experiment 108536 PARAMETER Experiment Name: Zm_Meristem_P Parameter: Tissue Value: Shoot Meristem vs. Above Shoot Meristem
  misc_feature: MA Experiment ID: 108545 Result: Up-regulated in Transcription
  misc_feature: MA Experiment 108545 PARAMETER Experiment Name: Zm_Imbibed_Seeds_P Parameter: Age (day) Value: 3 vs. 2
  misc_feature: MA Experiment 108545 PARAMETER Experiment Name: Zm_Imbibed_Seeds_P Parameter: Organism Value: Zea mays
  misc_feature: MA Experiment 108545 PARAMETER Experiment Name: Zm_Imbibed_Seeds_P Parameter: Plant Line Value: 35A19
  misc_feature: MA Experiment 108545 PARAMETER Experiment Name: Zm_Imbibed_Seeds_P Parameter: Tissue Value: Aerial vs. Embryo
  misc_feature: MA Experiment ID: 108546 Result: Down-regulated in Transcription
  misc_feature: MA Experiment 108546 PARAMETER Experiment Name: Zm_Imbibed_Seeds_P Parameter: Age (day) Value: 3 vs. 2
  misc_feature: MA Experiment 108546 PARAMETER Experiment Name: Zm_Imbibed_Seeds_P Parameter: Organism Value: Zea mays
  misc_feature: MA Experiment 108546 PARAMETER Experiment Name: Zm_Imbibed_Seeds_P Parameter: Plant Line Value: 35A19
  misc_feature: MA Experiment 108546 PARAMETER Experiment Name: Zm_Imbibed_Seeds_P Parameter: Tissue Value: Roots vs. Embryo
  misc_feature: MA Experiment ID: 108547 Result: Up-regulated in Transcription
  misc_feature: MA Experiment 108547 PARAMETER Experiment Name: Zm_Imbibed_Seeds_P Parameter: Age (day) Value: 4 vs. 2
  misc_feature: MA Experiment 108547 PARAMETER Experiment Name: Zm_Imbibed_Seeds_P Parameter: Organism Value: Zea mays
  misc_feature: MA Experiment 108547 PARAMETER Experiment Name: Zm_Imbibed_Seeds_P Parameter: Plant Line Value: 35A19
  misc_feature: MA Experiment 108547 PARAMETER Experiment Name: Zm_Imbibed_Seeds_P Parameter: Tissue Value: Aerial vs. Embryo
  misc_feature: MA Experiment ID: 108559 Result: Down-regulated in Transcription
  misc_feature: MA Experiment 108559 PARAMETER Experiment Name: Zm_5mM_NO_P Parameter: Age (day) Value: 8
  misc_feature: MA Experiment 108559 PARAMETER Experiment Name: Zm_5mM_NO_P Parameter: Organism Value: Zea mays
  misc_feature: MA Experiment 108559 PARAMETER Experiment Name: Zm_5mM_NO_P Parameter: Plant Line Value: 35A19
  misc_feature: MA Experiment 108559 PARAMETER Experiment Name: Zm_5mM_NO_P Parameter: Timepoint (hr) Value: 12
  misc_feature: MA Experiment 108559 PARAMETER Experiment Name: Zm_5mM_NO_P Parameter: Tissue Value: Aerial
  misc_feature: MA Experiment 108559 PARAMETER Experiment Name: Zm_5mM_NO_P Parameter: Treatment Value: 5mM NO vs. No Treatment
  misc_feature: MA Experiment ID: 20000626 Result: Down-regulated in Transcription
  misc_feature: MA Experiment 20000626 PARAMETER Experiment Name: Zm_Herbicide-Treatments_P Parameter: Timepoint (hr) Value: 12
  misc_feature: MA Experiment 20000626 PARAMETER Experiment Name: Zm_Herbicide-Treatments_P Parameter: Tissue Value: Aerial
  misc_feature: MA Experiment 20000626 PARAMETER Experiment Name: Zm_Herbicide-Treatments_P Parameter: Treatment Value: Roundup vs. No Treatment
  misc_feature: MA Experiment ID: 20001608 Result: Up-regulated in Transcription
  misc_feature: MA Experiment 20001608 PARAMETER Experiment Name: Zm_50ppm_KNO3_L-to-H_P Parameter: Age (day) Value: 21
  misc_feature: MA Experiment 20001608 PARAMETER Experiment Name: Zm_50ppm_KNO3_L-to-H_P Parameter: Organism Value: Zea mays
  misc_feature: MA Experiment 20001608 PARAMETER Experiment Name: Zm_50ppm_KNO3_L-to-H_P Parameter: Plant Line Value: 35A19
  misc_feature: MA Experiment 20001608 PARAMETER Experiment Name: Zm_50ppm_KNO3_L-to-H_P Parameter: Timepoint (hr) Value: 48
  misc_feature: MA Experiment 20001608 PARAMETER Experiment Name: Zm_50ppm_KNO3_L-to-H_P Parameter: Tissue Value: Shoots
  misc_feature: MA Experiment 20001608 PARAMETER Experiment Name: Zm_50ppm_KNO3_L-to-H_P Parameter: Treatment Value: 50ppm KNO3 vs. 50ppm KCl
ctttctatccctccactccctcttatctgctgcgccatcctccccggcctccaccatggccacagccgccgcggccaccgcctcctcctccctcctcgcgccggcggccagcagcacggcgccggcctcgtcaaacgcgctgctgttcccctcctccgtgccgtcgctgcgtgcgtacccgcggctcctcctcgcgttccgccgccccgccgcggccgccgtcgccgacccgcagggggccgtgctcgaagaggaggcggaggtcgaccagcagggccagtacgacgacgacgacgggtatgagggcgggcgcggccccgcgttcacggcccccacgcgcccgcgcaccggcaaggccgcgctactgcttaagcgcgaccgcacgaggtcgaagaggttcctcgagatacagaagctgcgggagagcaagaaggactacgacgtgcccaccgccatctcgttgatgaagcagatgtccagtgccaagtttgttgagtcagcggaggcgcacttccgcatgaacctcgaccccaagtacaatgaccagcagctccgggccacggtgaatttgcccaagggaacaggccagtcggtgaagattgcggttctcacacaaggtgagaagatagatgaagctagagctgcaggagctgatatcgtaggtggagaagatttgattgaacaaataaaaggaggatttatggagtttgacaaattgattgcatcacctgatatgatgcctaaggttgcgggcttaggtaagattctaggaccaagaggactgatgcctaaccccaaagctggcactgtttcttcaaatattactcaggctatagaagagttcaagaaagggaaggttgaatacagagttgataaatcaggaattgtccatattccctttggcaaggttgactttccagaggaagatctcattgcaaacttcatgtctgttgttcgttctgttgagaggaacaagccatctggtgctaaggggatatactggaaaacggcgtacttgtgctcatccatgggaccttctatcaagctaaacataaaagaaatgcttgactatggtttggaatcatctgactagatgtgaccacaggcaccagttaagtcagctggcatcgttatcaccttcacagattaactatttgccccttgcgacaaatgagcagaaacatggttggtgtatggcaagcaggtgcttaggtacagttttctcagtttttatggcacatcatcagagcagctaaagtcacccagattgacaaagagatggtttgttggtcatgtatttatgagaaaattatgcacggtttcatagatgtctgtctctgagacgtttgttgtaatgtttcatattttgtcaatagtcatccttgagcttaagccaacaatttgttttcacctgtcattaatttaattacctttc

SEQ ID NO: 6884 - protein, 363 aa, Zea mays subsp. mays
  peptide (1)..(363): Ceres Seq. ID no. 12359748
  misc_feature (142)..(346): Pfam Name: Ribosomal protein L1p/L10e family Pfam Description: Ribosomal protein L1p/L10e family
  misc_feature (22)..(357): Homolog of NCBI NO: 15229443 NR Description: chloroplast ribosomal L1 - like protein; protein At3g63490.1, supported by cDNA: gi_15450736, supported by cDNA:
  misc_feature (22)..(357): Homolog of NCBI NO: 25456457 NR Description: ribosomal protein L1 protein [imported] - thaliana >gi|7572940|emb|CAA62364.1| L1 protein [Arabidopsis
  misc_feature (80)..(357): Homolog of NCBI NO: 25453504 NR Description: ribosomal protein L1 [imported] - spinach
  misc_feature (129)..(355): Homolog of NCBI NO: 11465804 NR Description: ribosomal protein L1 [Porphyra purpurea]
  misc_feature (130)..(356): Homolog of NCBI NO: 11467612 NR Description: ribosomal protein L1 [Guillardia theta] CHLOROPLAST 50S RIBOSOMAL PROTEIN L1 >gi|3602937|gb|AAC35598.1|
  misc_feature (127)..(359): Homolog of NCBI NO: 22297840 NR Description: 50S ribosomal protein L1 [Thermosynechococcus BP- 1] >gi|22294017|dbj|BAC07849.1| 50S ribosomal protein L1
  misc_feature (130)..(359): Homolog of NCBI NO: 17232793 NR Description: 50S ribosomal protein L1 [Nostoc sp. PCC 7120]
  misc_feature (130)..(362): Homolog of NCBI NO: 16330010 NR Description: 50S ribosomal protein L1 [Synechocystis sp. PCC >gi|548759|sp|P36236|RL1_SYNY3 50S ribosomal protein L1
  misc_feature (127)..(359): Homolog of NCBI NO: 11467315 NR Description: ribosomal protein L1 [Cyanophora paradoxa]
  misc_feature (110)..(281): Homolog of NCBI NO: 1350625 NR Description: 50S RIBOSOMAL PROTEIN L1, CHLOROPLAST PRECURSOR
FLSLHSLLSAAPSSPASTMATAAAATASSSLLAPAASSTAPASSNALLFPSSVPSLRAYPRLLLAFRRPAAAAVADPQGAVLEEEAEVDQQGQYDDDDGYEGGRGPAFTAPTRPRTGKAALLLKRDRTRSKRFLEIQKLRESKKDYDVPTAISLMKQMSSAKFVESAEAHFRMNLDPKYNDQQLRATVNLPKGTGQSVKIAVLTQGEKIDEARAAGADIVGGEDLIEQIKGGFMEFDKLIASPDMMPKVAGLGKILGPRGLMPNPKAGTVSSNITQAIEEFKKGKVEYRVDKSGIVHIPFGKVDFPEEDLIANFMSVVRSVERNKPSGAKGIYWKTAYLCSSMGPSIKLNIKEMLDYGLESSD

SEQ ID NO: 6885 - protein, 345 aa, Zea mays subsp. mays
  peptide (1)..(345): Ceres Seq. ID no. 12359749
  misc_feature (124)..(328): Pfam Name: Ribosomal protein L1p/L10e family Pfam Description: Ribosomal protein L1p/L10e family
  misc_feature (4)..(339): Homolog of NCBI NO: 15229443 NR Description: chloroplast ribosomal L1 - like protein; protein At3g63490.1, supported by cDNA: gi_15450736, supported by cDNA:
  misc_feature (4)..(339): Homolog of NCBI NO: 25456457 NR Description: ribosomal protein L1 protein [imported] - thaliana >gi|7572940|emb|CAA62364.1| L1 protein [Arabidopsis
  misc_feature (62)..(339): Homolog of NCBI NO: 25453504 NR Description: ribosomal protein L1 [imported] - spinach
  misc_feature (111)..(337): Homolog of NCBI NO: 11465804 NR Description: ribosomal protein L1 [Porphyra purpurea]
  misc_feature (112)..(338): Homolog of NCBI NO: 11467612 NR Description: ribosomal protein L1 [Guillardia theta] CHLOROPLAST 50S RIBOSOMAL PROTEIN L1 >gi|3602937|gb|AAC35598.1|
  misc_feature (109)..(341): Homolog of NCBI NO: 22297840 NR Description: 50S ribosomal protein L1 [Thermosynechococcus BP- 1] >gi|22294017|dbj|BAC07849.1| 50S ribosomal protein L1
  misc_feature (112)..(341): Homolog of NCBI NO: 17232793 NR Description: 50S ribosomal protein L1 [Nostoc sp. PCC 7120]
  misc_feature (112)..(344): Homolog of NCBI NO: 16330010 NR Description: 50S ribosomal protein L1 [Synechocystis sp. PCC >gi|548759|sp|P36236|RL1_SYNY3 50S ribosomal protein L1
  misc_feature (109)..(341): Homolog of NCBI NO: 11467315 NR Description: ribosomal protein L1 [Cyanophora paradoxa]
  misc_feature (92)..(263): Homolog of NCBI NO: 1350625 NR Description: 50S RIBOSOMAL PROTEIN L1, CHLOROPLAST PRECURSOR
MATAAAATASSSLLAPAASSTAPASSNALLFPSSVPSLRAYPRLLLAFRRPAAAAVADPQGAVLEEEAEVDQQGQYDDDDGYEGGRGPAFTAPTRPRTGKAALLLKRDRTRSKRFLEIQKLRESKKDYDVPTAISLMKQMSSAKFVESAEAHFRMNLDPKYNDQQLRATVNLPKGTGQSVKIAVLTQGEKIDEARAAGADIVGGEDLIEQIKGGFMEFDKLIASPDMMPKVAGLGKILGPRGLMPNPKAGTVSSNITQAIEEFKKGKVEYRVDKSGIVHIPFGKVDFPEEDLIANFMSVVRSVERNKPSGAKGIYWKTAYLCSSMGPSIKLNIKEMLDYGLESSD

SEQ ID NO: 6886 - protein, 209 aa, Zea mays subsp. mays
  peptide (1)..(209): Ceres Seq. ID no. 12359750
  misc_feature (1)..(192): Pfam Name: Ribosomal protein L1p/L10e family Pfam Description: Ribosomal protein L1p/L10e family
  misc_feature (1)..(203): Homolog of NCBI NO: 15229443 NR Description: chloroplast ribosomal L1 - like protein; protein At3g63490.1, supported by cDNA: gi_15450736, supported by cDNA:
  misc_feature (1)..(203): Homolog of NCBI NO: 25456457 NR Description: ribosomal protein L1 protein [imported] - thaliana >gi|7572940|emb|CAA62364.1| L1 protein [Arabidopsis
  misc_feature (1)..(203): Homolog of NCBI NO: 25453504 NR Description: ribosomal protein L1 [imported] - spinach
  misc_feature (1)..(201): Homolog of NCBI NO: 11465804 NR Description: ribosomal protein L1 [Porphyra purpurea]
  misc_feature (1)..(202): Homolog of NCBI NO: 11467612 NR Description: ribosomal protein L1 [Guillardia theta] CHLOROPLAST 50S RIBOSOMAL PROTEIN L1 >gi|3602937|gb|AAC35598.1|
  misc_feature (1)..(205): Homolog of NCBI NO: 22297840 NR Description: 50S ribosomal protein L1 [Thermosynechococcus BP- 1] >gi|22294017|dbj|BAC07849.1| 50S ribosomal protein L1
  misc_feature (1)..(205): Homolog of NCBI NO: 17232793 NR Description: 50S ribosomal protein L1 [Nostoc sp. PCC 7120]
  misc_feature (1)..(208): Homolog of NCBI NO: 16330010 NR Description: 50S ribosomal protein L1 [Synechocystis sp. PCC >gi|548759|sp|P36236|RL1_SYNY3 50S ribosomal protein L1
  misc_feature (1)..(205): Homolog of NCBI NO: 11467315 NR Description: ribosomal protein L1 [Cyanophora paradoxa]
  misc_feature (1)..(127): Homolog of NCBI NO: 1350625 NR Description: 50S RIBOSOMAL PROTEIN L1, CHLOROPLAST PRECURSOR
MKQMSSAKFVESAEAHFRMNLDPKYNDQQLRATVNLPKGTGQSVKIAVLTQGEKIDEARAAGADIVGGEDLIEQIKGGFMEFDKLIASPDMMPKVAGLGKILGPRGLMPNPKAGTVSSNITQAIEEFKKGKVEYRVDKSGIVHIPFGKVDFPEEDLIANFMSVVRSVERNKPSGAKGIYWKTAYLCSSMGPSIKLNIKEMLDYGLESSD

SEQ ID NO: 6887 - DNA, 1572 bp, Zea mays subsp. mays
  misc_feature (1)..(1572): Ceres Seq. ID no. 12369120
  misc_feature: MA Experiment ID: 108529 Result: Down-regulated in Transcription
  misc_feature: MA Experiment 108529 PARAMETER Experiment Name: Zm_Imbibed_Seeds_P Parameter: Age (day) Value: 5 vs. 2
  misc_feature: MA Experiment 108529 PARAMETER Experiment Name: Zm_Imbibed_Seeds_P Parameter: Organism Value: Zea mays
  misc_feature: MA Experiment 108529 PARAMETER Experiment Name: Zm_Imbibed_Seeds_P Parameter: Plant Line Value: 35A19
  misc_feature: MA Experiment 108529 PARAMETER Experiment Name: Zm_Imbibed_Seeds_P Parameter: Tissue Value: Roots vs. Embryo
  misc_feature: MA Experiment ID: 108530 Result: Down-regulated in Transcription
  misc_feature: MA Experiment 108530 PARAMETER Experiment Name: Zm_Imbibed_Seeds_P Parameter: Age (day) Value: 6 vs. 2
  misc_feature: MA Experiment 108530 PARAMETER Experiment Name: Zm_Imbibed_Seeds_P Parameter: Organism Value: Zea mays
  misc_feature: MA Experiment 108530 PARAMETER Experiment Name: Zm_Imbibed_Seeds_P Parameter: Plant Line Value: 35A19
  misc_feature: MA Experiment 108530 PARAMETER Experiment Name: Zm_Imbibed_Seeds_P Parameter: Tissue Value: Aerial vs. Embryo
  misc_feature: MA Experiment ID: 108543 Result: Down-regulated in Transcription
  misc_feature: MA Experiment ID: 108544 Result: Up-regulated in Transcription
  misc_feature: MA Experiment ID: 108547 Result: Down-regulated in Transcription
  misc_feature: MA Experiment 108547 PARAMETER Experiment Name: Zm_Imbibed_Seeds_P Parameter: Age (day) Value: 4 vs. 2
  misc_feature: MA Experiment 108547 PARAMETER Experiment Name: Zm_Imbibed_Seeds_P Parameter: Organism Value: Zea mays
  misc_feature: MA Experiment 108547 PARAMETER Experiment Name: Zm_Imbibed_Seeds_P Parameter: Plant Line Value: 35A19
  misc_feature: MA Experiment 108547 PARAMETER Experiment Name: Zm_Imbibed_Seeds_P Parameter: Tissue Value: Aerial vs. Embryo
atccagccatcgattctcctccagttcataggcacagcagcagaaagcgccaggagcttaagaacatggcgaacaggggcttgcatctggctctgttcctcgtccttctcgggctgtcgtccaatttggcagccgggcagatcctgttccagggcttcaactgggagtcgtggaagcagaacgggggatggtacaacttcctgatgggcaaggtggacgacatcgccgaggccggcatcacgcacgtctggctccctccggcgtcacactctctcgccgagcaaggctacctgccggggcgcctgtacgaccttgacgcgtccaagtacggcaacgaggcgcagctcaagtccctgatcgaggcgttccacagcaagggcgtgaaggtcatcgccgacatcgtcatcaaccaccgcacggcggagcaccaggacggccgcggcatctactgcatcttcgagggcggcacgccggactcccgcctcgactggggcccccacatgatctgcagcgacgacagggcgtactccgacggcacggggaaccccgacaccggcgccgacttcggcggcgcgccggacatcgaccacctgaacccgcgcgtccagcaggagctcaccggctggctcaactggctcaagacggacgtcggcttcgacgcgtggcgcctcgacttcgccaagggctactccgccgacgtcgccaaggtctacatcgacggcacccagccctgcttcgccgtcgccgagatatggacctcgctggcctacggcggcgacggcaagcccttctacgaccagaacgcgcaccggcaggagctggtgagctggctggaccgcgtcggcggcaaggccagcccggccaccacgttcgacttcaccaccaagggcatcctcaacgtggccgtcgacggcgagctgtggcggctgcgcggcgctgacggcaaggcacccggtttgatcgggtggtggccggccaaggccgtcaccttcgtcgacaaccacgacactggctccacgcagcacatgtggccgttccccgccgacaaggtcatgcagggctacgcctacatcctcacgcaccccgggaacccatccatcttctacgatcacttcttcgactggggcctcaagaacgagatcgcgcacctggtgtccatcagggaccgccacgggatccaggcggacagtgagctgcgcatcatcgaggccgacgccgacctctacctcgctgagatcgacggcaaggtcatcgtgaagattggatcaagatacgactgcgggcacctcatcccagaaggcttccaggtcgtggcgcacggagatggctatgccgtctgggagaaaaactgagccaaatctgtgcctgatccgtccgtccggtccggcacgacgagttttagcggatttgacctgcattttccttagcttattattactccaaatacgggatatatatagcgacaacctgtattcgagatacatgcgtgcccccagggacgcggaaaaagaaagagaagcacgcgtgtcaggacagccgaaagaagaacttgtgaagattattttttcccct

SEQ ID NO: 6888 - protein, 449 aa, Zea mays subsp. mays
  peptide (1)..(449): Ceres Seq. ID no. 12369121
  misc_feature (17)..(448): Homolog of NCBI NO: 100654 NR Description: alpha-amylase (EC 3.2.1.1) precursor (clone
  misc_feature (22)..(448): Homolog of NCBI NO: 113766 NR Description: ALPHA-AMYLASE PRECURSOR (1,4-ALPHA-D-GLUCAN
  misc_feature (22)..(448): Homolog of NCBI NO: 2851583 NR Description: Alpha-amylase type B isozyme precursor
  misc_feature (22)..(448): Homolog of NCBI NO: 166985 NR Description: alpha-amylase
  misc_feature (22)..(448): Homolog of NCBI NO: 295804 NR Description: alpha-amylase [Hordeum vulgare]
  misc_feature (22)..(448): Homolog of NCBI NO: 166977 NR Description: alpha-amylase 1
  misc_feature (22)..(448): Homolog of NCBI NO: 113778 NR Description: ALPHA-AMYLASE TYPE B ISOZYME PRECURSOR
  misc_feature (22)..(448): Homolog of NCBI NO: 166979 NR Description: alpha-amylase 1
  misc_feature (46)..(448): Homolog of NCBI NO: 1065365 NR Description: Alpha-1,4 Glycan-4-Glucanohydrolase
  misc_feature (28)..(449): Homolog of NCBI NO: 3549648 NR Description: alpha amylase [Avena fatua]
PAIDSPPVHRHSSRKRQELKNMANRGLHLALFLVLLGLSSNLAAGQILFQGFNWESWKQNGGWYNFLMGKVDDIAEAGITHVWLPPASHSLAEQGYLPGRLYDLDASKYGNEAQLKSLIEAFHSKGVKVIADIVINHRTAEHQDGRGIYCIFEGGTPDSRLDWGPHMICSDDRAYSDGTGNPDTGADFGGAPDIDHLNPRVQQELTGWLNWLKTDVGFDAWRLDFAKGYSADVAKVYIDGTQPCFAVAEIWTSLAYGGDGKPFYDQNAHRQELVSWLDRVGGKASPATTFDFTTKGILNVAVDGELWRLRGADGKAPGLIGWWPAKAVTFVDNHDTGSTQHMWPFPADKVMQGYAYILTHPGNPSIFYDHFFDWGLKNEIAHLVSIRDRHGIQADSELRIIEADADLYLAEIDGKVIVKIGSRYDCGHLIPEGFQVVAHGDGYAVWEKN

SEQ ID NO: 6889 - protein, 428 aa, Zea mays subsp. mays
  peptide (1)..(428): Ceres Seq. ID no. 12369122
  misc_feature (1)..(427): Homolog of NCBI NO: 100654 NR Description: alpha-amylase (EC 3.2.1.1) precursor (clone
  misc_feature (1)..(427): Homolog of NCBI NO: 113766 NR Description: ALPHA-AMYLASE PRECURSOR (1,4-ALPHA-D-GLUCAN
  misc_feature (1)..(427): Homolog of NCBI NO: 2851583 NR Description: Alpha-amylase type B isozyme precursor
  misc_feature (1)..(427): Homolog of NCBI NO: 166985 NR Description: alpha-amylase
  misc_feature (1)..(427): Homolog of NCBI NO: 295804 NR Description: alpha-amylase [Hordeum vulgare]
  misc_feature (1)..(427): Homolog of NCBI NO: 166977 NR Description: alpha-amylase 1
  misc_feature (1)..(427): Homolog of NCBI NO: 113778 NR Description: ALPHA-AMYLASE TYPE B ISOZYME PRECURSOR
  misc_feature (1)..(427): Homolog of NCBI NO: 166979 NR Description: alpha-amylase 1
  misc_feature (25)..(427): Homolog of NCBI NO: 1065365 NR Description: Alpha-1,4 Glycan-4-Glucanohydrolase
  misc_feature (7)..(428): Homolog of NCBI NO: 3549648 NR Description: alpha amylase [Avena fatua]
MANRGLHLALFLVLLGLSSNLAAGQILFQGFNWESWKQNGGWYNFLMGKVDDIAEAGITHVWLPPASHSLAEQGYLPGRLYDLDASKYGNEAQLKSLIEAFHSKGVKVIADIVINHRTAEHQDGRGIYCIFEGGTPDSRLDWGPHMICSDDRAYSDGTGNPDTGADFGGAPDIDHLNPRVQQELTGWLNWLKTDVGFDAWRLDFAKGYSADVAKVYIDGTQPCFAVAEIWTSLAYGGDGKPFYDQNAHRQELVSWLDRVGGKASPATTFDFTTKGILNVAVDGELWRLRGADGKAPGLIGWWPAKAVTFVDNHDTGSTQHMWPFPADKVMQGYAYILTHPGNPSIFYDHFFDWGLKNEIAHLVSIRDRHGIQADSELRIIEADADLYLAEIDGKVIVKIGSRYDCGHLIPEGFQVVAHGDGYAVWEKN

SEQ ID NO: 6890 - protein, 382 aa, Zea mays subsp. mays
  peptide (1)..(382): Ceres Seq. ID no. 12369123
  misc_feature (1)..(381): Homolog of NCBI NO: 100654 NR Description: alpha-amylase (EC 3.2.1.1) precursor (clone
  misc_feature (1)..(381): Homolog of NCBI NO: 113766 NR Description: ALPHA-AMYLASE PRECURSOR (1,4-ALPHA-D-GLUCAN
  misc_feature (1)..(381): Homolog of NCBI NO: 2851583 NR Description: Alpha-amylase type B isozyme precursor
  misc_feature (1)..(381): Homolog of NCBI NO: 166985 NR Description: alpha-amylase
  misc_feature (1)..(381): Homolog of NCBI NO: 295804 NR Description: alpha-amylase [Hordeum vulgare]
  misc_feature (1)..(381): Homolog of NCBI NO: 166977 NR Description: alpha-amylase 1
  misc_feature (1)..(381): Homolog of NCBI NO: 113778 NR Description: ALPHA-AMYLASE TYPE B ISOZYME PRECURSOR
  misc_feature (1)..(381): Homolog of NCBI NO: 166979 NR Description: alpha-amylase 1
  misc_feature (1)..(381): Homolog of NCBI NO: 1065365 NR Description: Alpha-1,4 Glycan-4-Glucanohydrolase
  misc_feature (1)..(382): Homolog of NCBI NO: 3549648 NR Description: alpha amylase [Avena fatua]
MGKVDDIAEAGITHVWLPPASHSLAEQGYLPGRLYDLDASKYGNEAQLKSLIEAFHSKGVKVIADIVINHRTAEHQDGRGIYCIFEGGTPDSRLDWGPHMICSDDRAYSDGTGNPDTGADFGGAPDIDHLNPRVQQELTGWLNWLKTDVGFDAWRLDFAKGYSADVAKVYIDGTQPCFAVAEIWTSLAYGGDGKPFYDQNAHRQELVSWLDRVGGKASPATTFDFTTKGILNVAVDGELWRLRGADGKAPGLIGWWPAKAVTFVDNHDTGSTQHMWPFPADKVMQGYAYILTHPGNPSIFYDHFFDWGLKNEIAHLVSIRDRHGIQADSELRIIEADADLYLAEIDGKVIVKIGSRYDCGHLIPEGFQVVAHGDGYAVWEKN

SEQ ID NO: 6891 - DNA, 1304 bp, Zea mays subsp. mays
  misc_feature (1)..(1304): Ceres Seq. ID no. 12358154
  misc_feature: MA Experiment ID: 108504 Result: Up-regulated in Transcription
  misc_feature: MA Experiment 108504 PARAMETER Experiment Name: Zm_Drought_P Parameter: Age (day) Value: 8
  misc_feature: MA Experiment 108504 PARAMETER Experiment Name: Zm_Drought_P Parameter: Organism Value: Zea mays
  misc_feature: MA Experiment 108504 PARAMETER Experiment Name: Zm_Drought_P Parameter: Plant Line Value: 35A19
  misc_feature: MA Experiment 108504 PARAMETER Experiment Name: Zm_Drought_P Parameter: Timepoint (hr) Value: 12
  misc_feature: MA Experiment 108504 PARAMETER Experiment Name: Zm_Drought_P Parameter: Tissue Value: Aerial
  misc_feature: MA Experiment 108504 PARAMETER Experiment Name: Zm_Drought_P Parameter: Treatment Value: Drought vs. No Drought
  misc_feature: MA Experiment ID: 108527 Result: Up-regulated in Transcription
  misc_feature: MA Experiment 108527 PARAMETER Experiment Name: Zm_5mM_NO_P Parameter: Age (day) Value: 8
  misc_feature: MA Experiment 108527 PARAMETER Experiment Name: Zm_5mM_NO_P Parameter: Organism Value: Zea mays
  misc_feature: MA Experiment 108527 PARAMETER Experiment Name: Zm_5mM_NO_P Parameter: Plant Line Value: 35A19
  misc_feature: MA Experiment 108527 PARAMETER Experiment Name: Zm_5mM_NO_P Parameter: Timepoint (hr) Value: 6
  misc_feature: MA Experiment 108527 PARAMETER Experiment Name: Zm_5mM_NO_P Parameter: Tissue Value: Aerial
  misc_feature: MA Experiment 108527 PARAMETER Experiment Name: Zm_5mM_NO_P Parameter: Treatment Value: 5mM NO vs. No Treatment
  misc_feature: MA Experiment ID: 108533 Result: Down-regulated in Transcription
  misc_feature: MA Experiment 108533 PARAMETER Experiment Name: Zm_4deg_Cold_P Parameter: Age (hr) Value: 8
  misc_feature: MA Experiment 108533 PARAMETER Experiment Name: Zm_4deg_Cold_P Parameter: Organism Value: Zea mays
  misc_feature: MA Experiment 108533 PARAMETER Experiment Name: Zm_4deg_Cold_P Parameter: Plant Line Value: 35A19
  misc_feature: MA Experiment 108533 PARAMETER Experiment Name: Zm_4deg_Cold_P Parameter: Temperature (deg C) Value: 4 vs. 22
  misc_feature: MA Experiment 108533 PARAMETER Experiment Name: Zm_4deg_Cold_P Parameter: Timepoint (hr) Value: 1
  misc_feature: MA Experiment 108533 PARAMETER Experiment Name: Zm_4deg_Cold_P Parameter: Tissue Value: Aerial
  misc_feature: MA Experiment ID: 108534 Result: Down-regulated in Transcription
  misc_feature: MA Experiment 108534 PARAMETER Experiment Name: Zm_4deg_Cold_P Parameter: Age (hr) Value: 8
  misc_feature: MA Experiment 108534 PARAMETER Experiment Name: Zm_4deg_Cold_P Parameter: Organism Value: Zea mays
  misc_feature: MA Experiment 108534 PARAMETER Experiment Name: Zm_4deg_Cold_P Parameter: Plant Line Value: 35A19
  misc_feature: MA Experiment 108534 PARAMETER Experiment Name: Zm_4deg_Cold_P Parameter: Temperature (deg C) Value: 4 vs. 22
  misc_feature: MA Experiment 108534 PARAMETER Experiment Name: Zm_4deg_Cold_P Parameter: Timepoint (hr) Value: 6
  misc_feature: MA Experiment 108534 PARAMETER Experiment Name: Zm_4deg_Cold_P Parameter: Tissue Value: Aerial
  misc_feature: MA Experiment ID: 108540 Result: Up-regulated in Transcription
  misc_feature: MA Experiment 108540 PARAMETER Experiment Name: Zm_20percent_PEG_P Parameter: Age (day) Value: 8
  misc_feature: MA Experiment 108540 PARAMETER Experiment Name: Zm_20percent_PEG_P Parameter: Organism Value: Zea mays
  misc_feature: MA Experiment 108540 PARAMETER Experiment Name: Zm_20percent_PEG_P Parameter: Plant Line Value: 35A19
  misc_feature: MA Experiment 108540 PARAMETER Experiment Name: Zm_20percent_PEG_P Parameter: Timepoint (hr) Value: 6
  misc_feature: MA Experiment 108540 PARAMETER Experiment Name: Zm_20percent_PEG_P Parameter: Tissue Value: Aerial
  misc_feature: MA Experiment 108540 PARAMETER Experiment Name: Zm_20percent_PEG_P Parameter: Treatment Value: 20percent PEG vs. No Treatment
  misc_feature: MA Experiment ID: 108542 Result: Up-regulated in Transcription
  misc_feature: MA Experiment 108542 PARAMETER Experiment Name: Zm_150mM_NaCl_P Parameter: Age (day) Value: 8
  misc_feature: MA Experiment 108542 PARAMETER Experiment Name: Zm_150mM_NaCl_P Parameter: Organism Value: Zea mays
  misc_feature: MA Experiment 108542 PARAMETER Experiment Name: Zm_150mM_NaCl_P Parameter: Plant Line Value: 35A19
  misc_feature: MA Experiment 108542 PARAMETER Experiment Name: Zm_150mM_NaCl_P Parameter: Timepoint (hr) Value: 6
  misc_feature: MA Experiment 108542 PARAMETER Experiment Name: Zm_150mM_NaCl_P Parameter: Tissue Value: Aerial
  misc_feature: MA Experiment 108542 PARAMETER Experiment Name: Zm_150mM_NaCl_P Parameter: Treatment Value: 150mM NaCl vs. No Treatment
  misc_feature: MA Experiment ID: 108543 Result: Down-regulated in Transcription
  misc_feature: MA Experiment ID: 108556 Result: Up-regulated in Transcription
  misc_feature: MA Experiment 108556 PARAMETER Experiment Name: Zm_Drought_P Parameter: Age (day) Value: 9
  misc_feature: MA Experiment 108556 PARAMETER Experiment Name: Zm_Drought_P Parameter: Organism Value: Zea mays
  misc_feature: MA Experiment 108556 PARAMETER Experiment Name: Zm_Drought_P Parameter: Plant Line Value: 35A19
  misc_feature: MA Experiment 108556 PARAMETER Experiment Name: Zm_Drought_P Parameter: Timepoint (hr) Value: 24
  misc_feature: MA Experiment 108556 PARAMETER Experiment Name: Zm_Drought_P Parameter: Tissue Value: Aerial
  misc_feature: MA Experiment 108556 PARAMETER Experiment Name: Zm_Drought_P Parameter: Treatment Value: Drought vs. No Drought
  misc_feature: MA Experiment ID: 108559 Result: Up-regulated in Transcription
  misc_feature: MA Experiment 108559 PARAMETER Experiment Name: Zm_5mM_NO_P Parameter: Age (day) Value: 8
  misc_feature: MA Experiment 108559 PARAMETER Experiment Name: Zm_5mM_NO_P Parameter: Organism Value: Zea mays
  misc_feature: MA Experiment 108559 PARAMETER Experiment Name: Zm_5mM_NO_P Parameter: Plant Line Value: 35A19
  misc_feature: MA Experiment 108559 PARAMETER Experiment Name: Zm_5mM_NO_P Parameter: Timepoint (hr) Value: 12
  misc_feature: MA Experiment 108559 PARAMETER Experiment Name: Zm_5mM_NO_P Parameter: Tissue Value: Aerial
  misc_feature: MA Experiment 108559 PARAMETER Experiment Name: Zm_5mM_NO_P Parameter: Treatment Value: 5mM NO vs. No Treatment
  misc_feature: MA Experiment ID: 20000477 Result: Up-regulated in Transcription
  misc_feature: MA Experiment 20000477 PARAMETER Experiment Name: Zm_5mM_SA_P Parameter: Age (day) Value: 10
  misc_feature: MA Experiment 20000477 PARAMETER Experiment Name: Zm_5mM_SA_P Parameter: Organism Value: Zea mays
  misc_feature: MA Experiment 20000477 PARAMETER Experiment Name: Zm_5mM_SA_P Parameter: Plant Line Value: 35A19
  misc_feature: MA Experiment 20000477 PARAMETER Experiment Name: Zm_5mM_SA_P Parameter: Timepoint (hr) Value: 48
  misc_feature: MA Experiment 20000477 PARAMETER Experiment Name: Zm_5mM_SA_P Parameter: Tissue Value: Aerial
  misc_feature: MA Experiment 20000477 PARAMETER Experiment Name: Zm_5mM_SA_P Parameter: Treatment Value: 5mM SA vs. No Treatment
  misc_feature: MA Experiment ID: 20000478 Result: Up-regulated in Transcription
  misc_feature: MA Experiment 20000478 PARAMETER Experiment Name: Zm_5mM_SA_P Parameter: Age (day) Value: 11
  misc_feature: MA Experiment 20000478 PARAMETER Experiment Name: Zm_5mM_SA_P Parameter: Organism Value: Zea mays
  misc_feature: MA Experiment 20000478 PARAMETER Experiment Name: Zm_5mM_SA_P Parameter: Plant Line Value: 35A19
  misc_feature: MA Experiment 20000478 PARAMETER Experiment Name: Zm_5mM_SA_P Parameter: Timepoint (hr) Value: 72
  misc_feature: MA Experiment 20000478 PARAMETER Experiment Name: Zm_5mM_SA_P Parameter: Tissue Value: Aerial
  misc_feature: MA Experiment 20000478 PARAMETER Experiment Name: Zm_5mM_SA_P Parameter: Treatment Value: 5mM SA vs. No Treatment
  misc_feature: MA Experiment ID: 20000479 Result: Up-regulated in Transcription
  misc_feature: MA Experiment 20000479 PARAMETER Experiment Name: Zm_Drought_P Parameter: Age (day) Value: 10
  misc_feature: MA Experiment 20000479 PARAMETER Experiment Name: Zm_Drought_P Parameter: Organism Value: Zea mays
  misc_feature: MA Experiment 20000479 PARAMETER Experiment Name: Zm_Drought_P Parameter: Plant Line Value: 35A19
  misc_feature: MA Experiment 20000479 PARAMETER Experiment Name: Zm_Drought_P Parameter: Timepoint (hr) Value: 48
  misc_feature: MA Experiment 20000479 PARAMETER Experiment Name: Zm_Drought_P Parameter: Tissue Value: Aerial
  misc_feature: MA Experiment 20000479 PARAMETER Experiment Name: Zm_Drought_P Parameter: Treatment Value: Drought vs. No Drought
  misc_feature: MA Experiment ID: 20000480 Result: Up-regulated in Transcription
  misc_feature: MA Experiment 20000480 PARAMETER Experiment Name: Zm_Drought_P Parameter: Age (day) Value: 11
  misc_feature: MA Experiment 20000480 PARAMETER Experiment Name: Zm_Drought_P Parameter: Organism Value: Zea mays
  misc_feature: MA Experiment 20000480 PARAMETER Experiment Name: Zm_Drought_P Parameter: Plant Line Value: 35A19
  misc_feature: MA Experiment 20000480 PARAMETER Experiment Name: Zm_Drought_P Parameter: Timepoint (hr) Value: 72
  misc_feature: MA Experiment 20000480 PARAMETER Experiment Name: Zm_Drought_P Parameter: Tissue Value: Aerial
  misc_feature: MA Experiment 20000480 PARAMETER Experiment Name: Zm_Drought_P Parameter: Treatment Value: Drought vs. No Drought
  misc_feature: MA Experiment ID: 20000487 Result: Up-regulated in Transcription
  misc_feature: MA Experiment 20000487 PARAMETER Experiment Name: Zm_50mM_NH4NO3_L_to_H_P Parameter: Organism Value: Zea mays
  misc_feature: MA Experiment 20000487 PARAMETER Experiment Name: Zm_50mM_NH4NO3_L_to_H_P Parameter: Timepoint (hr) Value: 4
  misc_feature: MA Experiment 20000487 PARAMETER Experiment Name: Zm_50mM_NH4NO3_L_to_H_P Parameter: Tissue Value: Leaves
  misc_feature: MA Experiment 20000487 PARAMETER Experiment Name: Zm_50mM_NH4NO3_L_to_H_P Parameter: Treatment Value: 50mM NH4NO3 vs. 100mM Mannitol
  misc_feature: MA Experiment ID: 20000492 Result: Down-regulated in Transcription
  misc_feature: MA Experiment 20000492 PARAMETER Experiment Name: Zm_Hybrid_Seed_Dev_P Parameter: DAP Value: 12
  misc_feature: MA Experiment 20000492 PARAMETER Experiment Name: Zm_Hybrid_Seed_Dev_P Parameter: Organism Value: Zea mays
  misc_feature: MA Experiment 20000492 PARAMETER Experiment Name: Zm_Hybrid_Seed_Dev_P Parameter: Plant Line Value: 35A19
  misc_feature: MA Experiment 20000492 PARAMETER Experiment Name: Zm_Hybrid_Seed_Dev_P Parameter: Tissue Value: Fert Kernel vs. Unfert Floret
  misc_feature: MA Experiment ID: 20000629 Result: Down-regulated in Transcription
  misc_feature: MA Experiment 20000629 PARAMETER Experiment Name: Zm_Herbicide-Treatments_P Parameter: Timepoint (hr) Value: 12
  misc_feature: MA Experiment 20000629 PARAMETER Experiment Name: Zm_Herbicide-Treatments_P Parameter: Tissue Value: Aerial
  misc_feature: MA Experiment 20000629 PARAMETER Experiment Name: Zm_Herbicide-Treatments_P Parameter: Treatment Value: Trimec vs. No Treatment
  misc_feature: MA Experiment ID: 20001608 Result: Up-regulated in Transcription
  misc_feature: MA Experiment 20001608 PARAMETER Experiment Name: Zm_50ppm_KNO3_L-to-H_P Parameter: Age (day) Value: 21
  misc_feature: MA Experiment 20001608 PARAMETER Experiment Name: Zm_50ppm_KNO3_L-to-H_P Parameter: Organism Value: Zea mays
  misc_feature: MA Experiment 20001608 PARAMETER Experiment Name: Zm_50ppm_KNO3_L-to-H_P Parameter: Plant Line Value: 35A19
  misc_feature: MA Experiment 20001608 PARAMETER Experiment Name: Zm_50ppm_KNO3_L-to-H_P Parameter: Timepoint (hr) Value: 48
  misc_feature: MA Experiment 20001608 PARAMETER Experiment Name: Zm_50ppm_KNO3_L-to-H_P Parameter: Tissue Value: Shoots
  misc_feature: MA Experiment 20001608 PARAMETER Experiment Name: Zm_50ppm_KNO3_L-to-H_P Parameter: Treatment Value: 50ppm KNO3 vs. 50ppm KCl
attttcgtcagctctcctggcgcccggtggctcgccggcgcaaattaagtaattaacccgaactccctggcattctccgcgggcctgtagtcttgtagcctatcgcttgcttcgccgtagcacttgcttaattagggcggtgttcgagaggtgggtgtggtggtgtactggtgtactagtactactcgcctcgcctcgcctcgcctcgagggtttgtttgactggcggaggcaggagctgcggcggtccgggagcgcatggggaacgcgaacgccaaggagggggagaacggccacatggcggcgtctcctgagccggcggctcccaacggcggcggaggaagcagcagctcggcgggaggcgctgccgcgcgacctccaccgttgtcgccgccagacgacgtgatgctggagcgtccaccgcccgtgccctatctcttcgtgccgcaggttccagagactccactgcacagacctactgagctctctcctcttctcaaccattcaccggtaaacgaatccaccgaccaccactcccaggatcagggtattccaactctgattacatggagccaaggaggagatgaggtgttcctggaaggatcgtgggataactggacatcgaggagggcacttgagagatctggaaaagatcacgccgtcttgttggttctgccatccggagtctaccattaccggatcatcgtggacggggagctgaggtacatccctgaactacctcacgcagctgacgaaagagggcgagtggccaacgtcctcgatgtccatgactacgtgccagaaagcctcgacagcgtagccgagttcgaagcgcccccgtctcccgtgcacagctacgacctgcattgcccgggcgacgaggagttcgccaaggagccgcccacgctcccgccccagcttctcgtgtccgtcctcgggggggacgtcgatagcgctggccatggcaatcaagctttgaagccacagcacgtcgtcctcgaccacctgttcatcgagaaagggtgggggtcgcagtcgctgctcgccctcggcgtcacccaccggtttgagtccaagtacgtgagctttgtgctctacaagccgttggagaggtgatggtggtactgtctactagctgtgtgtgagtggaagaacagagtggactgctggaggtgaataatgtgtgtgtgtgcccttgtatagaagggaaatgcatgcaggagcttgtagctgtagctgatcttttattttatttttttattttcctttcactttcgacgaaagtaataaattagttgaccatgc

SEQ ID NO: 6892 - protein, 285 aa, Zea mays subsp. mays
  peptide (1)..(285): Ceres Seq. ID no. 12358155
  misc_feature (0)..(0): Pfam Name: 5'-AMP-activated protein kinase, beta subunit, Pfam Description: 5'-AMP-activated protein kinase, beta subunit,
  misc_feature (1)..(285): Homolog of NCBI NO: 6686782 NR Description: AKIN gamma [Arabidopsis thaliana]
  misc_feature (1)..(285): Homolog of NCBI NO: 15242175 NR Description: AKIN beta1; protein id: At5g21170.1, supported by
  misc_feature (1)..(285): Homolog of NCBI NO: 5702015 NR Description: GAL83 protein [Solanum tuberosum]
  misc_feature (1)..(285): Homolog of NCBI NO: 32364486 NR Description: AKIN beta1 [Medicago truncatula]
  misc_feature (1)..(285): Homolog of NCBI NO: 6686784 NR Description: AKIN beta2 [Arabidopsis thaliana]
  misc_feature (9)..(285): Homolog of NCBI NO: 22324436 NR Description: AKIN beta1-like protein [Oryza sativa (japonica
  misc_feature (30)..(285): Homolog of NCBI NO: 15234895 NR Description: kinase like protein; protein id: At4g16360.1
  misc_feature (1)..(285): Homolog of NCBI NO: 32364488 NR Description: AKIN beta2 [Medicago truncatula]
  misc_feature (45)..(243): Homolog of NCBI NO: 29725558 NR Description: SNF1 kinase complex anchoring protein
  misc_feature (60)..(285): Homolog of NCBI NO: 11935162 NR Description: SNF1-related kinase complex anchoring protein
MGNANAKEGENGHMAASPEPAAPNGGGGSSSSAGGAAARPPPLSPPDDVMLERPPPVPYLFVPQVPETPLHRPTELSPLLNHSPVNESTDHHSQDQGIPTLITWSQGGDEVFLEGSWDNWTSRRALERSGKDHAVLLVLPSGVYHYRIIVDGELRYIPELPHAADERGRVANVLDVHDYVPESLDSVAEFEAPPSPVHSYDLHCPGDEEFAKEPPTLPPQLLVSVLGGDVDSAGHGNQALKPQHVVLDHLFIEKGWGSQSLLALGVTHRFESKYVSFVLYKPLER

SEQ ID NO: 6893 - protein, 272 aa, Zea mays subsp. mays
  peptide (1)..(272): Ceres Seq. ID no. 12358156
  misc_feature (0)..(0): Pfam Name: 5'-AMP-activated protein kinase, beta subunit, Pfam Description: 5'-AMP-activated protein kinase, beta subunit,
  misc_feature (1)..(272): Homolog of NCBI NO: 6686782 NR Description: AKIN gamma [Arabidopsis thaliana]
  misc_feature (1)..(272): Homolog of NCBI NO: 15242175 NR Description: AKIN beta1; protein id: At5g21170.1, supported by
  misc_feature (1)..(272): Homolog of NCBI NO: 5702015 NR Description: GAL83 protein [Solanum tuberosum]
  misc_feature (1)..(272): Homolog of NCBI NO: 32364486 NR Description: AKIN beta1 [Medicago truncatula]
  misc_feature (1)..(272): Homolog of NCBI NO: 6686784 NR Description: AKIN beta2 [Arabidopsis thaliana]
  misc_feature (1)..(272): Homolog of NCBI NO: 22324436 NR Description: AKIN beta1-like protein [Oryza sativa (japonica
  misc_feature (17)..(272): Homolog of NCBI NO: 15234895 NR Description: kinase like protein; protein id: At4g16360.1
  misc_feature (1)..(272): Homolog of NCBI NO: 32364488 NR Description: AKIN beta2 [Medicago truncatula]
  misc_feature (32)..(230): Homolog of NCBI NO: 29725558 NR Description: SNF1 kinase complex anchoring protein
  misc_feature (47)..(272): Homolog of NCBI NO: 11935162 NR Description: SNF1-related kinase complex anchoring protein
MAASPEPAAPNGGGGSSSSAGGAAARPPPLSPPDDVMLERPPPVPYLFVPQVPETPLHRPTELSPLLNHSPVNESTDHHSQDQGIPTLITWSQGGDEVFLEGSWDNWTSRRALERSGKDHAVLLVLPSGVYHYRIIVDGELRYIPELPHAADERGRVANVLDVHDYVPESLDSVAEFEAPPSPVHSYDLHCPGDEEFAKEPPTLPPQLLVSVLGGDVDSAGHGNQALKPQHVVLDHLFIEKGWGSQSLLALGVTHRFESKYVSFVLYKPLER

SEQ ID NO: 6894 - protein, 236 aa, Zea mays subsp. mays
  peptide (1)..(236): Ceres Seq. ID no. 12358157
  misc_feature (0)..(0): Pfam Name: 5'-AMP-activated protein kinase, beta subunit, Pfam Description: 5'-AMP-activated protein kinase, beta subunit,
  misc_feature (1)..(236): Homolog of NCBI NO: 6686782 NR Description: AKIN gamma [Arabidopsis thaliana]
  misc_feature (1)..(236): Homolog of NCBI NO: 15242175 NR Description: AKIN beta1; protein id: At5g21170.1, supported by
  misc_feature (1)..(236): Homolog of NCBI NO: 5702015 NR Description: GAL83 protein [Solanum tuberosum]
  misc_feature (1)..(236): Homolog of NCBI NO: 32364486 NR Description: AKIN beta1 [Medicago truncatula]
  misc_feature (1)..(236): Homolog of NCBI NO: 6686784 NR Description: AKIN beta2 [Arabidopsis thaliana]
  misc_feature (1)..(236): Homolog of NCBI NO: 22324436 NR Description: AKIN beta1-like protein [Oryza sativa (japonica
  misc_feature (1)..(236): Homolog of NCBI NO: 15234895 NR Description: kinase like protein; protein id: At4g16360.1
  misc_feature (1)..(236): Homolog of NCBI NO: 32364488 NR Description: AKIN beta2 [Medicago truncatula]
  misc_feature (1)..(194): Homolog of NCBI NO: 29725558 NR Description: SNF1 kinase complex anchoring protein
  misc_feature (11)..(236): Homolog of NCBI NO: 11935162 NR Description: SNF1-related kinase complex anchoring protein
MLERPPPVPYLFVPQVPETPLHRPTELSPLLNHSPVNESTDHHSQDQGIPTLITWSQGGDEVFLEGSWDNWTSRRALERSGKDHAVLLVLPSGVYHYRIIVDGELRYIPELPHAADERGRVANVLDVHDYVPESLDSVAEFEAPPSPVHSYDLHCPGDEEFAKEPPTLPPQLLVSVLGGDVDSAGHGNQALKPQHVVLDHLFIEKGWGSQSLLALGVTHRFESKYVSFVLYKPLER

SEQ ID NO: 6895 - DNA, 1704 bp, Zea mays subsp. mays
  misc_feature (1)..(1704): Ceres Seq. ID no. 12348030
  misc_feature: MA Experiment ID: 108535 Result: Down-regulated in Transcription
  misc_feature: MA Experiment 108535 PARAMETER Experiment Name: Zm_Meristem_P Parameter: Age (day) Value: 8
  misc_feature: MA Experiment 108535 PARAMETER Experiment Name: Zm_Meristem_P Parameter: Organism Value: Zea mays
  misc_feature: MA Experiment 108535 PARAMETER Experiment Name: Zm_Meristem_P Parameter: Plant Line Value: 35A19
  misc_feature: MA Experiment 108535 PARAMETER Experiment Name: Zm_Meristem_P Parameter: Tissue Value: Root Meristem vs. Above Root Meristem
  misc_feature: MA Experiment ID: 108543 Result: Up-regulated in Transcription
  misc_feature: MA Experiment ID: 108559 Result: Down-regulated in Transcription
  misc_feature: MA Experiment 108559 PARAMETER Experiment Name: Zm_5mM_NO_P Parameter: Age (day) Value: 8
  misc_feature: MA Experiment 108559 PARAMETER Experiment Name: Zm_5mM_NO_P Parameter: Organism Value: Zea mays
  misc_feature: MA Experiment 108559 PARAMETER Experiment Name: Zm_5mM_NO_P Parameter: Plant Line Value: 35A19
  misc_feature: MA Experiment 108559 PARAMETER Experiment Name: Zm_5mM_NO_P Parameter: Timepoint (hr) Value: 12
  misc_feature: MA Experiment 108559 PARAMETER Experiment Name: Zm_5mM_NO_P Parameter: Tissue Value: Aerial
  misc_feature: MA Experiment 108559 PARAMETER Experiment Name: Zm_5mM_NO_P Parameter: Treatment Value: 5mM NO vs. No Treatment
  misc_feature: MA Experiment ID: 20000108 Result: Down-regulated in Transcription
  misc_feature: MA Experiment 20000108 PARAMETER Experiment Name: Zm_Root-Tips_P Parameter: Age (day) Value: 12
  misc_feature: MA Experiment 20000108 PARAMETER Experiment Name: Zm_Root-Tips_P Parameter: Organism Value: Zea mays
  misc_feature: MA Experiment 20000108 PARAMETER Experiment Name: Zm_Root-Tips_P Parameter: Tissue Value: Root tips vs. Root mid region    35
  misc_feature: MA Experiment 20000108 PARAMETER Experiment Name: Zm_Root-Tips_P Parameter: Tissue Value: Root tips vs. Root mid region   Sequence Listing-Misc Features (4)
  misc_feature: MA Experiment ID: 20000477 Result: Down-regulated in Transcription
  misc_feature: MA Experiment 20000477 PARAMETER Experiment Name: Zm_5mM_SA_P Parameter: Age (day) Value: 10
  misc_feature: MA Experiment 20000477 PARAMETER Experiment Name: Zm_5mM_SA_P Parameter: Organism Value: Zea mays
  misc_feature: MA Experiment 20000477 PARAMETER Experiment Name: Zm_5mM_SA_P Parameter: Plant Line Value: 35A19
  misc_feature: MA Experiment 20000477 PARAMETER Experiment Name: Zm_5mM_SA_P Parameter: Timepoint (hr) Value: 48
  misc_feature: MA Experiment 20000477 PARAMETER Experiment Name: Zm_5mM_SA_P Parameter: Tissue Value: Aerial
  misc_feature: MA Experiment 20000477 PARAMETER Experiment Name: Zm_5mM_SA_P Parameter: Treatment Value: 5mM SA vs. No Treatment
  misc_feature: MA Experiment ID: 20000478 Result: Down-regulated in Transcription
  misc_feature: MA Experiment 20000478 PARAMETER Experiment Name: Zm_5mM_SA_P Parameter: Age (day) Value: 11
  misc_feature: MA Experiment 20000478 PARAMETER Experiment Name: Zm_5mM_SA_P Parameter: Organism Value: Zea mays
  misc_feature: MA Experiment 20000478 PARAMETER Experiment Name: Zm_5mM_SA_P Parameter: Plant Line Value: 35A19
  misc_feature: MA Experiment 20000478 PARAMETER Experiment Name: Zm_5mM_SA_P Parameter: Timepoint (hr) Value: 72
  misc_feature: MA Experiment 20000478 PARAMETER Experiment Name: Zm_5mM_SA_P Parameter: Tissue Value: Aerial
  misc_feature: MA Experiment 20000478 PARAMETER Experiment Name: Zm_5mM_SA_P Parameter: Treatment Value: 5mM SA vs. No Treatment
  misc_feature: MA Experiment ID: 20000492 Result: Down-regulated in Transcription
  misc_feature: MA Experiment 20000492 PARAMETER Experiment Name: Zm_Hybrid_Seed_Dev_P Parameter: DAP Value: 12
  misc_feature: MA Experiment 20000492 PARAMETER Experiment Name: Zm_Hybrid_Seed_Dev_P Parameter: Organism Value: Zea mays
  misc_feature: MA Experiment 20000492 PARAMETER Experiment Name: Zm_Hybrid_Seed_Dev_P Parameter: Plant Line Value: 35A19
  misc_feature: MA Experiment 20000492 PARAMETER Experiment Name: Zm_Hybrid_Seed_Dev_P Parameter: Tissue Value: Fert Kernel vs. Unfert Floret
  misc_feature: MA Experiment ID: 20000535 Result: Down-regulated in Transcription
  misc_feature: MA Experiment 20000535 PARAMETER Experiment Name: Zm_Hybrid_Seed_Dev_P Parameter: DAP Value: 30 vs. 12
  misc_feature: MA Experiment 20000535 PARAMETER Experiment Name: Zm_Hybrid_Seed_Dev_P Parameter: Organism Value: Zea mays
  misc_feature: MA Experiment 20000535 PARAMETER Experiment Name: Zm_Hybrid_Seed_Dev_P Parameter: Plant Line Value: 35A19
  misc_feature: MA Experiment 20000535 PARAMETER Experiment Name: Zm_Hybrid_Seed_Dev_P Parameter: Tissue Value: Embryo vs. Unfert Floret
  misc_feature: MA Experiment ID: 20001612 Result: Down-regulated in Transcription
  misc_feature: MA Experiment 20001612 PARAMETER Experiment Name: Zm_50ppm_KNO3_L-to-H_P Parameter: Age (day) Value: 19
  misc_feature: MA Experiment 20001612 PARAMETER Experiment Name: Zm_50ppm_KNO3_L-to-H_P Parameter: Organism Value: Zea mays
  misc_feature: MA Experiment 20001612 PARAMETER Experiment Name: Zm_50ppm_KNO3_L-to-H_P Parameter: Plant Line Value: 35A19
  misc_feature: MA Experiment 20001612 PARAMETER Experiment Name: Zm_50ppm_KNO3_L-to-H_P Parameter: Timepoint (hr) Value: 8
  misc_feature: MA Experiment 20001612 PARAMETER Experiment Name: Zm_50ppm_KNO3_L-to-H_P Parameter: Tissue Value: Roots
  misc_feature: MA Experiment 20001612 PARAMETER Experiment Name: Zm_50ppm_KNO3_L-to-H_P Parameter: Treatment Value: 50ppm KNO3 vs. 50ppm KCl
actcatctccagtctccctctccactctgcggcccggtcgatccccattccgatccatcgcacgggcagcgcccagtccggttcactcatggagtctctagtggctgcgctccccgcgggcggcgctgcggcggcggcggccttcggtgggctggtggccgctgccgcgctcgccggaaaggtcggccttgtcgggtccaagaaacacctcaacgcgcccccagctgtctctggtttacccctgattgggaatcttcatcagttgaaagagaagaaacctcaccagacctttacaaagtgggcagaaatttatgggccaatttacactataaggaccggttcttctactgtagttgtgctcaattcagcccaagtagccaaggaggcaatgattgcaaaattctcatcaatatctactcgaaagctatcgaaggcattgtcagcgctcacccgtgacaaaactatggttgctacaagtgactatggtgacttccacaaaatgattaagcgttatatcatgacattcatgttgggtacttctggccagaaacaatttagggacacaagaaacatgatggttgacaacatgttgaacactttccatacattgttgatggatgatccaaattctcctctgaacttccgggaagttttcaagaatgaattatttcgcttatccctggttcaggctttaggcgaggatgtgagttcaatctatgtggaagagtatggaaaggttatatcaaaggaggaaatctacaaggccactgtggttgacatgatgatgtgtgcaattgaggtcgactggagggatttcttcccgtacctcagctggattccaaataggaccttcgaaacaagagtactgactaccgaagcgaggagaactaccgtgatgcaagccttgatcaagcagcaaaaggaaagaattgcacgtggggagactaggatatcctacctggacttcctgctggcagagaatacactgactgatgaacaattactaatgctggtgtgggaagcagtcatagaagctgctgatactactttggtcacgaccgagtgggctatgtatgagattgcgaagcacccagaaaaacaggaatacctttatcaagaaatccaaaaagtctgcggcaataagacagttaccgaggatcacctgccagagttaccgtacttgaacgcggtgttccatgagaccatgaggcggcattctccagttccattagtgcctccaagattggtccatgagaataccaacttggctggctatgaggttccagccggcacagagataatcatcaatctgtacgggtgcaacatgaacaaaaacgactgggccgagcctgaggaatggaagccagagaggtttctggacgggaggtttgaagcagtggatatgcacaagaccatggcctttggcgcaggaaggagggcctgtgctggcagcatgcaggcgatgaacatctcgtgcaccgccatcggcaggtttgtgcaagagtttgcctggaggctcgaggaaggcgacgaggacaaggttgacaccatccagcttacaaccaacaggctttacccactgcatgtgtacctcgcacctagaggaaggaaatgagcctctactgtaaacgggtttcactgtactaatttaaaaaaataatttgctgttgcctgtgtatgacttttggatgatctctatgctgc

SEQ ID NO: 6896 - protein, 537 aa, Zea mays subsp. mays
  peptide (1)..(537): Ceres Seq. ID no. 12348031
  misc_feature (70)..(534): Homolog of NCBI NO: 15239520 NR Description: cytochrome P450 GA3; protein id: At5g25900.1, by cDNA: gi_16323134, supported by cDNA: gi_3342248 [Arabidopsis >gi|11357241|pir||T51806 cytochrome P450 kaurene oxidase PF00067,
LISSLPLHSAARSIPIPIHRTGSAQSGSLMESLVAALPAGGAAAAAAFGGLVAAAALAGKVGLVGSKKHLNAPPAVSGLPLIGNLHQLKEKKPHQTFTKWAEIYGPIYTIRTGSSTVVVLNSAQVAKEAMIAKFSSISTRKLSKALSALTRDKTMVATSDYGDFHKMIKRYIMTFMLGTSGQKQFRDTRNMMVDNMLNTFHTLLMDDPNSPLNFREVFKNELFRLSLVQALGEDVSSIYVEEYGKVISKEEIYKATVVDMMMCAIEVDWRDFFPYLSWIPNRTFETRVLTTEARRTTVMQALIKQQKERIARGETRISYLDFLLAENTLTDEQLLMLVWEAVIEAADTTLVTTEWAMYEIAKHPEKQEYLYQEIQKVCGNKTVTEDHLPELPYLNAVFHETMRRHSPVPLVPPRLVHENTNLAGYEVPAGTEIIINLYGCNMNKNDWAEPEEWKPERFLDGRFEAVDMHKTMAFGAGRRACAGSMQAMNISCTAIGRFVQEFAWRLEEGDEDKVDTIQLTTNRLYPLHVYLAPRGRK

SEQ ID NO: 6897 - protein, 508 aa, Zea mays subsp. mays
  peptide (1)..(508): Ceres Seq. ID no. 12348032
  misc_feature (41)..(505): Homolog of NCBI NO: 15239520 NR Description: cytochrome P450 GA3; protein id: At5g25900.1, by cDNA: gi_16323134, supported by cDNA: gi_3342248 [Arabidopsis >gi|11357241|pir||T51806 cytochrome P450 kaurene oxidase PF00067,
MESLVAALPAGGAAAAAAFGGLVAAAALAGKVGLVGSKKHLNAPPAVSGLPLIGNLHQLKEKKPHQTFTKWAEIYGPIYTIRTGSSTVVVLNSAQVAKEAMIAKFSSISTRKLSKALSALTRDKTMVATSDYGDFHKMIKRYIMTFMLGTSGQKQFRDTRNMMVDNMLNTFHTLLMDDPNSPLNFREVFKNELFRLSLVQALGEDVSSIYVEEYGKVISKEEIYKATVVDMMMCAIEVDWRDFFPYLSWIPNRTFETRVLTTEARRTTVMQALIKQQKERIARGETRISYLDFLLAENTLTDEQLLMLVWEAVIEAADTTLVTTEWAMYEIAKHPEKQEYLYQEIQKVCGNKTVTEDHLPELPYLNAVFHETMRRHSPVPLVPPRLVHENTNLAGYEVPAGTEIIINLYGCNMNKNDWAEPEEWKPERFLDGRFEAVDMHKTMAFGAGRRACAGSMQAMNISCTAIGRFVQEFAWRLEEGDEDKVDTIQLTTNRLYPLHVYLAPRGRK

SEQ ID NO: 6898 - protein, 408 aa, Zea mays subsp. mays
  peptide (1)..(408): Ceres Seq. ID no. 12348033
  misc_feature (1)..(405): Homolog of NCBI NO: 15239520 NR Description: cytochrome P450 GA3; protein id: At5g25900.1, by cDNA: gi_16323134, supported by cDNA: gi_3342248 [Arabidopsis >gi|11357241|pir||T51806 cytochrome P450 kaurene oxidase PF00067,
MIAKFSSISTRKLSKALSALTRDKTMVATSDYGDFHKMIKRYIMTFMLGTSGQKQFRDTRNMMVDNMLNTFHTLLMDDPNSPLNFREVFKNELFRLSLVQALGEDVSSIYVEEYGKVISKEEIYKATVVDMMMCAIEVDWRDFFPYLSWIPNRTFETRVLTTEARRTTVMQALIKQQKERIARGETRISYLDFLLAENTLTDEQLLMLVWEAVIEAADTTLVTTEWAMYEIAKHPEKQEYLYQEIQKVCGNKTVTEDHLPELPYLNAVFHETMRRHSPVPLVPPRLVHENTNLAGYEVPAGTEIIINLYGCNMNKNDWAEPEEWKPERFLDGRFEAVDMHKTMAFGAGRRACAGSMQAMNISCTAIGRFVQEFAWRLEEGDEDKVDTIQLTTNRLYPLHVYLAPRGRK

SEQ ID NO: 6899 - DNA, 1579 bp, Zea mays subsp. mays
  misc_feature (1)..(1579): Ceres Seq. ID no. 12352446
  misc_feature: MA Experiment ID: 108515 Result: Up-regulated in Transcription
  misc_feature: MA Experiment 108515 PARAMETER Experiment Name: Zm_2mM_SA_P Parameter: Age (day) Value: 8
  misc_feature: MA Experiment 108515 PARAMETER Experiment Name: Zm_2mM_SA_P Parameter: Organism Value: Zea mays
  misc_feature: MA Experiment 108515 PARAMETER Experiment Name: Zm_2mM_SA_P Parameter: Plant Line Value: 35A19
  misc_feature: MA Experiment 108515 PARAMETER Experiment Name: Zm_2mM_SA_P Parameter: Timepoint (hr) Value: 12
  misc_feature: MA Experiment 108515 PARAMETER Experiment Name: Zm_2mM_SA_P Parameter: Tissue Value: Aerial
  misc_feature: MA Experiment 108515 PARAMETER Experiment Name: Zm_2mM_SA_P Parameter: Treatment Value: 2mM SA vs. No Treatment
  misc_feature: MA Experiment ID: 20000479 Result: Up-regulated in Transcription
  misc_feature: MA Experiment 20000479 PARAMETER Experiment Name: Zm_Drought_P Parameter: Age (day) Value: 10
  misc_feature: MA Experiment 20000479 PARAMETER Experiment Name: Zm_Drought_P Parameter: Organism Value: Zea mays
  misc_feature: MA Experiment 20000479 PARAMETER Experiment Name: Zm_Drought_P Parameter: Plant Line Value: 35A19
  misc_feature: MA Experiment 20000479 PARAMETER Experiment Name: Zm_Drought_P Parameter: Timepoint (hr) Value: 48
  misc_feature: MA Experiment 20000479 PARAMETER Experiment Name: Zm_Drought_P Parameter: Tissue Value: Aerial
  misc_feature: MA Experiment 20000479 PARAMETER Experiment Name: Zm_Drought_P Parameter: Treatment Value: Drought vs. No Drought
  misc_feature: MA Experiment ID: 20000480 Result: Up-regulated in Transcription
  misc_feature: MA Experiment 20000480 PARAMETER Experiment Name: Zm_Drought_P Parameter: Age (day) Value: 11
  misc_feature: MA Experiment 20000480 PARAMETER Experiment Name: Zm_Drought_P Parameter: Organism Value: Zea mays
  misc_feature: MA Experiment 20000480 PARAMETER Experiment Name: Zm_Drought_P Parameter: Plant Line Value: 35A19
  misc_feature: MA Experiment 20000480 PARAMETER Experiment Name: Zm_Drought_P Parameter: Timepoint (hr) Value: 72
  misc_feature: MA Experiment 20000480 PARAMETER Experiment Name: Zm_Drought_P Parameter: Tissue Value: Aerial
  misc_feature: MA Experiment 20000480 PARAMETER Experiment Name: Zm_Drought_P Parameter: Treatment Value: Drought vs. No Drought
aaaagacggcgactctgcctgcacagcattgaccgccgccttcgctcctccacctccccgctcgctctcctgcctccgcgcgggccgcggatcccttcactcgccacagcaagcgctagaagagggaatggagcccggcctcgcatcccgcgtcgcccgttcagccgctcagccgctttccggctgcctgtcgcggcactcgctctcgccgtggctcaagatccagaaccacatttatcctatgccaagtctctgtcacaaggttcctagcacgggaaaatgccacgcttctatgacaacaagttacatggaaacatcagatgtcactgatttggactgggaaaaccttggctttggcctcatcgagactgactttatgtatgttgcaaaatgtggaactgatggaatcttttccaaaggtgaagtcctaccatttggtcctatagcactgagtccttcagctggagtcttaaattatgggcagggattgtttgaaggcctaaaagcatataggaaaactgatgggtccatccttctatttcgtccagaggagaatgctataaggatgctaagcggtgcagagaggatgtgtatgcctgctccaactgttgagcaattcgttgatgctgttaaacaaactgttttggcaaataaaagatgggtgcctcctactggtaaaggttccctatatatcaggccactcctaataggaagcggtgcagttcttggtcttgcgcctgctcctgagtatagctttatcatttttgtatcccctgttgggaattatttcaaggaaggtttatctcctattaatttgatcgttgaggataaatttcaccgtgccagccctggtggaactggaggtgtgaaaaccattggaaactatgcctcggtactgaaagcacaaaagattgcaaaggggaaaggatattctgatgtcctttatttggatgctgttcatgacaaatatcttgaagaagtctcttcctgcaatatttttgttgtgaaagacaatgttatttctacgcctgccattaaaggaacaatacttcctggtataacgaggaaaagtatcattgaagttgctcagagcaaaggtttcaaggttgaggagcgtctggtgtgtgtagatgagttgattaacgctgatgaagttttctgcacggggactgctgttgtggtgtcacctgtggggagtgttacatatatggggaaaagggtggaatatggcaaccaaggagtcggtgtcgtgtctcagcaactatacaagtcacttacaagcctccagatgggcaatgtggaggactggatgggttggaccatgcaacttaatcagtagcggatcacagatattgccttggcagatcccggattattacagctactgggtgcgatagttttttttttggcagatccatcttgagcatatttgactgtaccggtttcccttgagactaagacgaaagtgatcttactgatcttttgtttcaaatctaaaacgataaaataaaatgtggtttgcaccttgccatgtactgtaagaatggacccataaaaaatttcatgctgctgttgcttg

SEQ ID NO: 6900 - protein, 445 aa, Zea mays subsp. mays
  peptide (1)..(445): Ceres Seq. ID no. 12352447
  misc_feature (139)..(426): Pfam Name: Aminotransferase class IV Pfam Description: Aminotransferase class IV
  misc_feature (43)..(445): Homolog of NCBI NO: 34902362 NR Description: Putative aminotransferase [Oryza sativa (japonica group)] >gi|24418036|gb|AAN60486.1| Putative aminotransferase
  misc_feature (184)..(444): Homolog of NCBI NO: 37536656 NR Description: putative aminotransferase [Oryza sativa (japonica group)] >gi|13876531|gb|AAK43507.1| putative aminotransferase
  misc_feature (43)..(155): Homolog of NCBI NO: 37536656 NR Description: putative aminotransferase [Oryza sativa (japonica group)] >gi|13876531|gb|AAK43507.1| putative aminotransferase
  misc_feature (48)..(444): Homolog of NCBI NO: 26391655 NR Description: Branched-chain amino acid aminotransferase 5,
  misc_feature (90)..(444): Homolog of NCBI NO: 18408919 NR Description: branched-chain-amino-acid transaminase -like protein id: At3g49680.1, supported by cDNA: 37100., supported by gi_17933291, supported by cDNA: gi_20453388 [Arabidopsis
  misc_feature (90)..(444): Homolog of NCBI NO: 21593211 NR Description: branched-chain-amino-acid transaminase-like
  misc_feature (87)..(444): Homolog of NCBI NO: 15239157 NR Description: branched-chain amino acid aminotransferase;
  misc_feature (106)..(443): Homolog of NCBI NO: 6319167 NR Description: branched-chain amino acid aminotransferase
  misc_feature (90)..(444): Homolog of NCBI NO: 11280250 NR Description: branched-chain-amino-acid transaminase-like
  misc_feature (60)..(443): Homolog of NCBI NO: 6319165 NR Description: branched-chain amino acid aminotransferase
KDGDSACTALTAAFAPPPPRSLSCLRAGRGSLHSPQQALEEGMEPGLASRVARSAAQPLSGCLSRHSLSPWLKIQNHIYPMPSLCHKVPSTGKCHASMTTSYMETSDVTDLDWENLGFGLIETDFMYVAKCGTDGIFSKGEVLPFGPIALSPSAGVLNYGQGLFEGLKAYRKTDGSILLFRPEENAIRMLSGAERMCMPAPTVEQFVDAVKQTVLANKRWVPPTGKGSLYIRPLLIGSGAVLGLAPAPEYSFIIFVSPVGNYFKEGLSPINLIVEDKFHRASPGGTGGVKTIGNYASVLKAQKIAKGKGYSDVLYLDAVHDKYLEEVSSCNIFVVKDNVISTPAIKGTILPGITRKSIIEVAQSKGFKVEERLVCVDELINADEVFCTGTAVVVSPVGSVTYMGKRVEYGNQGVGVVSQQLYKSLTSLQMGNVEDWMGWTMQLNQ

SEQ ID NO: 6901 - protein, 403 aa, Zea mays subsp. mays
  peptide (1)..(403): Ceres Seq. ID no. 12352448
  misc_feature (97)..(384): Pfam Name: Aminotransferase class IV Pfam Description: Aminotransferase class IV
  misc_feature (48)..(402): Homolog of NCBI NO: 18408919 NR Description: branched-chain-amino-acid transaminase -like protein id: At3g49680.1, supported by cDNA: 37100., supported by gi_17933291, supported by cDNA: gi_20453388 [Arabidopsis
  misc_feature (48)..(402): Homolog of NCBI NO: 21593211 NR Description: branched-chain-amino-acid transaminase-like
  misc_feature (45)..(402): Homolog of NCBI NO: 15239157 NR Description: branched-chain amino acid aminotransferase;
  misc_feature (1)..(403): Homolog of NCBI NO: 34902362 NR Description: Putative aminotransferase [Oryza sativa (japonica group)] >gi|24418036|gb|AAN60486.1| Putative aminotransferase
  misc_feature (1)..(113): Homolog of NCBI NO: 37536656 NR Description: putative aminotransferase [Oryza sativa (japonica group)] >gi|13876531|gb|AAK43507.1| putative aminotransferase
  misc_feature (6)..(402): Homolog of NCBI NO: 26391655 NR Description: Branched-chain amino acid aminotransferase 5,
  misc_feature (142)..(402): Homolog of NCBI NO: 37536656 NR Description: putative aminotransferase [Oryza sativa (japonica group)] >gi|13876531|gb|AAK43507.1| putative aminotransferase
  misc_feature (64)..(401): Homolog of NCBI NO: 6319167 NR Description: branched-chain amino acid aminotransferase
  misc_feature (48)..(402): Homolog of NCBI NO: 11280250 NR Description: branched-chain-amino-acid transaminase-like
  misc_feature (18)..(401): Homolog of NCBI NO: 6319165 NR Description: branched-chain amino acid aminotransferase
MEPGLASRVARSAAQPLSGCLSRHSLSPWLKIQNHIYPMPSLCHKVPSTGKCHASMTTSYMETSDVTDLDWENLGFGLIETDFMYVAKCGTDGIFSKGEVLPFGPIALSPSAGVLNYGQGLFEGLKAYRKTDGSILLFRPEENAIRMLSGAERMCMPAPTVEQFVDAVKQTVLANKRWVPPTGKGSLYIRPLLIGSGAVLGLAPAPEYSFIIFVSPVGNYFKEGLSPINLIVEDKFHRASPGGTGGVKTIGNYASVLKAQKIAKGKGYSDVLYLDAVHDKYLEEVSSCNIFVVKDNVISTPAIKGTILPGITRKSIIEVAQSKGFKVEERLVCVDELINADEVFCTGTAVVVSPVGSVTYMGKRVEYGNQGVGVVSQQLYKSLTSLQMGNVEDWMGWTMQLNQ

SEQ ID NO: 6902 - protein, 365 aa, Zea mays subsp. mays
  peptide (1)..(365): Ceres Seq. ID no. 12352449
  misc_feature (59)..(346): Pfam Name: Aminotransferase class IV Pfam Description: Aminotransferase class IV
  misc_feature (1)..(365): Homolog of NCBI NO: 34902362 NR Description: Putative aminotransferase [Oryza sativa (japonica group)] >gi|24418036|gb|AAN60486.1| Putative aminotransferase
  misc_feature (104)..(364): Homolog of NCBI NO: 37536656 NR Description: putative aminotransferase [Oryza sativa (japonica group)] >gi|13876531|gb|AAK43507.1| putative aminotransferase
  misc_feature (1)..(75): Homolog of NCBI NO: 37536656 NR Description: putative aminotransferase [Oryza sativa (japonica group)] >gi|13876531|gb|AAK43507.1| putative aminotransferase
  misc_feature (1)..(364): Homolog of NCBI NO: 26391655 NR Description: Branched-chain amino acid aminotransferase 5,
  misc_feature (10)..(364): Homolog of NCBI NO: 18408919 NR Description: branched-chain-amino-acid transaminase -like protein id: At3g49680.1, supported by cDNA: 37100., supported by gi_17933291, supported by cDNA: gi_20453388 [Arabidopsis
  misc_feature (10)..(364): Homolog of NCBI NO: 21593211 NR Description: branched-chain-amino-acid transaminase-like
  misc_feature (7)..(364): Homolog of NCBI NO: 15239157 NR Description: branched-chain amino acid aminotransferase;
  misc_feature (26)..(363): Homolog of NCBI NO: 6319167 NR Description: branched-chain amino acid aminotransferase
  misc_feature (10)..(364): Homolog of NCBI NO: 11280250 NR Description: branched-chain-amino-acid transaminase-like
  misc_feature (1)..(363): Homolog of NCBI NO: 6319165 NR Description: branched-chain amino acid aminotransferase
MPSLCHKVPSTGKCHASMTTSYMETSDVTDLDWENLGFGLIETDFMYVAKCGTDGIFSKGEVLPFGPIALSPSAGVLNYGQGLFEGLKAYRKTDGSILLFRPEENAIRMLSGAERMCMPAPTVEQFVDAVKQTVLANKRWVPPTGKGSLYIRPLLIGSGAVLGLAPAPEYSFIIFVSPVGNYFKEGLSPINLIVEDKFHRASPGGTGGVKTIGNYASVLKAQKIAKGKGYSDVLYLDAVHDKYLEEVSSCNIFVVKDNVISTPAIKGTILPGITRKSIIEVAQSKGFKVEERLVCVDELINADEVFCTGTAVVVSPVGSVTYMGKRVEYGNQGVGVVSQQLYKSLTSLQMGNVEDWMGWTMQLNQ

SEQ ID NO: 6903 - DNA, 1601 bp, Zea mays subsp. mays
  misc_feature (1)..(1601): Ceres Seq. ID no. 12435006
  misc_feature: MA Experiment ID: 108504 Result: Up-regulated in Transcription
  misc_feature: MA Experiment 108504 PARAMETER Experiment Name: Zm_Drought_P Parameter: Age (day) Value: 8
  misc_feature: MA Experiment 108504 PARAMETER Experiment Name: Zm_Drought_P Parameter: Organism Value: Zea mays
  misc_feature: MA Experiment 108504 PARAMETER Experiment Name: Zm_Drought_P Parameter: Plant Line Value: 35A19
  misc_feature: MA Experiment 108504 PARAMETER Experiment Name: Zm_Drought_P Parameter: Timepoint (hr) Value: 12
  misc_feature: MA Experiment 108504 PARAMETER Experiment Name: Zm_Drought_P Parameter: Tissue Value: Aerial
  misc_feature: MA Experiment 108504 PARAMETER Experiment Name: Zm_Drought_P Parameter: Treatment Value: Drought vs. No Drought
  misc_feature: MA Experiment ID: 108526 Result: Up-regulated in Transcription
  misc_feature: MA Experiment 108526 PARAMETER Experiment Name: Zm_5mM_NO_P Parameter: Age (day) Value: 8
  misc_feature: MA Experiment 108526 PARAMETER Experiment Name: Zm_5mM_NO_P Parameter: Organism Value: Zea mays
  misc_feature: MA Experiment 108526 PARAMETER Experiment Name: Zm_5mM_NO_P Parameter: Plant Line Value: 35A19
  misc_feature: MA Experiment 108526 PARAMETER Experiment Name: Zm_5mM_NO_P Parameter: Timepoint (hr) Value: 1
  misc_feature: MA Experiment 108526 PARAMETER Experiment Name: Zm_5mM_NO_P Parameter: Tissue Value: Aerial
  misc_feature: MA Experiment 108526 PARAMETER Experiment Name: Zm_5mM_NO_P Parameter: Treatment Value: 5mM NO vs. No Treatment
  misc_feature: MA Experiment ID: 108527 Result: Up-regulated in Transcription
  misc_feature: MA Experiment 108527 PARAMETER Experiment Name: Zm_5mM_NO_P Parameter: Age (day) Value: 8
  misc_feature: MA Experiment 108527 PARAMETER Experiment Name: Zm_5mM_NO_P Parameter: Organism Value: Zea mays
  misc_feature: MA Experiment 108527 PARAMETER Experiment Name: Zm_5mM_NO_P Parameter: Plant Line Value: 35A19
  misc_feature: MA Experiment 108527 PARAMETER Experiment Name: Zm_5mM_NO_P Parameter: Timepoint (hr) Value: 6
  misc_feature: MA Experiment 108527 PARAMETER Experiment Name: Zm_5mM_NO_P Parameter: Tissue Value: Aerial
  misc_feature: MA Experiment 108527 PARAMETER Experiment Name: Zm_5mM_NO_P Parameter: Treatment Value: 5mM NO vs. No Treatment
  misc_feature: MA Experiment ID: 108529 Result: Up-regulated in Transcription
  misc_feature: MA Experiment 108529 PARAMETER Experiment Name: Zm_Imbibed_Seeds_P Parameter: Age (day) Value: 5 vs. 2
  misc_feature: MA Experiment 108529 PARAMETER Experiment Name: Zm_Imbibed_Seeds_P Parameter: Organism Value: Zea mays
  misc_feature: MA Experiment 108529 PARAMETER Experiment Name: Zm_Imbibed_Seeds_P Parameter: Plant Line Value: 35A19
  misc_feature: MA Experiment 108529 PARAMETER Experiment Name: Zm_Imbibed_Seeds_P Parameter: Tissue Value: Roots vs. Embryo
  misc_feature: MA Experiment ID: 108530 Result: Up-regulated in Transcription
  misc_feature: MA Experiment 108530 PARAMETER Experiment Name: Zm_Imbibed_Seeds_P Parameter: Age (day) Value: 6 vs. 2
  misc_feature: MA Experiment 108530 PARAMETER Experiment Name: Zm_Imbibed_Seeds_P Parameter: Organism Value: Zea mays
  misc_feature: MA Experiment 108530 PARAMETER Experiment Name: Zm_Imbibed_Seeds_P Parameter: Plant Line Value: 35A19
  misc_feature: MA Experiment 108530 PARAMETER Experiment Name: Zm_Imbibed_Seeds_P Parameter: Tissue Value: Aerial vs. Embryo
  misc_feature: MA Experiment ID: 108533 Result: Up-regulated in Transcription
  misc_feature: MA Experiment 108533 PARAMETER Experiment Name: Zm_4deg_Cold_P Parameter: Age (hr) Value: 8
  misc_feature: MA Experiment 108533 PARAMETER Experiment Name: Zm_4deg_Cold_P Parameter: Organism Value: Zea mays
  misc_feature: MA Experiment 108533 PARAMETER Experiment Name: Zm_4deg_Cold_P Parameter: Plant Line Value: 35A19
  misc_feature: MA Experiment 108533 PARAMETER Experiment Name: Zm_4deg_Cold_P Parameter: Temperature (deg C) Value: 4 vs. 22
  misc_feature: MA Experiment 108533 PARAMETER Experiment Name: Zm_4deg_Cold_P Parameter: Timepoint (hr) Value: 1
  misc_feature: MA Experiment 108533 PARAMETER Experiment Name: Zm_4deg_Cold_P Parameter: Tissue Value: Aerial
  misc_feature: MA Experiment ID: 108534 Result: Up-regulated in Transcription
  misc_feature: MA Experiment 108534 PARAMETER Experiment Name: Zm_4deg_Cold_P Parameter: Age (hr) Value: 8
  misc_feature: MA Experiment 108534 PARAMETER Experiment Name: Zm_4deg_Cold_P Parameter: Organism Value: Zea mays
  misc_feature: MA Experiment 108534 PARAMETER Experiment Name: Zm_4deg_Cold_P Parameter: Plant Line Value: 35A19
  misc_feature: MA Experiment 108534 PARAMETER Experiment Name: Zm_4deg_Cold_P Parameter: Temperature (deg C) Value: 4 vs. 22
  misc_feature: MA Experiment 108534 PARAMETER Experiment Name: Zm_4deg_Cold_P Parameter: Timepoint (hr) Value: 6
  misc_feature: MA Experiment 108534 PARAMETER Experiment Name: Zm_4deg_Cold_P Parameter: Tissue Value: Aerial
  misc_feature: MA Experiment ID: 108536 Result: Up-regulated in Transcription
  misc_feature: MA Experiment 108536 PARAMETER Experiment Name: Zm_Meristem_P Parameter: Age (day) Value: 8
  misc_feature: MA Experiment 108536 PARAMETER Experiment Name: Zm_Meristem_P Parameter: Organism Value: Zea mays
  misc_feature: MA Experiment 108536 PARAMETER Experiment Name: Zm_Meristem_P Parameter: Plant Line Value: 35A19
  misc_feature: MA Experiment 108536 PARAMETER Experiment Name: Zm_Meristem_P Parameter: Tissue Value: Shoot Meristem vs. Above Shoot Meristem
  misc_feature: MA Experiment ID: 108544 Result: Down-regulated in Transcription
  misc_feature: MA Experiment ID: 108545 Result: Down-regulated in Transcription
  misc_feature: MA Experiment 108545 PARAMETER Experiment Name: Zm_Imbibed_Seeds_P Parameter: Age (day) Value: 3 vs. 2
  misc_feature: MA Experiment 108545 PARAMETER Experiment Name: Zm_Imbibed_Seeds_P Parameter: Organism Value: Zea mays
  misc_feature: MA Experiment 108545 PARAMETER Experiment Name: Zm_Imbibed_Seeds_P Parameter: Plant Line Value: 35A19
  misc_feature: MA Experiment 108545 PARAMETER Experiment Name: Zm_Imbibed_Seeds_P Parameter: Tissue Value: Aerial vs. Embryo
  misc_feature: MA Experiment ID: 108547 Result: Up-regulated in Transcription
  misc_feature: MA Experiment 108547 PARAMETER Experiment Name: Zm_Imbibed_Seeds_P Parameter: Age (day) Value: 4 vs. 2
  misc_feature: MA Experiment 108547 PARAMETER Experiment Name: Zm_Imbibed_Seeds_P Parameter: Organism Value: Zea mays
  misc_feature: MA Experiment 108547 PARAMETER Experiment Name: Zm_Imbibed_Seeds_P Parameter: Plant Line Value: 35A19
  misc_feature: MA Experiment 108547 PARAMETER Experiment Name: Zm_Imbibed_Seeds_P Parameter: Tissue Value: Aerial vs. Embryo
  misc_feature: MA Experiment ID: 108688 Result: Down-regulated in Transcription
  misc_feature: MA Experiment 108688 PARAMETER Experiment Name: Zm_Embryos-Flowers__P Parameter: Tissue Value: Immature Flowers vs. Aerial+
  misc_feature: MA Experiment ID: 20000108 Result: Down-regulated in Transcription
  misc_feature: MA Experiment 20000108 PARAMETER Experiment Name: Zm_Root-Tips_P Parameter: Age (day) Value: 12
  misc_feature: MA Experiment 20000108 PARAMETER Experiment Name: Zm_Root-Tips_P Parameter: Organism Value: Zea mays
  misc_feature: MA Experiment 20000108 PARAMETER Experiment Name: Zm_Root-Tips_P Parameter: Tissue Value: Root tips vs. Root mid region    35
  misc_feature: MA Experiment 20000108 PARAMETER Experiment Name: Zm_Root-Tips_P Parameter: Tissue Value: Root tips vs. Root mid region   Sequence Listing-Misc Features (4)
  misc_feature: MA Experiment ID: 20000479 Result: Up-regulated in Transcription
  misc_feature: MA Experiment 20000479 PARAMETER Experiment Name: Zm_Drought_P Parameter: Age (day) Value: 10
  misc_feature: MA Experiment 20000479 PARAMETER Experiment Name: Zm_Drought_P Parameter: Organism Value: Zea mays
  misc_feature: MA Experiment 20000479 PARAMETER Experiment Name: Zm_Drought_P Parameter: Plant Line Value: 35A19
  misc_feature: MA Experiment 20000479 PARAMETER Experiment Name: Zm_Drought_P Parameter: Timepoint (hr) Value: 48
  misc_feature: MA Experiment 20000479 PARAMETER Experiment Name: Zm_Drought_P Parameter: Tissue Value: Aerial
  misc_feature: MA Experiment 20000479 PARAMETER Experiment Name: Zm_Drought_P Parameter: Treatment Value: Drought vs. No Drought
  misc_feature: MA Experiment ID: 20000492 Result: Down-regulated in Transcription
  misc_feature: MA Experiment 20000492 PARAMETER Experiment Name: Zm_Hybrid_Seed_Dev_P Parameter: DAP Value: 12
  misc_feature: MA Experiment 20000492 PARAMETER Experiment Name: Zm_Hybrid_Seed_Dev_P Parameter: Organism Value: Zea mays
  misc_feature: MA Experiment 20000492 PARAMETER Experiment Name: Zm_Hybrid_Seed_Dev_P Parameter: Plant Line Value: 35A19
  misc_feature: MA Experiment 20000492 PARAMETER Experiment Name: Zm_Hybrid_Seed_Dev_P Parameter: Tissue Value: Fert Kernel vs. Unfert Floret
  misc_feature: MA Experiment ID: 20000532 Result: Up-regulated in Transcription
  misc_feature: MA Experiment 20000532 PARAMETER Experiment Name: Zm_0.001percent_MeJA_P Parameter: Age (day) Value: 10
  misc_feature: MA Experiment 20000532 PARAMETER Experiment Name: Zm_0.001percent_MeJA_P Parameter: Organism Value: Zea mays
  misc_feature: MA Experiment 20000532 PARAMETER Experiment Name: Zm_0.001percent_MeJA_P Parameter: Plant Line Value: 35A19
  misc_feature: MA Experiment 20000532 PARAMETER Experiment Name: Zm_0.001percent_MeJA_P Parameter: Timepoint (hr) Value: 48
  misc_feature: MA Experiment 20000532 PARAMETER Experiment Name: Zm_0.001percent_MeJA_P Parameter: Tissue Value: Aerial
  misc_feature: MA Experiment 20000532 PARAMETER Experiment Name: Zm_0.001percent_MeJA_P Parameter: Treatment Value: 0.001percent MeJA vs. No Treatment
  misc_feature: MA Experiment ID: 20000535 Result: Down-regulated in Transcription
  misc_feature: MA Experiment 20000535 PARAMETER Experiment Name: Zm_Hybrid_Seed_Dev_P Parameter: DAP Value: 30 vs. 12
  misc_feature: MA Experiment 20000535 PARAMETER Experiment Name: Zm_Hybrid_Seed_Dev_P Parameter: Organism Value: Zea mays
  misc_feature: MA Experiment 20000535 PARAMETER Experiment Name: Zm_Hybrid_Seed_Dev_P Parameter: Plant Line Value: 35A19
  misc_feature: MA Experiment 20000535 PARAMETER Experiment Name: Zm_Hybrid_Seed_Dev_P Parameter: Tissue Value: Embryo vs. Unfert Floret
  misc_feature: MA Experiment ID: 20001613 Result: Down-regulated in Transcription
  misc_feature: MA Experiment 20001613 PARAMETER Experiment Name: Zm_50ppm_KNO3_L-to-H_P Parameter: Age (day) Value: 20
  misc_feature: MA Experiment 20001613 PARAMETER Experiment Name: Zm_50ppm_KNO3_L-to-H_P Parameter: Organism Value: Zea mays
  misc_feature: MA Experiment 20001613 PARAMETER Experiment Name: Zm_50ppm_KNO3_L-to-H_P Parameter: Plant Line Value: 35A19
  misc_feature: MA Experiment 20001613 PARAMETER Experiment Name: Zm_50ppm_KNO3_L-to-H_P Parameter: Timepoint (hr) Value: 24
  misc_feature: MA Experiment 20001613 PARAMETER Experiment Name: Zm_50ppm_KNO3_L-to-H_P Parameter: Tissue Value: Roots
  misc_feature: MA Experiment 20001613 PARAMETER Experiment Name: Zm_50ppm_KNO3_L-to-H_P Parameter: Treatment Value: 50ppm KNO3 vs. 50ppm KCl
actccaactctcaagcgtctctactcctcttcctcctctctctactctccaagttctcttctccgtcgaccgctctacacgtctcttgtcgacctggacaccgaggtggaagaaggaagcagtcagcagatggatccatggatcagcagccagccttctctgagccttgacctgcgcgtcggcctgccgccgctcagcctccaccaccaggcgccggtggccgtcgccttgcccaggcccaagctgctcgtcgaggagaacttcctcctgccgcctccaaagaaagaaccagaggtcgcggctctcgagacggagctgcagcggatgggcgaggagaaccggcgcctggcggaggcgctggccgaggtggcctccaagtacgaggcgctgcgggggcagtacacggagatggtggccgcggcggccacggcctgcgggaaccacccgtcgtccacgtcggagggcgggtccgtgtcgccgtcgcggaagcgcaagagcgagagcacggacaccgcgccgcccgcgcagcagctactgcaccagcactacccggcggtggcgccggaccagacggagtgcacctcgggcgagccgtgcaagcgcatccgggaggcggagtgcaagcccagggtgtcgaagctgcacgtgcacgccgacccggccgacctcagcctggtggtcaaggacgggtaccagtggcgcaagtacggtcagaaggtcaccaaggacaacccctgcccgcgggcctacttccgctgctccttcgccccggcctgcccagtcaagaagaaggtgcagcgcagcgccgacgaccccaccatcctggtcgccacgtacgagggcgaccacaaccacggccagcccccgccacaggcgcaggcgccgcacgacggctccagccctggcgccagcaagaagccgccgtcgccgccgaggccggtcgccgccgctccggcgccgctccaccaccagcaggtccagcagcaccagcagcagcaggcggttggcgcggtgaaatgcgagccgcccgtggccgcggcggcgtcggagctcatccggcggaacctcgcggagcagatgnccatgnactgacgcgggaccccagcttcaaggcggcgttcgtcaccgcgctgtccggccggctcttcgagatgtcgccgaccaaggactgacggaacggatcggatggattgggagattggcatcgcaggagattctggatcagattgtcttcgagcgcacgccgcaatggtcaactgcgcagcgctggcttggctgctgcctccgttcactcttcgctgtcagagcgaaacagcggtaacagagcaagacacgaggggtctgcactctgcagttgtgcaggaggaggaacagacacagggagaggagggcgcgcggccggacatggcgtggaacagagatcgtcgtcaccgccggcgggggtgtggtcgacgacgcgacatgcgaaacactacgtgctagctagcataggaaaaaacaacatgaaatcgtacaaccaaccaatccctcgcactgttttagttgttagctgtaggcgaaactgttcatccaattgatcaaatgaaaattatttttccctg

SEQ ID NO: 6904 - protein, 363 aa, Zea mays subsp. mays
  peptide (1)..(363): Ceres Seq. ID no. 12435007
  misc_feature (227)..(285): Pfam Name: WRKY DNA -binding domain Pfam Description: WRKY DNA -binding domain
  misc_feature (44)..(362): Homolog of NCBI NO: 2130024 NR Description: DNA-binding protein ABF2 - wild oat
  misc_feature (44)..(362): Homolog of NCBI NO: 38174837 NR Description: putative WRKY9-10 protein [Hordeum vulgare subsp.
  misc_feature (208)..(288): Homolog of NCBI NO: 15224660 NR Description: WRKY family transcription factor; protein id: supported by cDNA: 30071., supported by cDNA: gi_17980963 thaliana] >gi|20978792|sp|Q9SK33|WR60_ARATH Probable WRKY
  misc_feature (64)..(137): Homolog of NCBI NO: 15224660 NR Description: WRKY family transcription factor; protein id: supported by cDNA: 30071., supported by cDNA: gi_17980963 thaliana] >gi|20978792|sp|Q9SK33|WR60_ARATH Probable WRKY
  misc_feature (93)..(311): Homolog of NCBI NO: 40060529 NR Description: putative WRKY4 transcription factor [Vitis
  misc_feature (208)..(288): Homolog of NCBI NO: 21592591 NR Description: putative WRKY-type DNA binding protein
  misc_feature (64)..(137): Homolog of NCBI NO: 21592591 NR Description: putative WRKY-type DNA binding protein
  misc_feature (98)..(294): Homolog of NCBI NO: 6472585 NR Description: WIZZ [Nicotiana tabacum]
  misc_feature (47)..(308): Homolog of NCBI NO: 40645752 NR Description: WRKY transcription factor 1 [Spinacia oleracea]
  misc_feature (49)..(300): Homolog of NCBI NO: 11493822 NR Description: transcription factor WRKY4 [Petroselinum crispum]
  misc_feature (361)..(361): Xaa is any aa, unknown or other
  misc_feature (363)..(363): Xaa is any aa, unknown or other
TPTLKRLYSSSSSLYSPSSLLRRPLYTSLVDLDTEVEEGSSQQMDPWISSQPSLSLDLRVGLPPLSLHHQAPVAVALPRPKLLVEENFLLPPPKKEPEVAALETELQRMGEENRRLAEALAEVASKYEALRGQYTEMVAAAATACGNHPSSTSEGGSVSPSRKRKSESTDTAPPAQQLLHQHYPAVAPDQTECTSGEPCKRIREAECKPRVSKLHVHADPADLSLVVKDGYQWRKYGQKVTKDNPCPRAYFRCSFAPACPVKKKVQRSADDPTILVATYEGDHNHGQPPPQAQAPHDGSSPGASKKPPSPPRPVAAAPAPLHHQQVQQHQQQQAVGAVKCEPPVAAAASELIRRNLAEQMXMX

SEQ ID NO: 6905 - protein, 320 aa, Zea mays subsp. mays
  peptide (1)..(320): Ceres Seq. ID no. 12435008
  misc_feature (184)..(242): Pfam Name: WRKY DNA -binding domain Pfam Description: WRKY DNA -binding domain
  misc_feature (1)..(319): Homolog of NCBI NO: 2130024 NR Description: DNA-binding protein ABF2 - wild oat
  misc_feature (1)..(319): Homolog of NCBI NO: 38174837 NR Description: putative WRKY9-10 protein [Hordeum vulgare subsp.
  misc_feature (165)..(245): Homolog of NCBI NO: 15224660 NR Description: WRKY family transcription factor; protein id: supported by cDNA: 30071., supported by cDNA: gi_17980963 thaliana] >gi|20978792|sp|Q9SK33|WR60_ARATH Probable WRKY
  misc_feature (21)..(94): Homolog of NCBI NO: 15224660 NR Description: WRKY family transcription factor; protein id: supported by cDNA: 30071., supported by cDNA: gi_17980963 thaliana] >gi|20978792|sp|Q9SK33|WR60_ARATH Probable WRKY
  misc_feature (50)..(268): Homolog of NCBI NO: 40060529 NR Description: putative WRKY4 transcription factor [Vitis
  misc_feature (165)..(245): Homolog of NCBI NO: 21592591 NR Description: putative WRKY-type DNA binding protein
  misc_feature (21)..(94): Homolog of NCBI NO: 21592591 NR Description: putative WRKY-type DNA binding protein
  misc_feature (55)..(251): Homolog of NCBI NO: 6472585 NR Description: WIZZ [Nicotiana tabacum]
  misc_feature (4)..(265): Homolog of NCBI NO: 40645752 NR Description: WRKY transcription factor 1 [Spinacia oleracea]
  misc_feature (6)..(257): Homolog of NCBI NO: 11493822 NR Description: transcription factor WRKY4 [Petroselinum crispum]
  misc_feature (318)..(318): Xaa is any aa, unknown or other
  misc_feature (320)..(320): Xaa is any aa, unknown or other
MDPWISSQPSLSLDLRVGLPPLSLHHQAPVAVALPRPKLLVEENFLLPPPKKEPEVAALETELQRMGEENRRLAEALAEVASKYEALRGQYTEMVAAAATACGNHPSSTSEGGSVSPSRKRKSESTDTAPPAQQLLHQHYPAVAPDQTECTSGEPCKRIREAECKPRVSKLHVHADPADLSLVVKDGYQWRKYGQKVTKDNPCPRAYFRCSFAPACPVKKKVQRSADDPTILVATYEGDHNHGQPPPQAQAPHDGSSPGASKKPPSPPRPVAAAPAPLHHQQVQQHQQQQAVGAVKCEPPVAAAASELIRRNLAEQMXMX

SEQ ID NO: 6906 - protein, 255 aa, Zea mays subsp. mays
  peptide (1)..(255): Ceres Seq. ID no. 12435009
  misc_feature (119)..(177): Pfam Name: WRKY DNA -binding domain Pfam Description: WRKY DNA -binding domain
  misc_feature (1)..(254): Homolog of NCBI NO: 2130024 NR Description: DNA-binding protein ABF2 - wild oat
  misc_feature (1)..(254): Homolog of NCBI NO: 38174837 NR Description: putative WRKY9-10 protein [Hordeum vulgare subsp.
  misc_feature (100)..(180): Homolog of NCBI NO: 15224660 NR Description: WRKY family transcription factor; protein id: supported by cDNA: 30071., supported by cDNA: gi_17980963 thaliana] >gi|20978792|sp|Q9SK33|WR60_ARATH Probable WRKY
  misc_feature (1)..(29): Homolog of NCBI NO: 15224660 NR Description: WRKY family transcription factor; protein id: supported by cDNA: 30071., supported by cDNA: gi_17980963 thaliana] >gi|20978792|sp|Q9SK33|WR60_ARATH Probable WRKY
  misc_feature (1)..(203): Homolog of NCBI NO: 40060529 NR Description: putative WRKY4 transcription factor [Vitis
  misc_feature (100)..(180): Homolog of NCBI NO: 21592591 NR Description: putative WRKY-type DNA binding protein
  misc_feature (1)..(29): Homolog of NCBI NO: 21592591 NR Description: putative WRKY-type DNA binding protein
  misc_feature (1)..(186): Homolog of NCBI NO: 6472585 NR Description: WIZZ [Nicotiana tabacum]
  misc_feature (1)..(200): Homolog of NCBI NO: 40645752 NR Description: WRKY transcription factor 1 [Spinacia oleracea]
  misc_feature (1)..(192): Homolog of NCBI NO: 11493822 NR Description: transcription factor WRKY4 [Petroselinum crispum]
  misc_feature (253)..(253): Xaa is any aa, unknown or other
  misc_feature (255)..(255): Xaa is any aa, unknown or other
MGEENRRLAEALAEVASKYEALRGQYTEMVAAAATACGNHPSSTSEGGSVSPSRKRKSESTDTAPPAQQLLHQHYPAVAPDQTECTSGEPCKRIREAECKPRVSKLHVHADPADLSLVVKDGYQWRKYGQKVTKDNPCPRAYFRCSFAPACPVKKKVQRSADDPTILVATYEGDHNHGQPPPQAQAPHDGSSPGASKKPPSPPRPVAAAPAPLHHQQVQQHQQQQAVGAVKCEPPVAAAASELIRRNLAEQMXMX

SEQ ID NO: 6907 - DNA, 1405 bp, Zea mays subsp. mays
  misc_feature (1)..(1405): Ceres Seq. ID no. 12344535
  misc_feature: MA Experiment ID: 108689 Result: Down-regulated in Transcription
  misc_feature: MA Experiment 108689 PARAMETER Experiment Name: Zm_Drought_Roots_P Parameter: Age (day) Value: 9
  misc_feature: MA Experiment 108689 PARAMETER Experiment Name: Zm_Drought_Roots_P Parameter: Organism Value: Zea mays
  misc_feature: MA Experiment 108689 PARAMETER Experiment Name: Zm_Drought_Roots_P Parameter: Plant Line Value: 35A19
  misc_feature: MA Experiment 108689 PARAMETER Experiment Name: Zm_Drought_Roots_P Parameter: Timepoint (hr) Value: 24
  misc_feature: MA Experiment 108689 PARAMETER Experiment Name: Zm_Drought_Roots_P Parameter: Tissue Value: Roots
  misc_feature: MA Experiment 108689 PARAMETER Experiment Name: Zm_Drought_Roots_P Parameter: Treatment Value: Drought vs. No Drought
gccgccgccgccattcccatggttttccatgctcggttgcgagccagcaattccatttcagtgtcctccctcgtctcgagaccttgccccatccagcccaacgctccgtccatcaactgaatagcttggcggtgtaaccctttcgtgtgcgatgagctcctcgccgttgatcaccgccgcggcgtcggctgccgtggtggcgctggctgtcgccaaccgcgtgctctacaagctcgcgcttgtgcctctcaaggcgtaccctttcttcctcgcccagctcaccaccttcgggtacgttgccgtgtacttctcgatgctctacacgaggtaccgcactgggttggtgactagagacatgctggcgctccccaagcaccggttcgtcgctatcggtttgctggaggcacttggagtctttgctggcatgtctgctggagctatgctaccagggcctgcgattcctatactgtcccagtcattcttggtctggcagcttatcttctctgccctgcttttagggaggacatattcggccagacaagtcattggttgcttcctagtagtttctggtgtgattcttgctgttgcaagtggagcggatgatggccagcttctttcagatgtaaagttaatttggccagcactcatgatcgcttcatcagcatttcacgctggtgcatctattctgaaggaagctgttttcattgatggtgcaaaacgtcttaaggggaagcggccagacatatttgtggtcaattcatttggatctggatttcaggctgtttttgtctttcttcttcttccattcctttctaatttgaggggaattaagtttgctgagcttcctgcttatttaaatggtggtgctgagtgcttcttaaatgtcgcagaaagtccaatcgactgcggaggagctccattcctgcctttgctgtttataatggtgaatatggcattcaatgtctctctcctcaatttggtgaagatgtcatctgccattgtggcttcacttacagcaacatcagcagtgccaatatcgatctatattctttcacttcctttgccctacatccctcatggcacggaattaagcacgtctttcatcattggtgccgtgatattgctgatgggcctgattctgtataaccttcctcaatcgtcactgaaacaattgaaggctgattgaaggtaaagtgacacactgccacatgccttgtaacagagagtttactgattgatattttatggtgaaattgatttccacactgaactatacgaagcatgtgactcattcagattttgtattatgaatgttatcgaaattaagattttctaaaacgcaagcaacatgtgtatgtagtagggacatttttaatacttaccctatagtctggaagtgtgatct

SEQ ID NO: 6908 - protein, 344 aa, Zea mays subsp. mays
  peptide (1)..(344): Ceres Seq. ID no. 12344536
  misc_feature (1)..(340): Homolog of NCBI NO: 30686536 NR Description: expressed protein [Arabidopsis thaliana]
  misc_feature (6)..(331): Homolog of NCBI NO: 21553716 NR Description: unknown [Arabidopsis thaliana]
  misc_feature (6)..(331): Homolog of NCBI NO: 18419900 NR Description: putative protein; protein id: At5g19380.1,
  misc_feature (12)..(332): Homolog of NCBI NO: 20260240 NR Description: unknown protein [Arabidopsis thaliana]
  misc_feature (12)..(332): Homolog of NCBI NO: 21536591 NR Description: unknown [Arabidopsis thaliana]
  misc_feature (123)..(294): Homolog of NCBI NO: 7487326 NR Description: hypothetical protein T22A6.290 - Arabidopsis >gi|5051788|emb|CAB45081.1| hypothetical protein [Arabidopsis >gi|7269296|emb|CAB79356.1| hypothetical protein [Arabidopsis
  misc_feature (1)..(94): Homolog of NCBI NO: 7487326 NR Description: hypothetical protein T22A6.290 - Arabidopsis >gi|5051788|emb|CAB45081.1| hypothetical protein [Arabidopsis >gi|7269296|emb|CAB79356.1| hypothetical protein [Arabidopsis
  misc_feature (69)..(332): Homolog of NCBI NO: 15239887 NR Description: putative protein; protein id: At5g12170.1 thaliana] >gi|9759384|dbj|BAB10035.1|
  misc_feature (1)..(146): Homolog of NCBI NO: 28973717 NR Description: unknown protein [Arabidopsis thaliana]
  misc_feature (3)..(96): Homolog of NCBI NO: 20161872 NR Description: B1139B11.13 [Oryza sativa (japonica
MSSSPLITAAASAAVVALAVANRVLYKLALVPLKAYPFFLAQLTTFGYVAVYFSMLYTRYRTGLVTRDMLALPKHRFVAIGLLEALGVFAGMSAGAMLPGPAIPILSQSFLVWQLIFSALLLGRTYSARQVIGCFLVVSGVILAVASGADDGQLLSDVKLIWPALMIASSAFHAGASILKEAVFIDGAKRLKGKRPDIFVVNSFGSGFQAVFVFLLLPFLSNLRGIKFAELPAYLNGGAECFLNVAESPIDCGGAPFLPLLFIMVNMAFNVSLLNLVKMSSAIVASLTATSAVPISIYILSLPLPYIPHGTELSTSFIIGAVILLMGLILYNLPQSSLKQLKAD

SEQ ID NO: 6909 - protein, 290 aa, Zea mays subsp. mays
  peptide (1)..(290): Ceres Seq. ID no. 12344537
  misc_feature (1)..(286): Homolog of NCBI NO: 30686536 NR Description: expressed protein [Arabidopsis thaliana]
  misc_feature (1)..(277): Homolog of NCBI NO: 21553716 NR Description: unknown [Arabidopsis thaliana]
  misc_feature (1)..(277): Homolog of NCBI NO: 18419900 NR Description: putative protein; protein id: At5g19380.1,
  misc_feature (1)..(278): Homolog of NCBI NO: 20260240 NR Description: unknown protein [Arabidopsis thaliana]
  misc_feature (1)..(278): Homolog of NCBI NO: 21536591 NR Description: unknown [Arabidopsis thaliana]
  misc_feature (69)..(240): Homolog of NCBI NO: 7487326 NR Description: hypothetical protein T22A6.290 - Arabidopsis >gi|5051788|emb|CAB45081.1| hypothetical protein [Arabidopsis >gi|7269296|emb|CAB79356.1| hypothetical protein [Arabidopsis
  misc_feature (1)..(40): Homolog of NCBI NO: 7487326 NR Description: hypothetical protein T22A6.290 - Arabidopsis >gi|5051788|emb|CAB45081.1| hypothetical protein [Arabidopsis >gi|7269296|emb|CAB79356.1| hypothetical protein [Arabidopsis
  misc_feature (15)..(278): Homolog of NCBI NO: 15239887 NR Description: putative protein; protein id: At5g12170.1 thaliana] >gi|9759384|dbj|BAB10035.1|
  misc_feature (1)..(92): Homolog of NCBI NO: 28973717 NR Description: unknown protein [Arabidopsis thaliana]
  misc_feature (1)..(42): Homolog of NCBI NO: 20161872 NR Description: B1139B11.13 [Oryza sativa (japonica
MLYTRYRTGLVTRDMLALPKHRFVAIGLLEALGVFAGMSAGAMLPGPAIPILSQSFLVWQLIFSALLLGRTYSARQVIGCFLVVSGVILAVASGADDGQLLSDVKLIWPALMIASSAFHAGASILKEAVFIDGAKRLKGKRPDIFVVNSFGSGFQAVFVFLLLPFLSNLRGIKFAELPAYLNGGAECFLNVAESPIDCGGAPFLPLLFIMVNMAFNVSLLNLVKMSSAIVASLTATSAVPISIYILSLPLPYIPHGTELSTSFIIGAVILLMGLILYNLPQSSLKQLKAD

SEQ ID NO: 6910 - protein, 276 aa, Zea mays subsp. mays
  peptide (1)..(276): Ceres Seq. ID no. 12344538
  misc_feature (1)..(272): Homolog of NCBI NO: 30686536 NR Description: expressed protein [Arabidopsis thaliana]
  misc_feature (1)..(263): Homolog of NCBI NO: 21553716 NR Description: unknown [Arabidopsis thaliana]
  misc_feature (1)..(263): Homolog of NCBI NO: 18419900 NR Description: putative protein; protein id: At5g19380.1,
  misc_feature (1)..(264): Homolog of NCBI NO: 20260240 NR Description: unknown protein [Arabidopsis thaliana]
  misc_feature (1)..(264): Homolog of NCBI NO: 21536591 NR Description: unknown [Arabidopsis thaliana]
  misc_feature (55)..(226): Homolog of NCBI NO: 7487326 NR Description: hypothetical protein T22A6.290 - Arabidopsis >gi|5051788|emb|CAB45081.1| hypothetical protein [Arabidopsis >gi|7269296|emb|CAB79356.1| hypothetical protein [Arabidopsis
  misc_feature (1)..(26): Homolog of NCBI NO: 7487326 NR Description: hypothetical protein T22A6.290 - Arabidopsis >gi|5051788|emb|CAB45081.1| hypothetical protein [Arabidopsis >gi|7269296|emb|CAB79356.1| hypothetical protein [Arabidopsis
  misc_feature (1)..(264): Homolog of NCBI NO: 15239887 NR Description: putative protein; protein id: At5g12170.1 thaliana] >gi|9759384|dbj|BAB10035.1|
  misc_feature (1)..(78): Homolog of NCBI NO: 28973717 NR Description: unknown protein [Arabidopsis thaliana]
  misc_feature (1)..(28): Homolog of NCBI NO: 20161872 NR Description: B1139B11.13 [Oryza sativa (japonica
MLALPKHRFVAIGLLEALGVFAGMSAGAMLPGPAIPILSQSFLVWQLIFSALLLGRTYSARQVIGCFLVVSGVILAVASGADDGQLLSDVKLIWPALMIASSAFHAGASILKEAVFIDGAKRLKGKRPDIFVVNSFGSGFQAVFVFLLLPFLSNLRGIKFAELPAYLNGGAECFLNVAESPIDCGGAPFLPLLFIMVNMAFNVSLLNLVKMSSAIVASLTATSAVPISIYILSLPLPYIPHGTELSTSFIIGAVILLMGLILYNLPQSSLKQLKAD

SEQ ID NO: 6911 - DNA, 1677 bp, Zea mays subsp. mays
  misc_feature (1)..(1677): Ceres Seq. ID no. 13492998
  misc_feature: MA Experiment ID: 108534 Result: Down-regulated in Transcription
  misc_feature: MA Experiment 108534 PARAMETER Experiment Name: Zm_4deg_Cold_P Parameter: Age (hr) Value: 8
  misc_feature: MA Experiment 108534 PARAMETER Experiment Name: Zm_4deg_Cold_P Parameter: Organism Value: Zea mays
  misc_feature: MA Experiment 108534 PARAMETER Experiment Name: Zm_4deg_Cold_P Parameter: Plant Line Value: 35A19
  misc_feature: MA Experiment 108534 PARAMETER Experiment Name: Zm_4deg_Cold_P Parameter: Temperature (deg C) Value: 4 vs. 22
  misc_feature: MA Experiment 108534 PARAMETER Experiment Name: Zm_4deg_Cold_P Parameter: Timepoint (hr) Value: 6
  misc_feature: MA Experiment 108534 PARAMETER Experiment Name: Zm_4deg_Cold_P Parameter: Tissue Value: Aerial
  misc_feature: MA Experiment ID: 108535 Result: Down-regulated in Transcription
  misc_feature: MA Experiment 108535 PARAMETER Experiment Name: Zm_Meristem_P Parameter: Age (day) Value: 8
  misc_feature: MA Experiment 108535 PARAMETER Experiment Name: Zm_Meristem_P Parameter: Organism Value: Zea mays
  misc_feature: MA Experiment 108535 PARAMETER Experiment Name: Zm_Meristem_P Parameter: Plant Line Value: 35A19
  misc_feature: MA Experiment 108535 PARAMETER Experiment Name: Zm_Meristem_P Parameter: Tissue Value: Root Meristem vs. Above Root Meristem
  misc_feature: MA Experiment ID: 108544 Result: Up-regulated in Transcription
  misc_feature: MA Experiment ID: 20000108 Result: Down-regulated in Transcription
  misc_feature: MA Experiment 20000108 PARAMETER Experiment Name: Zm_Root-Tips_P Parameter: Age (day) Value: 12
  misc_feature: MA Experiment 20000108 PARAMETER Experiment Name: Zm_Root-Tips_P Parameter: Organism Value: Zea mays
  misc_feature: MA Experiment 20000108 PARAMETER Experiment Name: Zm_Root-Tips_P Parameter: Tissue Value: Root tips vs. Root mid region    35
  misc_feature: MA Experiment 20000108 PARAMETER Experiment Name: Zm_Root-Tips_P Parameter: Tissue Value: Root tips vs. Root mid region   Sequence Listing-Misc Features (4)
acaccgggccgtgccgatgggtgtttacgagtagcagctgtatctcgttgacctcaccgcctgcagggcaccaaggaggagatgacttccccgaagcgggcagcagggcgggaagggtgcggatgcttggccgccgtcgcgcggggcctccgcggggcgtgcttccggccggcggtgacggcggacggtgacggcggcggctcggccaagggcagccacgttcacgacgcagcagagacaagatatctgaatgctagcaatcgggagcttggtgatcattttcagacaaaacgtgatggtgaaaatggtgttgatgcatcaattgaaaagagaacacccaagctacttcagtttacctttcaagagttgaaatctgccacgcttaacttcaggccagacagtattcttggggagggtgggttcggttatgtattcaaggggtggattgagccaaacagcactgctcctgcaaaacctggcacaggggttactgtggcagtcaaaagtttgaagccagatgcgcttcaaggtcatagagaatgggtggcagaagttgactttctgggacagttgcatcataaacaccttgttaagctgattggattgtattgaggatgatcaaaggttacttgtatatgaattcatggcacggggaagtcttgaaaatcatcttttcagaagggctcttcccctaccttggtccaacaggatgaagattgctctaggtgccgcgaaaggactagccttcctccatggaggtcccaaacctgttatttacagggattttaagacatcgaatgttcttcttgatgtggagtacaacgcaaaactatctgatttcggtttagcaaaagctggtcctcagggtgataaaactcatgtatctactcgggttgttggcacctatggttatgctgcaccagagtatgtaatgacagggcacttgacatctaagagtgatgtttatagcttcggagttgtgctactcgagatgttgactgggagaagatcaatggacaagaagcggcctacgggggagcagaacctggttgcatgggcaaggccttacctaaatgatcggcgaaggctctatcagcttgtagatcctcgcttggggctgaactactctgtcaaaggggtgcaaaaggtcgctcagatctgccactactgccttacccgtgacagtaagtctcgcccatcgatggatgaagttgtcaagcaactcacaccattacaagatctaaacgacatggcatctgcttcgccaaggcctcgctcaactcagcgcggaaaggtgcatcgatgacaacccggttctgttgtaagaagagcagtgtggtcctggttgcttgatgcttgtttggtttaattgtatagcaaaattaggtgttgcctgccgatacctggagatgtgactccgcctgatgtgtcgctcaggtcagtcacactgctctgctgtttggctggttgccaaagcaagataacgatgtatctggttgcatcatgtaataattattataattaccatttaacttctggcgggggtacatcatgtaatggttggtgtacacccaggttagtaatcttaatagtgtttggctgacaggctgagggtcagtagacggtttgcagttcgcttttttcaggggaaaggtacaggtgttaaattgtgattgt

SEQ ID NO: 6912 - protein, 220 aa, Zea mays subsp. mays
  peptide (1)..(220): Ceres Seq. ID no. 13492999
  misc_feature (1)..(194): Pfam Name: Protein kinase domain Pfam Description: Protein kinase domain
  misc_feature (1)..(215): Homolog of NCBI NO: 34898434 NR Description: ESTs C98382(C2985),D22444(C11129) correspond to a of the predicted gene.~Similar to Arabidopsis thaliana APK1 gene
  misc_feature (1)..(207): Homolog of NCBI NO: 34912198 NR Description: putative protein kinase [Oryza sativa (japonica group)] >gi|20160990|dbj|BAB89924.1| putative protein kinase
  misc_feature (1)..(207): Homolog of NCBI NO: 28804505 NR Description: serine/threonine protein kinase [Aster tripolium]
  misc_feature (1)..(207): Homolog of NCBI NO: 15232085 NR Description: protein kinase -related [Arabidopsis thaliana] putative protein kinase [Arabidopsis thaliana]
  misc_feature (1)..(207): Homolog of NCBI NO: 21592646 NR Description: putative protein kinase [Arabidopsis thaliana]
  misc_feature (1)..(207): Homolog of NCBI NO: 15242204 NR Description: serine/threonine specific protein kinase -related
  misc_feature (1)..(207): Homolog of NCBI NO: 15233058 NR Description: protein kinase -related [Arabidopsis thaliana]
  misc_feature (1)..(207): Homolog of NCBI NO: 9294282 NR Description: protein kinase [Arabidopsis thaliana]
  misc_feature (1)..(217): Homolog of NCBI NO: 14719339 NR Description: putative protein kinase [Oryza sativa]
  misc_feature (1)..(212): Homolog of NCBI NO: 34906046 NR Description: putative serine/threonine-specific protein kinase
MARGSLENHLFRRALPLPWSNRMKIALGAAKGLAFLHGGPKPVIYRDFKTSNVLLDVEYNAKLSDFGLAKAGPQGDKTHVSTRVVGTYGYAAPEYVMTGHLTSKSDVYSFGVVLLEMLTGRRSMDKKRPTGEQNLVAWARPYLNDRRRLYQLVDPRLGLNYSVKGVQKVAQICHYCLTRDSKSRPSMDEVVKQLTPLQDLNDMASASPRPRSTQRGKVHR

SEQ ID NO: 6913 - protein, 198 aa, Zea mays subsp. mays
  peptide (1)..(198): Ceres Seq. ID no. 13493000
  misc_feature (1)..(172): Pfam Name: Protein kinase domain Pfam Description: Protein kinase domain
  misc_feature (1)..(193): Homolog of NCBI NO: 34898434 NR Description: ESTs C98382(C2985),D22444(C11129) correspond to a of the predicted gene.~Similar to Arabidopsis thaliana APK1 gene
  misc_feature (1)..(185): Homolog of NCBI NO: 34912198 NR Description: putative protein kinase [Oryza sativa (japonica group)] >gi|20160990|dbj|BAB89924.1| putative protein kinase
  misc_feature (1)..(185): Homolog of NCBI NO: 28804505 NR Description: serine/threonine protein kinase [Aster tripolium]
  misc_feature (1)..(185): Homolog of NCBI NO: 15232085 NR Description: protein kinase -related [Arabidopsis thaliana] putative protein kinase [Arabidopsis thaliana]
  misc_feature (1)..(185): Homolog of NCBI NO: 21592646 NR Description: putative protein kinase [Arabidopsis thaliana]
  misc_feature (1)..(185): Homolog of NCBI NO: 15242204 NR Description: serine/threonine specific protein kinase -related
  misc_feature (1)..(185): Homolog of NCBI NO: 15233058 NR Description: protein kinase -related [Arabidopsis thaliana]
  misc_feature (1)..(185): Homolog of NCBI NO: 9294282 NR Description: protein kinase [Arabidopsis thaliana]
  misc_feature (1)..(195): Homolog of NCBI NO: 14719339 NR Description: putative protein kinase [Oryza sativa]
  misc_feature (1)..(190): Homolog of NCBI NO: 34906046 NR Description: putative serine/threonine-specific protein kinase
MKIALGAAKGLAFLHGGPKPVIYRDFKTSNVLLDVEYNAKLSDFGLAKAGPQGDKTHVSTRVVGTYGYAAPEYVMTGHLTSKSDVYSFGVVLLEMLTGRRSMDKKRPTGEQNLVAWARPYLNDRRRLYQLVDPRLGLNYSVKGVQKVAQICHYCLTRDSKSRPSMDEVVKQLTPLQDLNDMASASPRPRSTQRGKVHR

SEQ ID NO: 6914 - protein, 176 aa, Zea mays subsp. mays
  peptide (1)..(176): Ceres Seq. ID no. 13493001
  misc_feature (103)..(174): Pfam Name: Protein kinase domain Pfam Description: Protein kinase domain
  misc_feature (4)..(174): Homolog of NCBI NO: 34898434 NR Description: ESTs C98382(C2985),D22444(C11129) correspond to a of the predicted gene.~Similar to Arabidopsis thaliana APK1 gene
  misc_feature (1)..(174): Homolog of NCBI NO: 34912198 NR Description: putative protein kinase [Oryza sativa (japonica group)] >gi|20160990|dbj|BAB89924.1| putative protein kinase
  misc_feature (22)..(174): Homolog of NCBI NO: 28804505 NR Description: serine/threonine protein kinase [Aster tripolium]
  misc_feature (88)..(174): Homolog of NCBI NO: 15232085 NR Description: protein kinase -related [Arabidopsis thaliana] putative protein kinase [Arabidopsis thaliana]
  misc_feature (88)..(174): Homolog of NCBI NO: 21592646 NR Description: putative protein kinase [Arabidopsis thaliana]
  misc_feature (88)..(174): Homolog of NCBI NO: 15242204 NR Description: serine/threonine specific protein kinase -related
  misc_feature (83)..(174): Homolog of NCBI NO: 15233058 NR Description: protein kinase -related [Arabidopsis thaliana]
  misc_feature (83)..(174): Homolog of NCBI NO: 9294282 NR Description: protein kinase [Arabidopsis thaliana]
  misc_feature (91)..(174): Homolog of NCBI NO: 14719339 NR Description: putative protein kinase [Oryza sativa]
  misc_feature (40)..(174): Homolog of NCBI NO: 34906046 NR Description: putative serine/threonine-specific protein kinase
MTSPKRAAGREGCGCLAAVARGLRGACFRPAVTADGDGGGSAKGSHVHDAAETRYLNASNRELGDHFQTKRDGENGVDASIEKRTPKLLQFTFQELKSATLNFRPDSILGEGGFGYVFKGWIEPNSTAPAKPGTGVTVAVKSLKPDALQGHREWVAEVDFLGQLHHKHLVKLIGLY

SEQ ID NO: 6915 - DNA, 1601 bp, Zea mays subsp. mays
  misc_feature (1)..(1601): Ceres Seq. ID no. 12352454
  misc_feature: MA Experiment ID: 108543 Result: Down-regulated in Transcription
aggtcggtcctacacggtcccgttctgcctggtgcctgcaacctgccttttcttcttccgtcgccacccagcgtgctctctctccctctttctctctctctcgtggcggcgcctgggcagccgtcgctgccgcctgcgctaggtgccaggtcttcttcgggcccttcgccggcgacgagtaccaccaggttgtacatgtgtacacccatgtgctttactgggtcggaccctactcatcctccacactaaggccatctccatagactgcactgtttagactccactgtttagagagtggagatagggagtgagatagagagtggaatagggaggatgctggagatagcctaaggttgccactgagtgtgtgcatgattcagaggcaatgtcatcacaaactggaggtggcaaagagagtgacgccggccctgggcaacacaggcagatgcaaagtttggcaagacaagggtctttatacaaccttaccctcgatgaggtgcagaaccatttgggggagccattgcttagcatgaattttgatgagctcctgaagagcgtgtttcctgatggtgtagattcagatggtgctgtcacaggcaagcctgatcggacctcgagcctgcagcgacaggggagcatcctgatgcctccgcagttgagcaagaagactgttgacgaggtgtggaagggcatccagggtggaccagagaccagtactgtggtggatggtctgcagaggcgagagaggcatccaacacttggggagatgacacttgaggacttcttggtcaaagctggggttgttactgaaggacttgtgaaggattcagctgattttccaagcaatatggatacagctggcagcagtgttgttgtggctgctgcttctagtttgaaccctggagcacagtggttgcaacagtaccagcagcaagttttggggtcccagcaattgagtttggcaggttcatacatggctagtcagttgcgccctcagccattgtctattgctacaggtgctactttggattcaatttactctgatgaccagattacttcgccatcatttggtgcactttcggaccctcagacacctgggcgcaagcgtggtgccttaggggaggtagtggataaggtggttgaaagaaggcagaagaggatgataaagaatagggaatcagctgcgcgatcaagagcgagaaagcaggcttatactaatgaacttgaaaacaaggtattccgtctagaagaggagaataagaggctaaagaaacagcaggagttggatgagatactgagctctgctcctcccccagaacccaaatatcaactcaggagaacgggttcggctgccttttgagtttcggcgctgacaatgctcatagtgatttttgtacattatacaaggattctactttatatggtttccttccttttgtattagaaacatttgatagattgagggtatagctttttcccggcccggtaggtcagtgtatgtaggtcgctagcaagctgtagcatgtcctggcggatcatttccttggtgtctgtcagtgtgtacatcttctagacacatgtctaagtctgagagcttcctt

SEQ ID NO: 6916 - protein, 324 aa, Zea mays subsp. mays
  peptide (1)..(324): Ceres Seq. ID no. 12352455
  misc_feature (185)..(324): Homolog of NCBI NO: 15230146 NR Description: ABA-responsive element binding protein 3; protein At3g56850.1, supported by cDNA: gi_13346154, supported by cDNA: supported by cDNA: gi_20148682, supported by cDNA: gi_9967420
  misc_feature (10)..(181): Homolog of NCBI NO: 13346155 NR Description: bZIP protein DPBF3 [Arabidopsis thaliana]
  misc_feature (185)..(324): Homolog of NCBI NO: 13346155 NR Description: bZIP protein DPBF3 [Arabidopsis thaliana]
  misc_feature (22)..(145): Homolog of NCBI NO: 18405590 NR Description: bZIP family transcription factor; protein id: supported by cDNA: 114632., supported by cDNA: gi_13346156 thaliana] >gi|13346157|gb|AAK19602.1|AF334209_1 bZIP putative
  misc_feature (229)..(323): Homolog of NCBI NO: 18405590 NR Description: bZIP family transcription factor; protein id: supported by cDNA: 114632., supported by cDNA: gi_13346156 thaliana] >gi|13346157|gb|AAK19602.1|AF334209_1 bZIP putative
  misc_feature (22)..(145): Homolog of NCBI NO: 26451276 NR Description: putative bZIP transcription factor AtbZIP12 /
  misc_feature (229)..(323): Homolog of NCBI NO: 26451276 NR Description: putative bZIP transcription factor AtbZIP12 /
  misc_feature (78)..(324): Homolog of NCBI NO: 7489325 NR Description: Dc3 promoter-binding factor-3 - common sunflower
  misc_feature (1)..(299): Homolog of NCBI NO: 34909206 NR Description: putative promoter-binding factor-like protein
  misc_feature (10)..(181): Homolog of NCBI NO: 15230146 NR Description: ABA-responsive element binding protein 3; protein At3g56850.1, supported by cDNA: gi_13346154, supported by cDNA: supported by cDNA: gi_20148682, supported by cDNA: gi_9967420
MSSQTGGGKESDAGPGQHRQMQSLARQGSLYNLTLDEVQNHLGEPLLSMNFDELLKSVFPDGVDSDGAVTGKPDRTSSLQRQGSILMPPQLSKKTVDEVWKGIQGGPETSTVVDGLQRRERHPTLGEMTLEDFLVKAGVVTEGLVKDSADFPSNMDTAGSSVVVAAASSLNPGAQWLQQYQQQVLGSQQLSLAGSYMASQLRPQPLSIATGATLDSIYSDDQITSPSFGALSDPQTPGRKRGALGEVVDKVVERRQKRMIKNRESAARSRARKQAYTNELENKVFRLEEENKRLKKQQELDEILSSAPPPEPKYQLRRTGSAAF

SEQ ID NO: 6917 - protein, 304 aa, Zea mays subsp. mays
  peptide (1)..(304): Ceres Seq. ID no. 12352456
  misc_feature (1)..(279): Homolog of NCBI NO: 34909206 NR Description: putative promoter-binding factor-like protein
  misc_feature (1)..(161): Homolog of NCBI NO: 15230146 NR Description: ABA-responsive element binding protein 3; protein At3g56850.1, supported by cDNA: gi_13346154, supported by cDNA: supported by cDNA: gi_20148682, supported by cDNA: gi_9967420
  misc_feature (165)..(304): Homolog of NCBI NO: 15230146 NR Description: ABA-responsive element binding protein 3; protein At3g56850.1, supported by cDNA: gi_13346154, supported by cDNA: supported by cDNA: gi_20148682, supported by cDNA: gi_9967420
  misc_feature (1)..(161): Homolog of NCBI NO: 13346155 NR Description: bZIP protein DPBF3 [Arabidopsis thaliana]
  misc_feature (165)..(304): Homolog of NCBI NO: 13346155 NR Description: bZIP protein DPBF3 [Arabidopsis thaliana]
  misc_feature (2)..(125): Homolog of NCBI NO: 18405590 NR Description: bZIP family transcription factor; protein id: supported by cDNA: 114632., supported by cDNA: gi_13346156 thaliana] >gi|13346157|gb|AAK19602.1|AF334209_1 bZIP putative
  misc_feature (209)..(303): Homolog of NCBI NO: 18405590 NR Description: bZIP family transcription factor; protein id: supported by cDNA: 114632., supported by cDNA: gi_13346156 thaliana] >gi|13346157|gb|AAK19602.1|AF334209_1 bZIP putative
  misc_feature (2)..(125): Homolog of NCBI NO: 26451276 NR Description: putative bZIP transcription factor AtbZIP12 /
  misc_feature (209)..(303): Homolog of NCBI NO: 26451276 NR Description: putative bZIP transcription factor AtbZIP12 /
  misc_feature (58)..(304): Homolog of NCBI NO: 7489325 NR Description: Dc3 promoter-binding factor-3 - common sunflower
MQSLARQGSLYNLTLDEVQNHLGEPLLSMNFDELLKSVFPDGVDSDGAVTGKPDRTSSLQRQGSILMPPQLSKKTVDEVWKGIQGGPETSTVVDGLQRRERHPTLGEMTLEDFLVKAGVVTEGLVKDSADFPSNMDTAGSSVVVAAASSLNPGAQWLQQYQQQVLGSQQLSLAGSYMASQLRPQPLSIATGATLDSIYSDDQITSPSFGALSDPQTPGRKRGALGEVVDKVVERRQKRMIKNRESAARSRARKQAYTNELENKVFRLEEENKRLKKQQELDEILSSAPPPEPKYQLRRTGSAAF

SEQ ID NO: 6918 - protein, 276 aa, Zea mays subsp. mays
  peptide (1)..(276): Ceres Seq. ID no. 12352457
  misc_feature (1)..(251): Homolog of NCBI NO: 34909206 NR Description: putative promoter-binding factor-like protein
  misc_feature (1)..(133): Homolog of NCBI NO: 15230146 NR Description: ABA-responsive element binding protein 3; protein At3g56850.1, supported by cDNA: gi_13346154, supported by cDNA: supported by cDNA: gi_20148682, supported by cDNA: gi_9967420
  misc_feature (137)..(276): Homolog of NCBI NO: 15230146 NR Description: ABA-responsive element binding protein 3; protein At3g56850.1, supported by cDNA: gi_13346154, supported by cDNA: supported by cDNA: gi_20148682, supported by cDNA: gi_9967420
  misc_feature (1)..(133): Homolog of NCBI NO: 13346155 NR Description: bZIP protein DPBF3 [Arabidopsis thaliana]
  misc_feature (137)..(276): Homolog of NCBI NO: 13346155 NR Description: bZIP protein DPBF3 [Arabidopsis thaliana]
  misc_feature (1)..(97): Homolog of NCBI NO: 18405590 NR Description: bZIP family transcription factor; protein id: supported by cDNA: 114632., supported by cDNA: gi_13346156 thaliana] >gi|13346157|gb|AAK19602.1|AF334209_1 bZIP putative
  misc_feature (181)..(275): Homolog of NCBI NO: 18405590 NR Description: bZIP family transcription factor; protein id: supported by cDNA: 114632., supported by cDNA: gi_13346156 thaliana] >gi|13346157|gb|AAK19602.1|AF334209_1 bZIP putative
  misc_feature (1)..(97): Homolog of NCBI NO: 26451276 NR Description: putative bZIP transcription factor AtbZIP12 /
  misc_feature (181)..(275): Homolog of NCBI NO: 26451276 NR Description: putative bZIP transcription factor AtbZIP12 /
  misc_feature (30)..(276): Homolog of NCBI NO: 7489325 NR Description: Dc3 promoter-binding factor-3 - common sunflower
MNFDELLKSVFPDGVDSDGAVTGKPDRTSSLQRQGSILMPPQLSKKTVDEVWKGIQGGPETSTVVDGLQRRERHPTLGEMTLEDFLVKAGVVTEGLVKDSADFPSNMDTAGSSVVVAAASSLNPGAQWLQQYQQQVLGSQQLSLAGSYMASQLRPQPLSIATGATLDSIYSDDQITSPSFGALSDPQTPGRKRGALGEVVDKVVERRQKRMIKNRESAARSRARKQAYTNELENKVFRLEEENKRLKKQQELDEILSSAPPPEPKYQLRRTGSAAF

SEQ ID NO: 6919 - DNA, 1465 bp, Zea mays subsp. mays
  misc_feature (1)..(1465): Ceres Seq. ID no. 12383185
  misc_feature: MA Experiment ID: 20000492 Result: Up-regulated in Transcription
  misc_feature: MA Experiment 20000492 PARAMETER Experiment Name: Zm_Hybrid_Seed_Dev_P Parameter: DAP Value: 12
  misc_feature: MA Experiment 20000492 PARAMETER Experiment Name: Zm_Hybrid_Seed_Dev_P Parameter: Organism Value: Zea mays
  misc_feature: MA Experiment 20000492 PARAMETER Experiment Name: Zm_Hybrid_Seed_Dev_P Parameter: Plant Line Value: 35A19
  misc_feature: MA Experiment 20000492 PARAMETER Experiment Name: Zm_Hybrid_Seed_Dev_P Parameter: Tissue Value: Fert Kernel vs. Unfert Floret
  misc_feature: MA Experiment ID: 20000534 Result: Down-regulated in Transcription
  misc_feature: MA Experiment 20000534 PARAMETER Experiment Name: Zm_Hybrid_Pollen_P Parameter: Age (day) Value: 8
  misc_feature: MA Experiment 20000534 PARAMETER Experiment Name: Zm_Hybrid_Pollen_P Parameter: Organism Value: Zea mays
  misc_feature: MA Experiment 20000534 PARAMETER Experiment Name: Zm_Hybrid_Pollen_P Parameter: Plant Line Value: 35A19
  misc_feature: MA Experiment 20000534 PARAMETER Experiment Name: Zm_Hybrid_Pollen_P Parameter: Tissue Value: Pollen vs. Aerial
  misc_feature: MA Experiment ID: 20000535 Result: Up-regulated in Transcription
  misc_feature: MA Experiment 20000535 PARAMETER Experiment Name: Zm_Hybrid_Seed_Dev_P Parameter: DAP Value: 30 vs. 12
  misc_feature: MA Experiment 20000535 PARAMETER Experiment Name: Zm_Hybrid_Seed_Dev_P Parameter: Organism Value: Zea mays
  misc_feature: MA Experiment 20000535 PARAMETER Experiment Name: Zm_Hybrid_Seed_Dev_P Parameter: Plant Line Value: 35A19
  misc_feature: MA Experiment 20000535 PARAMETER Experiment Name: Zm_Hybrid_Seed_Dev_P Parameter: Tissue Value: Embryo vs. Unfert Floret
gaatctcacacccaaaagtttcccactgccctggtcccccattcaattcttccaactccgccgcttcgcctcgttccgtccgccgcccccatggcgtccgccgccgccacgaccacctccgcccccgcccagaacctcaatccccttagtatcaacatcaagctccccccatggctcagcgggctgcgctgccccttcaccttcgtctgcccgcccccgcccccgcctccgccgccgccgccgcctcctcccccgctgccacctacggaacccgtggtcccacggtcgcggaggttaccaagcctgcgggtgaccacggagtacgatagcgaagagggcgtgtttgtgaacaaggtgtcgtgcaagcttgcgggggacctcgccaaactgcggctctccttccagagcgacccgcaggggcagtggcaagggggcggggaggaaggggacccgctacagcagctcttcgccgcgccgttggtggggctcatcaccaagcgtttctccgtgctctacgacgtcgaggcacgcaacgcgctgctccgcggagactgctcgcttcccggaggcgccgtccagctccgtgcctcgcatgatgtcaaggcacaacaaggagaagtttcggtgatcactagtttgggtgatccattgtataaaatggagttatcatctttggtgccttacagtggtttgccaagggcaacattccactttcctattggtcaagtttcagtggaagagaagagaaatgaagatgatgagaaggtgctgtctgtatatgggattggaaaatctgatttcttggacggtgttcttactgctcagtacaatgaaaatgatcttaatctaagatattgttataaggacaaggaattaactttagttccaagtgtctcgttgccttccaatgcagtatccatagacttcaaaaggcgttttggtcctgatgataagttgagctaccgttacatcttcgacactgatgaatggaatgctgtttataaacataaagtgggtaaaaatttcaaagtgaaagctggttatgattctgaggtgcgagtcggatgggcttctctttgggttggagaagaagggggcaaggcgaagactgcgccaatgaaaacaaaacttcagcttatgcttcaagtaccccaggataatcccagaaatccttattttctcttcaatgtgaagaaacgatgggatctgtaaataggtgtaagttatccattatgtggactccaaaggcttcggccaaccttttgttgcaatcttcgtaggtcaacagcaacacaatccatgagctctttctatttatcatatattttcaactactgtacgtagttagtacacagcgccccaagtaatccaaaatttatgtaaactctaaccctaaaccctaagtacttgttcgttttgttctcaatccatgtagattgagtgggattaagtgagtttcaattct

SEQ ID NO: 6920 - protein, 403 aa, Zea mays subsp. mays
  peptide (1)..(403): Ceres Seq. ID no. 12383186
  misc_feature (72)..(403): Homolog of NCBI NO: 18406405 NR Description: expressed protein; protein id: At2g43950.1, by cDNA: gi_15028228, supported by cDNA: gi_19310818 [Arabidopsis >gi|15028229|gb|AAK76611.1| unknown protein [Arabidopsis
  misc_feature (72)..(339): Homolog of NCBI NO: 30689554 NR Description: expressed protein [Arabidopsis thaliana]
  misc_feature (72)..(311): Homolog of NCBI NO: 7486492 NR Description: hypothetical protein At2g43950 [imported] -
  misc_feature (271)..(403): Homolog of NCBI NO: 7486492 NR Description: hypothetical protein At2g43950 [imported] -
  misc_feature (56)..(91): Homolog of NCBI NO: 17158343 NR Description: wsv239 [shrimp white spot syndrome virus] wsv239 [shrimp white spot syndrome virus]
  misc_feature (65)..(101): Homolog of NCBI NO: 17158343 NR Description: wsv239 [shrimp white spot syndrome virus] wsv239 [shrimp white spot syndrome virus]
  misc_feature (71)..(149): Homolog of NCBI NO: 1644457 NR Description: neural variant mena+ protein [Mus musculus]
  misc_feature (71)..(149): Homolog of NCBI NO: 1644459 NR Description: neural variant mena++ protein [Mus musculus]
  misc_feature (71)..(149): Homolog of NCBI NO: 6753754 NR Description: enabled homolog (Drosophila) [Mus musculus]
  misc_feature (71)..(91): Homolog of NCBI NO: 28829166 NR Description: similar to Volvox carteri f. nagariensis.
ESHTQKFPTALVPHSILPTPPLRLVPSAAPMASAAATTTSAPAQNLNPLSINIKLPPWLSGLRCPFTFVCPPPPPPPPPPPPPPPLPPTEPVVPRSRRLPSLRVTTEYDSEEGVFVNKVSCKLAGDLAKLRLSFQSDPQGQWQGGGEEGDPLQQLFAAPLVGLITKRFSVLYDVEARNALLRGDCSLPGGAVQLRASHDVKAQQGEVSVITSLGDPLYKMELSSLVPYSGLPRATFHFPIGQVSVEEKRNEDDEKVLSVYGIGKSDFLDGVLTAQYNENDLNLRYCYKDKELTLVPSVSLPSNAVSIDFKRRFGPDDKLSYRYIFDTDEWNAVYKHKVGKNFKVKAGYDSEVRVGWASLWVGEEGGKAKTAPMKTKLQLMLQVPQDNPRNPYFLFNVKKRWDL

SEQ ID NO: 6921 - protein, 373 aa, Zea mays subsp. mays
  peptide (1)..(373): Ceres Seq. ID no. 12383187
  misc_feature (42)..(373): Homolog of NCBI NO: 18406405 NR Description: expressed protein; protein id: At2g43950.1, by cDNA: gi_15028228, supported by cDNA: gi_19310818 [Arabidopsis >gi|15028229|gb|AAK76611.1| unknown protein [Arabidopsis
  misc_feature (42)..(309): Homolog of NCBI NO: 30689554 NR Description: expressed protein [Arabidopsis thaliana]
  misc_feature (42)..(281): Homolog of NCBI NO: 7486492 NR Description: hypothetical protein At2g43950 [imported] -
  misc_feature (241)..(373): Homolog of NCBI NO: 7486492 NR Description: hypothetical protein At2g43950 [imported] -
  misc_feature (26)..(61): Homolog of NCBI NO: 17158343 NR Description: wsv239 [shrimp white spot syndrome virus] wsv239 [shrimp white spot syndrome virus]
  misc_feature (35)..(71): Homolog of NCBI NO: 17158343 NR Description: wsv239 [shrimp white spot syndrome virus] wsv239 [shrimp white spot syndrome virus]
  misc_feature (41)..(119): Homolog of NCBI NO: 1644457 NR Description: neural variant mena+ protein [Mus musculus]
  misc_feature (41)..(119): Homolog of NCBI NO: 1644459 NR Description: neural variant mena++ protein [Mus musculus]
  misc_feature (41)..(119): Homolog of NCBI NO: 6753754 NR Description: enabled homolog (Drosophila) [Mus musculus]
  misc_feature (41)..(61): Homolog of NCBI NO: 28829166 NR Description: similar to Volvox carteri f. nagariensis.
MASAAATTTSAPAQNLNPLSINIKLPPWLSGLRCPFTFVCPPPPPPPPPPPPPPPLPPTEPVVPRSRRLPSLRVTTEYDSEEGVFVNKVSCKLAGDLAKLRLSFQSDPQGQWQGGGEEGDPLQQLFAAPLVGLITKRFSVLYDVEARNALLRGDCSLPGGAVQLRASHDVKAQQGEVSVITSLGDPLYKMELSSLVPYSGLPRATFHFPIGQVSVEEKRNEDDEKVLSVYGIGKSDFLDGVLTAQYNENDLNLRYCYKDKELTLVPSVSLPSNAVSIDFKRRFGPDDKLSYRYIFDTDEWNAVYKHKVGKNFKVKAGYDSEVRVGWASLWVGEEGGKAKTAPMKTKLQLMLQVPQDNPRNPYFLFNVKKRWDL

SEQ ID NO: 6922 - DNA, 1378 bp, Zea mays subsp. mays
  misc_feature (1)..(1378): Ceres Seq. ID no. 12352458
  misc_feature: MA Experiment ID: 108528 Result: Up-regulated in Transcription
  misc_feature: MA Experiment 108528 PARAMETER Experiment Name: Zm_Imbibed_Seeds_P Parameter: Age (day) Value: 5 vs. 2
  misc_feature: MA Experiment 108528 PARAMETER Experiment Name: Zm_Imbibed_Seeds_P Parameter: Organism Value: Zea mays
  misc_feature: MA Experiment 108528 PARAMETER Experiment Name: Zm_Imbibed_Seeds_P Parameter: Plant Line Value: 35A19
  misc_feature: MA Experiment 108528 PARAMETER Experiment Name: Zm_Imbibed_Seeds_P Parameter: Tissue Value: Aerial vs. Embryo
  misc_feature: MA Experiment ID: 108529 Result: Up-regulated in Transcription
  misc_feature: MA Experiment 108529 PARAMETER Experiment Name: Zm_Imbibed_Seeds_P Parameter: Age (day) Value: 5 vs. 2
  misc_feature: MA Experiment 108529 PARAMETER Experiment Name: Zm_Imbibed_Seeds_P Parameter: Organism Value: Zea mays
  misc_feature: MA Experiment 108529 PARAMETER Experiment Name: Zm_Imbibed_Seeds_P Parameter: Plant Line Value: 35A19
  misc_feature: MA Experiment 108529 PARAMETER Experiment Name: Zm_Imbibed_Seeds_P Parameter: Tissue Value: Roots vs. Embryo
  misc_feature: MA Experiment ID: 108530 Result: Up-regulated in Transcription
  misc_feature: MA Experiment 108530 PARAMETER Experiment Name: Zm_Imbibed_Seeds_P Parameter: Age (day) Value: 6 vs. 2
  misc_feature: MA Experiment 108530 PARAMETER Experiment Name: Zm_Imbibed_Seeds_P Parameter: Organism Value: Zea mays
  misc_feature: MA Experiment 108530 PARAMETER Experiment Name: Zm_Imbibed_Seeds_P Parameter: Plant Line Value: 35A19
  misc_feature: MA Experiment 108530 PARAMETER Experiment Name: Zm_Imbibed_Seeds_P Parameter: Tissue Value: Aerial vs. Embryo
  misc_feature: MA Experiment ID: 108534 Result: Up-regulated in Transcription
  misc_feature: MA Experiment 108534 PARAMETER Experiment Name: Zm_4deg_Cold_P Parameter: Age (hr) Value: 8
  misc_feature: MA Experiment 108534 PARAMETER Experiment Name: Zm_4deg_Cold_P Parameter: Organism Value: Zea mays
  misc_feature: MA Experiment 108534 PARAMETER Experiment Name: Zm_4deg_Cold_P Parameter: Plant Line Value: 35A19
  misc_feature: MA Experiment 108534 PARAMETER Experiment Name: Zm_4deg_Cold_P Parameter: Temperature (deg C) Value: 4 vs. 22
  misc_feature: MA Experiment 108534 PARAMETER Experiment Name: Zm_4deg_Cold_P Parameter: Timepoint (hr) Value: 6
  misc_feature: MA Experiment 108534 PARAMETER Experiment Name: Zm_4deg_Cold_P Parameter: Tissue Value: Aerial
  misc_feature: MA Experiment ID: 108543 Result: Down-regulated in Transcription
  misc_feature: MA Experiment ID: 108544 Result: Down-regulated in Transcription
  misc_feature: MA Experiment ID: 108556 Result: Up-regulated in Transcription
  misc_feature: MA Experiment 108556 PARAMETER Experiment Name: Zm_Drought_P Parameter: Age (day) Value: 9
  misc_feature: MA Experiment 108556 PARAMETER Experiment Name: Zm_Drought_P Parameter: Organism Value: Zea mays
  misc_feature: MA Experiment 108556 PARAMETER Experiment Name: Zm_Drought_P Parameter: Plant Line Value: 35A19
  misc_feature: MA Experiment 108556 PARAMETER Experiment Name: Zm_Drought_P Parameter: Timepoint (hr) Value: 24
  misc_feature: MA Experiment 108556 PARAMETER Experiment Name: Zm_Drought_P Parameter: Tissue Value: Aerial
  misc_feature: MA Experiment 108556 PARAMETER Experiment Name: Zm_Drought_P Parameter: Treatment Value: Drought vs. No Drought
  misc_feature: MA Experiment ID: 108559 Result: Down-regulated in Transcription
  misc_feature: MA Experiment 108559 PARAMETER Experiment Name: Zm_5mM_NO_P Parameter: Age (day) Value: 8
  misc_feature: MA Experiment 108559 PARAMETER Experiment Name: Zm_5mM_NO_P Parameter: Organism Value: Zea mays
  misc_feature: MA Experiment 108559 PARAMETER Experiment Name: Zm_5mM_NO_P Parameter: Plant Line Value: 35A19
  misc_feature: MA Experiment 108559 PARAMETER Experiment Name: Zm_5mM_NO_P Parameter: Timepoint (hr) Value: 12
  misc_feature: MA Experiment 108559 PARAMETER Experiment Name: Zm_5mM_NO_P Parameter: Tissue Value: Aerial
  misc_feature: MA Experiment 108559 PARAMETER Experiment Name: Zm_5mM_NO_P Parameter: Treatment Value: 5mM NO vs. No Treatment
  misc_feature: MA Experiment ID: 108597 Result: Up-regulated in Transcription
  misc_feature: MA Experiment 108597 PARAMETER Experiment Name: Zm_100uM_ABA_P Parameter: Age (day) Value: 9
  misc_feature: MA Experiment 108597 PARAMETER Experiment Name: Zm_100uM_ABA_P Parameter: Organism Value: Zea mays
  misc_feature: MA Experiment 108597 PARAMETER Experiment Name: Zm_100uM_ABA_P Parameter: Plant Line Value: 35A19
  misc_feature: MA Experiment 108597 PARAMETER Experiment Name: Zm_100uM_ABA_P Parameter: Timepoint (hr) Value: 24
  misc_feature: MA Experiment 108597 PARAMETER Experiment Name: Zm_100uM_ABA_P Parameter: Tissue Value: Aerial
  misc_feature: MA Experiment 108597 PARAMETER Experiment Name: Zm_100uM_ABA_P Parameter: Treatment Value: 100uM ABA vs. No Treatment
  misc_feature: MA Experiment ID: 20000477 Result: Up-regulated in Transcription
  misc_feature: MA Experiment 20000477 PARAMETER Experiment Name: Zm_5mM_SA_P Parameter: Age (day) Value: 10
  misc_feature: MA Experiment 20000477 PARAMETER Experiment Name: Zm_5mM_SA_P Parameter: Organism Value: Zea mays
  misc_feature: MA Experiment 20000477 PARAMETER Experiment Name: Zm_5mM_SA_P Parameter: Plant Line Value: 35A19
  misc_feature: MA Experiment 20000477 PARAMETER Experiment Name: Zm_5mM_SA_P Parameter: Timepoint (hr) Value: 48
  misc_feature: MA Experiment 20000477 PARAMETER Experiment Name: Zm_5mM_SA_P Parameter: Tissue Value: Aerial
  misc_feature: MA Experiment 20000477 PARAMETER Experiment Name: Zm_5mM_SA_P Parameter: Treatment Value: 5mM SA vs. No Treatment
  misc_feature: MA Experiment ID: 20000532 Result: Up-regulated in Transcription
  misc_feature: MA Experiment 20000532 PARAMETER Experiment Name: Zm_0.001percent_MeJA_P Parameter: Age (day) Value: 10
  misc_feature: MA Experiment 20000532 PARAMETER Experiment Name: Zm_0.001percent_MeJA_P Parameter: Organism Value: Zea mays
  misc_feature: MA Experiment 20000532 PARAMETER Experiment Name: Zm_0.001percent_MeJA_P Parameter: Plant Line Value: 35A19
  misc_feature: MA Experiment 20000532 PARAMETER Experiment Name: Zm_0.001percent_MeJA_P Parameter: Timepoint (hr) Value: 48
  misc_feature: MA Experiment 20000532 PARAMETER Experiment Name: Zm_0.001percent_MeJA_P Parameter: Tissue Value: Aerial
  misc_feature: MA Experiment 20000532 PARAMETER Experiment Name: Zm_0.001percent_MeJA_P Parameter: Treatment Value: 0.001percent MeJA vs. No Treatment
  misc_feature: MA Experiment ID: 20000629 Result: Down-regulated in Transcription
  misc_feature: MA Experiment 20000629 PARAMETER Experiment Name: Zm_Herbicide-Treatments_P Parameter: Timepoint (hr) Value: 12
  misc_feature: MA Experiment 20000629 PARAMETER Experiment Name: Zm_Herbicide-Treatments_P Parameter: Tissue Value: Aerial
  misc_feature: MA Experiment 20000629 PARAMETER Experiment Name: Zm_Herbicide-Treatments_P Parameter: Treatment Value: Trimec vs. No Treatment
atagctgaagcctcggattgcaggttgcagccatgccaatgacaatcgagcgtgatctccacatggccacagggaacggagaaactagctacacgaaaaactctaggattcaggagaaagttatgtttcagatcaagccagtccttgaggaggccactagagcagcatactcagctctcctccctcaaaccatggtcgtggccgacttaggctgctcatcggggcctaacacactgcgcttcgtctccgaggtgattggcatcatagctcgccattgcaaagaacacgaccgacgacatgactacccacaacttcagttcttcctgaatgacctgccgggaaacgacttcaacaatctcttcctactcatccagcagttcaataagtcgatggcaagaaaccacaagggtgaggcagccgaggcactgcctccgtgctatatctctggtttgccaggctccttctacactaggatcttccctagcgaaagcgttcaccttttccactctttgttctccgttcactggcactctcaggcatcagaacaactaaaggacaccaaaaataaatgcttagatatctacatcacaaagaatatgccaccgtcgatggtgaagttgtttcaacagcagtttgagaaggacttctccctcttcctcaagctacgctatgaggaactcgtgtctggtggccaaatggttctaacatttattggaagaaagcatgaggatgtgttcactggagagtccaaccatctttacggattgcttgcgcagtcactgaaatccctagttgatgagggtcttgtggagaaagaaaaacttgagtcattctatcttccgatctactcaccgtcggttggtgaagtggaggcgatagtgaagcaagttgggttgttcaacatgaatcatgttaaagtatttgagataaattgggatccctacggtgactcataaggtgatgatgtgcatgacagtattaggagcggtgaaaatgttgctaagtgcctacgagcagttatggagccgttggttgcaagccaatttggagaacacatactcgacaagttattcaaagagtacgctcgtcgtgttgccaaacaccttgagaatgagaaaaccaagcatgctattcttgtcctatccatcgagaaagcaataattcatgtgtgaagtgtcttgtttctcactatctttccattattatcacatggtaatgtatgtttgttttgaatgtgcatgtttgtgccactagtatattgaatggcatggtgtttttgttgttttctttatcgcttctcctatattttagatgcctgaattttaaggtgatttcaggaaacattcttgtacaaggaattaatacaaataatttgctc

SEQ ID NO: 6923 - protein, 307 aa, Zea mays subsp. mays
  peptide (1)..(307): Ceres Seq. ID no. 12352459
  misc_feature (39)..(307): Pfam Name: SAM dependent carboxyl methyltransferase Pfam Description: SAM dependent carboxyl methyltransferase
  misc_feature (3)..(307): Homolog of NCBI NO: 13366161 NR Description: S-adenosyl-L-methionine:salicylic acid carboxyl
  misc_feature (3)..(307): Homolog of NCBI NO: 23957318 NR Description: S-adenosyl-L-methionine:salicylic acid
  misc_feature (3)..(307): Homolog of NCBI NO: 28629497 NR Description: S-adenosyl-L-methionine:benzoic acid/salicylic
  misc_feature (3)..(307): Homolog of NCBI NO: 28629495 NR Description: S-adenosyl-L-methionine:benzoic acid/salicylic
  misc_feature (3)..(307): Homolog of NCBI NO: 13235641 NR Description: S-adenosyl-L-methionine:salicylic acid carboxyl
  misc_feature (9)..(307): Homolog of NCBI NO: 37904506 NR Description: methyl transferase [Arabidopsis lyrata subsp.
  misc_feature (3)..(307): Homolog of NCBI NO: 6651395 NR Description: floral nectary-specific protein [Brassica rapa
  misc_feature (3)..(307): Homolog of NCBI NO: 34809619 NR Description: Chain X, Crystal Structure Of Salicylic Acid
  misc_feature (3)..(307): Homolog of NCBI NO: 15223601 NR Description: S-adenosyl-L-methionine:jasmonic acid carboxyl (JMT); protein id: At1g19640.1, supported by cDNA: gi_13676828
  misc_feature (3)..(307): Homolog of NCBI NO: 13676829 NR Description: S-adenosyl-L-methionine:jasmonic acid carboxyl
MPMTIERDLHMATGNGETSYTKNSRIQEKVMFQIKPVLEEATRAAYSALLPQTMVVADLGCSSGPNTLRFVSEVIGIIARHCKEHDRRHDYPQLQFFLNDLPGNDFNNLFLLIQQFNKSMARNHKGEAAEALPPCYISGLPGSFYTRIFPSESVHLFHSLFSVHWHSQASEQLKDTKNKCLDIYITKNMPPSMVKLFQQQFEKDFSLFLKLRYEELVSGGQMVLTFIGRKHEDVFTGESNHLYGLLAQSLKSLVDEGLVEKEKLESFYLPIYSPSVGEVEAIVKQVGLFNMNHVKVFEINWDPYGDS

SEQ ID NO: 6924 - protein, 305 aa, Zea mays subsp. mays
  peptide (1)..(305): Ceres Seq. ID no. 12352460
  misc_feature (37)..(305): Pfam Name: SAM dependent carboxyl methyltransferase Pfam Description: SAM dependent carboxyl methyltransferase
  misc_feature (1)..(305): Homolog of NCBI NO: 13366161 NR Description: S-adenosyl-L-methionine:salicylic acid carboxyl
  misc_feature (1)..(305): Homolog of NCBI NO: 23957318 NR Description: S-adenosyl-L-methionine:salicylic acid
  misc_feature (1)..(305): Homolog of NCBI NO: 28629497 NR Description: S-adenosyl-L-methionine:benzoic acid/salicylic
  misc_feature (1)..(305): Homolog of NCBI NO: 28629495 NR Description: S-adenosyl-L-methionine:benzoic acid/salicylic
  misc_feature (1)..(305): Homolog of NCBI NO: 13235641 NR Description: S-adenosyl-L-methionine:salicylic acid carboxyl
  misc_feature (7)..(305): Homolog of NCBI NO: 37904506 NR Description: methyl transferase [Arabidopsis lyrata subsp.
  misc_feature (1)..(305): Homolog of NCBI NO: 6651395 NR Description: floral nectary-specific protein [Brassica rapa
  misc_feature (1)..(305): Homolog of NCBI NO: 34809619 NR Description: Chain X, Crystal Structure Of Salicylic Acid
  misc_feature (1)..(305): Homolog of NCBI NO: 15223601 NR Description: S-adenosyl-L-methionine:jasmonic acid carboxyl (JMT); protein id: At1g19640.1, supported by cDNA: gi_13676828
  misc_feature (1)..(305): Homolog of NCBI NO: 13676829 NR Description: S-adenosyl-L-methionine:jasmonic acid carboxyl
MTIERDLHMATGNGETSYTKNSRIQEKVMFQIKPVLEEATRAAYSALLPQTMVVADLGCSSGPNTLRFVSEVIGIIARHCKEHDRRHDYPQLQFFLNDLPGNDFNNLFLLIQQFNKSMARNHKGEAAEALPPCYISGLPGSFYTRIFPSESVHLFHSLFSVHWHSQASEQLKDTKNKCLDIYITKNMPPSMVKLFQQQFEKDFSLFLKLRYEELVSGGQMVLTFIGRKHEDVFTGESNHLYGLLAQSLKSLVDEGLVEKEKLESFYLPIYSPSVGEVEAIVKQVGLFNMNHVKVFEINWDPYGDS

SEQ ID NO: 6925 - protein, 297 aa, Zea mays subsp. mays
  peptide (1)..(297): Ceres Seq. ID no. 12352461
  misc_feature (29)..(297): Pfam Name: SAM dependent carboxyl methyltransferase Pfam Description: SAM dependent carboxyl methyltransferase
  misc_feature (1)..(297): Homolog of NCBI NO: 13366161 NR Description: S-adenosyl-L-methionine:salicylic acid carboxyl
  misc_feature (1)..(297): Homolog of NCBI NO: 23957318 NR Description: S-adenosyl-L-methionine:salicylic acid
  misc_feature (1)..(297): Homolog of NCBI NO: 28629497 NR Description: S-adenosyl-L-methionine:benzoic acid/salicylic
  misc_feature (1)..(297): Homolog of NCBI NO: 28629495 NR Description: S-adenosyl-L-methionine:benzoic acid/salicylic
  misc_feature (1)..(297): Homolog of NCBI NO: 13235641 NR Description: S-adenosyl-L-methionine:salicylic acid carboxyl
  misc_feature (1)..(297): Homolog of NCBI NO: 37904506 NR Description: methyl transferase [Arabidopsis lyrata subsp.
  misc_feature (1)..(297): Homolog of NCBI NO: 6651395 NR Description: floral nectary-specific protein [Brassica rapa
  misc_feature (1)..(297): Homolog of NCBI NO: 34809619 NR Description: Chain X, Crystal Structure Of Salicylic Acid
  misc_feature (1)..(297): Homolog of NCBI NO: 15223601 NR Description: S-adenosyl-L-methionine:jasmonic acid carboxyl (JMT); protein id: At1g19640.1, supported by cDNA: gi_13676828
  misc_feature (1)..(297): Homolog of NCBI NO: 13676829 NR Description: S-adenosyl-L-methionine:jasmonic acid carboxyl
MATGNGETSYTKNSRIQEKVMFQIKPVLEEATRAAYSALLPQTMVVADLGCSSGPNTLRFVSEVIGIIARHCKEHDRRHDYPQLQFFLNDLPGNDFNNLFLLIQQFNKSMARNHKGEAAEALPPCYISGLPGSFYTRIFPSESVHLFHSLFSVHWHSQASEQLKDTKNKCLDIYITKNMPPSMVKLFQQQFEKDFSLFLKLRYEELVSGGQMVLTFIGRKHEDVFTGESNHLYGLLAQSLKSLVDEGLVEKEKLESFYLPIYSPSVGEVEAIVKQVGLFNMNHVKVFEINWDPYGDS

SEQ ID NO: 6926 - DNA, 1388 bp, Zea mays subsp. mays
  misc_feature (1)..(1388): Ceres Seq. ID no. 12382081
  misc_feature: MA Experiment ID: 108528 Result: Up-regulated in Transcription
  misc_feature: MA Experiment 108528 PARAMETER Experiment Name: Zm_Imbibed_Seeds_P Parameter: Age (day) Value: 5 vs. 2
  misc_feature: MA Experiment 108528 PARAMETER Experiment Name: Zm_Imbibed_Seeds_P Parameter: Organism Value: Zea mays
  misc_feature: MA Experiment 108528 PARAMETER Experiment Name: Zm_Imbibed_Seeds_P Parameter: Plant Line Value: 35A19
  misc_feature: MA Experiment 108528 PARAMETER Experiment Name: Zm_Imbibed_Seeds_P Parameter: Tissue Value: Aerial vs. Embryo
  misc_feature: MA Experiment ID: 108530 Result: Up-regulated in Transcription
  misc_feature: MA Experiment 108530 PARAMETER Experiment Name: Zm_Imbibed_Seeds_P Parameter: Age (day) Value: 6 vs. 2
  misc_feature: MA Experiment 108530 PARAMETER Experiment Name: Zm_Imbibed_Seeds_P Parameter: Organism Value: Zea mays
  misc_feature: MA Experiment 108530 PARAMETER Experiment Name: Zm_Imbibed_Seeds_P Parameter: Plant Line Value: 35A19
  misc_feature: MA Experiment 108530 PARAMETER Experiment Name: Zm_Imbibed_Seeds_P Parameter: Tissue Value: Aerial vs. Embryo
  misc_feature: MA Experiment ID: 108544 Result: Up-regulated in Transcription
  misc_feature: MA Experiment ID: 20000477 Result: Up-regulated in Transcription
  misc_feature: MA Experiment 20000477 PARAMETER Experiment Name: Zm_5mM_SA_P Parameter: Age (day) Value: 10
  misc_feature: MA Experiment 20000477 PARAMETER Experiment Name: Zm_5mM_SA_P Parameter: Organism Value: Zea mays
  misc_feature: MA Experiment 20000477 PARAMETER Experiment Name: Zm_5mM_SA_P Parameter: Plant Line Value: 35A19
  misc_feature: MA Experiment 20000477 PARAMETER Experiment Name: Zm_5mM_SA_P Parameter: Timepoint (hr) Value: 48
  misc_feature: MA Experiment 20000477 PARAMETER Experiment Name: Zm_5mM_SA_P Parameter: Tissue Value: Aerial
  misc_feature: MA Experiment 20000477 PARAMETER Experiment Name: Zm_5mM_SA_P Parameter: Treatment Value: 5mM SA vs. No Treatment
  misc_feature: MA Experiment ID: 20000478 Result: Up-regulated in Transcription
  misc_feature: MA Experiment 20000478 PARAMETER Experiment Name: Zm_5mM_SA_P Parameter: Age (day) Value: 11
  misc_feature: MA Experiment 20000478 PARAMETER Experiment Name: Zm_5mM_SA_P Parameter: Organism Value: Zea mays
  misc_feature: MA Experiment 20000478 PARAMETER Experiment Name: Zm_5mM_SA_P Parameter: Plant Line Value: 35A19
  misc_feature: MA Experiment 20000478 PARAMETER Experiment Name: Zm_5mM_SA_P Parameter: Timepoint (hr) Value: 72
  misc_feature: MA Experiment 20000478 PARAMETER Experiment Name: Zm_5mM_SA_P Parameter: Tissue Value: Aerial
  misc_feature: MA Experiment 20000478 PARAMETER Experiment Name: Zm_5mM_SA_P Parameter: Treatment Value: 5mM SA vs. No Treatment
gcacgagaccattacctagaacatcctaatcgaaaagaaaacgtaagggagtcctacttgtctgcttcccgagttcagagttcagactcagcacatcacccttctctagtctcaaatggcgtgctcactcccgctccacgcccccttctcctcgtcgccccgcatcctctcctaccgcgccgcgcccagaaccctccctctgttccgccgagggctcagggttccgtaccaccgctccccttccccgcctcgcgcgctcccggacgttgctgcgggggccgtggcgggcatccgggacgcgctcgccgacgccttcttgacgtcgccgccgacgtggcggtccgccgctgccagcaacctcgctgtctttgtctccggatcgccgttgcttctctcgggactgtccgcctccggcttcgccgccgcctatctcttgggcaccctgacgtgggcgcgcgttcggagcccagggtttcctcctcgttgtcgcatacttcgttgtgggcacagcggttactaagttgaggataagacagaaggaagctctgggagtagcagaaaaaagaggaggaagaagagggcctggaagtgttattggttctagcgctgccggttgtgtttgtgccctactatcgatatatcatgctggtggtacagcgtcctctgagctctggagactgggttttgttgctagtttctgtactaaactaagtgatacagtttcaagtgaaatagggaaggcttttggaagaacaacgtacctggtgacaacattaaaggttgttcctagaggtacagaaggtgcaatcagtattgagggtactattgctggaattctagcgtctgtgtttcttgcaggtgctggttatcttcttgggcaggtggatgtatcacaagttgtgttatgcgttcttgcttctcagattgcaaattatgttgagagctatattggggccactttacaagacaaggaaggttttgaatggctgaataacgatattgtcaatgtactgaatatctctattggtgccatattggctgttctaacgcagcagctgctcgtcagttggagatcttaatttttccttttgacttaggtctgcatccactattcgaattttattcttgtagtagctgccatattttgcccatctgaaatgtaatcatagattcacatttgggcccatcctaactttctctaggttccggtctttgttatgcctactgtgaaaatgcaaaactgtctttccttcagttacattgaggagttctctaattatgctgttaacttaggcagatgttgattaggatctgtttgatagagctctcaaagtgttttttgggagctgaaaacaattttttttattaagaagtgggtgattttatgc

SEQ ID NO: 6927 - protein, 174 aa, Zea mays subsp. mays
  peptide (1)..(174): Ceres Seq. ID no. 12382082
ARDHYLEHPNRKENVRESYLSASRVQSSDSAHHPSLVSNGVLTPAPRPLLLVAPHPLLPRRAQNPPSVPPRAQGSVPPLPFPASRAPGRCCGGRGGHPGRARRRLLDVAADVAVRRCQQPRCLCLRIAVASLGTVRLRLRRRLSLGHPDVGARSEPRVSSSLSHTSLWAQRLLS

SEQ ID NO: 6928 - protein, 134 aa, Zea mays subsp. mays
  peptide (1)..(134): Ceres Seq. ID no. 12382083
  misc_feature (1)..(112): Homolog of NCBI NO: 34910822 NR Description: P0456A01.17 [Oryza sativa (japonica
  misc_feature (1)..(120): Homolog of NCBI NO: 18412044 NR Description: expressed protein; protein id: At1g78620.1, by cDNA: 3173., supported by cDNA: gi_14334657, supported by gi_17104590 [Arabidopsis thaliana] >gi|25406560|pir||H96814
  misc_feature (1)..(120): Homolog of NCBI NO: 21592713 NR Description: unknown [Arabidopsis thaliana]
MACSLPLHAPFSSSPRILSYRAAPRTLPLFRRGLRVPYHRSPSPPRALPDVAAGAVAGIRDALADAFLTSPPTWRSAAASNLAVFVSGSPLLLSGLSASGFAAAYLLGTLTWARVRSPGFPPRCRILRCGHSGY

SEQ ID NO: 6929 - DNA, 1670 bp, Zea mays subsp. mays
  misc_feature (1)..(1670): Ceres Seq. ID no. 13493469
  misc_feature: MA Experiment ID: 108528 Result: Down-regulated in Transcription
  misc_feature: MA Experiment 108528 PARAMETER Experiment Name: Zm_Imbibed_Seeds_P Parameter: Age (day) Value: 5 vs. 2
  misc_feature: MA Experiment 108528 PARAMETER Experiment Name: Zm_Imbibed_Seeds_P Parameter: Organism Value: Zea mays
  misc_feature: MA Experiment 108528 PARAMETER Experiment Name: Zm_Imbibed_Seeds_P Parameter: Plant Line Value: 35A19
  misc_feature: MA Experiment 108528 PARAMETER Experiment Name: Zm_Imbibed_Seeds_P Parameter: Tissue Value: Aerial vs. Embryo
  misc_feature: MA Experiment ID: 108530 Result: Down-regulated in Transcription
  misc_feature: MA Experiment 108530 PARAMETER Experiment Name: Zm_Imbibed_Seeds_P Parameter: Age (day) Value: 6 vs. 2
  misc_feature: MA Experiment 108530 PARAMETER Experiment Name: Zm_Imbibed_Seeds_P Parameter: Organism Value: Zea mays
  misc_feature: MA Experiment 108530 PARAMETER Experiment Name: Zm_Imbibed_Seeds_P Parameter: Plant Line Value: 35A19
  misc_feature: MA Experiment 108530 PARAMETER Experiment Name: Zm_Imbibed_Seeds_P Parameter: Tissue Value: Aerial vs. Embryo
  misc_feature: MA Experiment ID: 108543 Result: Down-regulated in Transcription
  misc_feature: MA Experiment ID: 108545 Result: Down-regulated in Transcription
  misc_feature: MA Experiment 108545 PARAMETER Experiment Name: Zm_Imbibed_Seeds_P Parameter: Age (day) Value: 3 vs. 2
  misc_feature: MA Experiment 108545 PARAMETER Experiment Name: Zm_Imbibed_Seeds_P Parameter: Organism Value: Zea mays
  misc_feature: MA Experiment 108545 PARAMETER Experiment Name: Zm_Imbibed_Seeds_P Parameter: Plant Line Value: 35A19
  misc_feature: MA Experiment 108545 PARAMETER Experiment Name: Zm_Imbibed_Seeds_P Parameter: Tissue Value: Aerial vs. Embryo
  misc_feature: MA Experiment ID: 108547 Result: Down-regulated in Transcription
  misc_feature: MA Experiment 108547 PARAMETER Experiment Name: Zm_Imbibed_Seeds_P Parameter: Age (day) Value: 4 vs. 2
  misc_feature: MA Experiment 108547 PARAMETER Experiment Name: Zm_Imbibed_Seeds_P Parameter: Organism Value: Zea mays
  misc_feature: MA Experiment 108547 PARAMETER Experiment Name: Zm_Imbibed_Seeds_P Parameter: Plant Line Value: 35A19
  misc_feature: MA Experiment 108547 PARAMETER Experiment Name: Zm_Imbibed_Seeds_P Parameter: Tissue Value: Aerial vs. Embryo
  misc_feature: MA Experiment ID: 20000492 Result: Up-regulated in Transcription
  misc_feature: MA Experiment 20000492 PARAMETER Experiment Name: Zm_Hybrid_Seed_Dev_P Parameter: DAP Value: 12
  misc_feature: MA Experiment 20000492 PARAMETER Experiment Name: Zm_Hybrid_Seed_Dev_P Parameter: Organism Value: Zea mays
  misc_feature: MA Experiment 20000492 PARAMETER Experiment Name: Zm_Hybrid_Seed_Dev_P Parameter: Plant Line Value: 35A19
  misc_feature: MA Experiment 20000492 PARAMETER Experiment Name: Zm_Hybrid_Seed_Dev_P Parameter: Tissue Value: Fert Kernel vs. Unfert Floret
acctccagctttctactctactacctgcaggagtgcaggctgcaggcgcacacgcaactcgcagccgaccacgccccccgcaggccgcgatgccgccgccgccgcagcagcagcccccgcaccggcacgccaagacggactcggaggtgacgtccagcatggcggcgtcgtccccgccgcgtgcggcctactacgtgcagtcgccgagccacgacgacggcgagaacaagacggccgcgtcctccttccactcgtcccctgcggcatccccgccgcggtcggcgtccaggcactcctcctcctcctcccgcttctccgccagcgcaaagggcaccgcctccggcgccggcggcggccggcgacgcggcagcgcgtgggcgaaggaggcggccatcgaggaggagggcctgctcggcgtggacgacggcagcggcggcgatggagacggccgcggcgggatccccaggcgggcgcgctacttgctcggcttcgcgggcgccttcctcggcctgttcctcctcttcgcgctcgtcctctggggcgccagccgcaaccagcgccccgtcgtggccctgcgcgccgtcacgttccaccgcttcgtcgtccaggccggcaccgacgcgtcgctcgtgcccaccgagatggcctcgctcaacgccaccgtcagcctcaccttccgcaacgtcggtaccttcttcggcgtccacgtctccgccgaccccgtcacgctccactacgcgcagctccagctcgcgtcgggcaacatgaagtacttctaccagccccggaggagccagcggagcctggcggtggcggtggtcggcgacaaggtgcccctgtacggcggcggggcggggctgagcagcaccccgacgacgctgccgccgccgaggaagcgcgcgccgccggtggtggtgccgccgccgcccgtgccgctgcggctggccgtgcgggtgcggtcgcgcgcgttcgtgctggggagcctggtcaagcccaagttctacagcgaggcgcagtgcagcgtcaccatggaccaggccaggctcggtaagccagtctccctcaacaaggcatgcacctacacacactagcttggctaggctacatacatacgcctgctgccgtgggtcgtctcgtcgccaccatgcatggtcgtcgcgtcgtgaactttgcccttcttcttgaacaacacacactctctctcagtctctctctcccttcgcttttctgcgtgcgtgcgtttgttggtcgcttgtcttgtacatagaaatttttagtttctggtgtacgtaggagagttttgagtgagatggaataagaatcaggcattatttccctcatacggcgtttccgattgcgtgacatgccgtggagggcatgtaaaatgtcggtgaaattcaatgcgcctgtttggtgaaattcaatgcgctcgaagcagacgtaagattctggtgaaatacacctaaaaattcacggccgcgcatgtaatatagcttcttcaggtgaagtttggaccccggccgacagtcaccgaccgcaagtgctcatccggtgaggtttgtcagttagattcaaatccactaccgttcatataaatccgattcttttttttagatctgacaaatgtaacacggagccttcgcaatgaatgaatgaatgattgaataaac

SEQ ID NO: 6930 - protein, 362 aa, Zea mays subsp. mays
  peptide (1)..(362): Ceres Seq. ID no. 13493470
  misc_feature (12)..(116): Pfam Name: AF-4 proto-oncoprotein Pfam Description: AF-4 proto-oncoprotein
  misc_feature (42)..(360): Homolog of NCBI NO: 5777621 NR Description: CAA30379.1 protein [Oryza sativa]
  misc_feature (42)..(360): Homolog of NCBI NO: 38345517 NR Description: OSJNBa0039K24.20 [Oryza sativa (japonica
  misc_feature (42)..(361): Homolog of NCBI NO: 18401556 NR Description: expressed protein [Arabidopsis thaliana]
  misc_feature (42)..(361): Homolog of NCBI NO: 15239097 NR Description: expressed protein [Arabidopsis thaliana] emb|CAB53482.1~gene_id:MBD2.5~similar to unknown protein
  misc_feature (42)..(361): Homolog of NCBI NO: 28416677 NR Description: At5g42860 [Arabidopsis thaliana]
  misc_feature (42)..(282): Homolog of NCBI NO: 15227481 NR Description: expressed protein [Arabidopsis thaliana]
  misc_feature (310)..(358): Homolog of NCBI NO: 15227481 NR Description: expressed protein [Arabidopsis thaliana]
  misc_feature (45)..(361): Homolog of NCBI NO: 34904260 NR Description: P0452F10.18 [Oryza sativa (japonica
  misc_feature (42)..(339): Homolog of NCBI NO: 9294056 NR Description: emb|CAB53482.1~gene_id:MOB24.19~similar to
  misc_feature (43)..(358): Homolog of NCBI NO: 9294055 NR Description: gene_id:MOB24.18~unknown protein [Arabidopsis
LQLSTLLPAGVQAAGAHATRSRPRPPQAAMPPPPQQQPPHRHAKTDSEVTSSMAASSPPRAAYYVQSPSHDDGENKTAASSFHSSPAASPPRSASRHSSSSSRFSASAKGTASGAGGGRRRGSAWAKEAAIEEEGLLGVDDGSGGDGDGRGGIPRRARYLLGFAGAFLGLFLLFALVLWGASRNQRPVVALRAVTFHRFVVQAGTDASLVPTEMASLNATVSLTFRNVGTFFGVHVSADPVTLHYAQLQLASGNMKYFYQPRRSQRSLAVAVVGDKVPLYGGGAGLSSTPTTLPPPRKRAPPVVVPPPPVPLRLAVRVRSRAFVLGSLVKPKFYSEAQCSVTMDQARLGKPVSLNKACTYTH

SEQ ID NO: 6931 - protein, 349 aa, Zea mays subsp. mays
  peptide (1)..(349): Ceres Seq. ID no. 13493471
  misc_feature (15)..(349): Homolog of NCBI NO: 29247944 NR Description: GLP_26_54603_52153 [Giardia lamblia ATCC 50803]
  misc_feature (107)..(349): Homolog of NCBI NO: 23018055 NR Description: hypothetical protein [Thermobifida fusca]
  misc_feature (108)..(347): Homolog of NCBI NO: 22960097 NR Description: hypothetical protein [Rhodobacter sphaeroides]
  misc_feature (101)..(347): Homolog of NCBI NO: 23102225 NR Description: hypothetical protein [Azotobacter vinelandii]
PPAFYSTTCRSAGCRRTRNSQPTTPPAGRDAAAAAAAAPAPARQDGLGGDVQHGGVVPAACGLLRAVAEPRRRREQDGRVLLPLVPCGIPAAVGVQALLLLLPLLRQRKGHRLRRRRRPATRQRVGEGGGHRGGGPARRGRRQRRRWRRPRRDPQAGALLARLRGRLPRPVPPLRARPLGRQPQPAPRRGPARRHVPPLRRPGRHRRVARAHRDGLAQRHRQPHLPQRRYLLRRPRLRRPRHAPLRAAPARVGQHEVLLPAPEEPAEPGGGGGRRQGAPVRRRGGAEQHPDDAAAAEEARAAGGGAAAARAAAAGRAGAVARVRAGEPGQAQVLQRGAVQRHHGPGQAR

SEQ ID NO: 6932 - protein, 333 aa, Zea mays subsp. mays
  peptide (1)..(333): Ceres Seq. ID no. 13493472
  misc_feature (1)..(87): Pfam Name: AF-4 proto-oncoprotein Pfam Description: AF-4 proto-oncoprotein
  misc_feature (13)..(331): Homolog of NCBI NO: 5777621 NR Description: CAA30379.1 protein [Oryza sativa]
  misc_feature (13)..(331): Homolog of NCBI NO: 38345517 NR Description: OSJNBa0039K24.20 [Oryza sativa (japonica
  misc_feature (13)..(332): Homolog of NCBI NO: 18401556 NR Description: expressed protein [Arabidopsis thaliana]
  misc_feature (13)..(332): Homolog of NCBI NO: 15239097 NR Description: expressed protein [Arabidopsis thaliana] emb|CAB53482.1~gene_id:MBD2.5~similar to unknown protein
  misc_feature (13)..(332): Homolog of NCBI NO: 28416677 NR Description: At5g42860 [Arabidopsis thaliana]
  misc_feature (13)..(253): Homolog of NCBI NO: 15227481 NR Description: expressed protein [Arabidopsis thaliana]
  misc_feature (281)..(329): Homolog of NCBI NO: 15227481 NR Description: expressed protein [Arabidopsis thaliana]
  misc_feature (16)..(332): Homolog of NCBI NO: 34904260 NR Description: P0452F10.18 [Oryza sativa (japonica
  misc_feature (13)..(310): Homolog of NCBI NO: 9294056 NR Description: emb|CAB53482.1~gene_id:MOB24.19~similar to
  misc_feature (14)..(329): Homolog of NCBI NO: 9294055 NR Description: gene_id:MOB24.18~unknown protein [Arabidopsis
MPPPPQQQPPHRHAKTDSEVTSSMAASSPPRAAYYVQSPSHDDGENKTAASSFHSSPAASPPRSASRHSSSSSRFSASAKGTASGAGGGRRRGSAWAKEAAIEEEGLLGVDDGSGGDGDGRGGIPRRARYLLGFAGAFLGLFLLFALVLWGASRNQRPVVALRAVTFHRFVVQAGTDASLVPTEMASLNATVSLTFRNVGTFFGVHVSADPVTLHYAQLQLASGNMKYFYQPRRSQRSLAVAVVGDKVPLYGGGAGLSSTPTTLPPPRKRAPPVVVPPPPVPLRLAVRVRSRAFVLGSLVKPKFYSEAQCSVTMDQARLGKPVSLNKACTYTH

SEQ ID NO: 6933 - DNA, 1523 bp, Zea mays subsp. mays
  misc_feature (1)..(1523): Ceres Seq. ID no. 12365642
  misc_feature: MA Experiment ID: 108523 Result: Up-regulated in Transcription
  misc_feature: MA Experiment 108523 PARAMETER Experiment Name: Zm_42deg_Heat_P Parameter: Age (day) Value: 8
  misc_feature: MA Experiment 108523 PARAMETER Experiment Name: Zm_42deg_Heat_P Parameter: Organism Value: Zea mays
  misc_feature: MA Experiment 108523 PARAMETER Experiment Name: Zm_42deg_Heat_P Parameter: Plant Line Value: 35A19
  misc_feature: MA Experiment 108523 PARAMETER Experiment Name: Zm_42deg_Heat_P Parameter: Temperature (deg C) Value: 42 vs. 22
  misc_feature: MA Experiment 108523 PARAMETER Experiment Name: Zm_42deg_Heat_P Parameter: Timepoint (hr) Value: 6
  misc_feature: MA Experiment 108523 PARAMETER Experiment Name: Zm_42deg_Heat_P Parameter: Tissue Value: Aerial
  misc_feature: MA Experiment ID: 108543 Result: Down-regulated in Transcription
  misc_feature: MA Experiment ID: 108544 Result: Down-regulated in Transcription
  misc_feature: MA Experiment ID: 20000487 Result: Up-regulated in Transcription
  misc_feature: MA Experiment 20000487 PARAMETER Experiment Name: Zm_50mM_NH4NO3_L_to_H_P Parameter: Organism Value: Zea mays
  misc_feature: MA Experiment 20000487 PARAMETER Experiment Name: Zm_50mM_NH4NO3_L_to_H_P Parameter: Timepoint (hr) Value: 4
  misc_feature: MA Experiment 20000487 PARAMETER Experiment Name: Zm_50mM_NH4NO3_L_to_H_P Parameter: Tissue Value: Leaves
  misc_feature: MA Experiment 20000487 PARAMETER Experiment Name: Zm_50mM_NH4NO3_L_to_H_P Parameter: Treatment Value: 50mM NH4NO3 vs. 100mM Mannitol
atgagaaaaatagaaaattcctccaaaccctaagcccctctctgctcacctctgtactccgaatctgctcccaagtctgctagggtttaacgctcgcgtcctcctcacgcattcggtctggtcgctgatcttcgcttgttcgattccgctcggctctaggacccaggctctcgaggcggctggagtggcggcgcgacgagagggtgaagcggatgcagacggaggcgagggtggggatggccgccgccacgatggacggcaccggcgccgcggcgtccgccgcccggaggtacacgacgcagcagcagcagcagcagctgcagcaccaccagccgcagctcgggaccgtgccccatctcctcgccggcggcgtcgctggcgcagtcagcaagacctgcaccgccccgctcgcacgcctcaccatcctctttcaggtacaaggaatgcactcagatgtggctacaatgcgcaatactagcatatggcgtgaagcatcccgcattgtctatggagaaggttttcgagctttctggaaagggaaccttgttaccattgctcaccggttgccttactcttcaattagtttctatgcctatgagagatacaagaatttgcttcagatgctaccgggtcttgagaagaatggtggatttggtgcagatgttggtgttagattgctaggtggtggtttatcaggaatcactgcagcttctgtgacgtatccactggacttggtgcggacacgtcttgctgcccagacaaatactgcctactacaggggcatatctcatgctctttatgcgatctgcagagatgagggtgtccgtggattgtacaagggtcttggtgccactttactgggagtgggccccagcattgcagtaagcttctctgtgtatgaaactttacgttcccattggcaaatagagaggccatgtgattcccctgttctgatcagtttggcttgtggaagtctttcaggaattgcatcatctacttttacattcccgttggatcttgtgagacgtcgcatgcaattggaaggagcagccgggagggctcgcgtctaccagacaggactttttggaaccttcggacatattgtccgtacggagggttttagaggcatgtatagaggaatcttgcctgagtactgcaaagtggttcctggtgtcggcatcgtatttatgacatatgagatgcttaaggccatcctcacaggactggaatctgatgattagatatctgcgaggtcatgctacacaattttgatacatggtgtcagaacaacatttgaggctgattagactgggagaaatatgagcatgtagcatacgttagggtttaggatgtgctaaggtttgcagtttgtgttatatggttacagatgtttatgtagtgcaccgtgaaagatgccacaggtcttccaaaatgaatatttttttggcatcaccaccattttgtgtatcttcaataacattgtaatggtacatgaagctgttgtctttagcctgatgatcttt

SEQ ID NO: 6934 - protein, 342 aa, Zea mays subsp. mays
  peptide (1)..(342): Ceres Seq. ID no. 12365643
  misc_feature (30)..(336): Homolog of NCBI NO: 22331775 NR Description: mitochondrial carrier protein family; protein id: supported by cDNA: gi_17064803, supported by cDNA: gi_20259827 thaliana] >gi|17064804|gb|AAL32556.1| putative protein
  misc_feature (1)..(341): Homolog of NCBI NO: 15228163 NR Description: mitochondrial carrier protein family; protein id: supported by cDNA: 260615., supported by cDNA: gi_13877984,
  misc_feature (1)..(341): Homolog of NCBI NO: 21554682 NR Description: Ca-dependent solute carrier-like protein
  misc_feature (30)..(336): Homolog of NCBI NO: 11277067 NR Description: hypothetical protein F5K20.240 - Arabidopsis >gi|7630014|emb|CAB88356.1| putative protein [Arabidopsis
  misc_feature (1)..(338): Homolog of NCBI NO: 30687297 NR Description: mitochondrial carrier protein family [Arabidopsis >gi|22135876|gb|AAM91520.1| putative mitochondrial carrier [Arabidopsis thaliana] >gi|23197668|gb|AAN15361.1| putative
  misc_feature (1)..(338): Homolog of NCBI NO: 25295875 NR Description: probable mitochondrial carrier protein [imported]
  misc_feature (48)..(340): Homolog of NCBI NO: 27694792 NR Description: Similar to hypothetical protein MGC36388 [Xenopus
  misc_feature (49)..(335): Homolog of NCBI NO: 33598954 NR Description: calcium-binding transporter [Homo sapiens]
  misc_feature (14)..(342): Homolog of NCBI NO: 34902034 NR Description: putative peroxisomal Ca-dependent solute carrier
  misc_feature (43)..(342): Homolog of NCBI NO: 34895726 NR Description: putative peroxisomal Ca-dependent solute carrier
MQTEARVGMAAATMDGTGAAASAARRYTTQQQQQQLQHHQPQLGTVPHLLAGGVAGAVSKTCTAPLARLTILFQVQGMHSDVATMRNTSIWREASRIVYGEGFRAFWKGNLVTIAHRLPYSSISFYAYERYKNLLQMLPGLEKNGGFGADVGVRLLGGGLSGITAASVTYPLDLVRTRLAAQTNTAYYRGISHALYAICRDEGVRGLYKGLGATLLGVGPSIAVSFSVYETLRSHWQIERPCDSPVLISLACGSLSGIASSTFTFPLDLVRRRMQLEGAAGRARVYQTGLFGTFGHIVRTEGFRGMYRGILPEYCKVVPGVGIVFMTYEMLKAILTGLESDD

SEQ ID NO: 6935 - protein, 334 aa, Zea mays subsp. mays
  peptide (1)..(334): Ceres Seq. ID no. 12365644
  misc_feature (6)..(334): Homolog of NCBI NO: 34902034 NR Description: putative peroxisomal Ca-dependent solute carrier
  misc_feature (35)..(334): Homolog of NCBI NO: 34895726 NR Description: putative peroxisomal Ca-dependent solute carrier
  misc_feature (22)..(328): Homolog of NCBI NO: 22331775 NR Description: mitochondrial carrier protein family; protein id: supported by cDNA: gi_17064803, supported by cDNA: gi_20259827 thaliana] >gi|17064804|gb|AAL32556.1| putative protein
  misc_feature (1)..(333): Homolog of NCBI NO: 15228163 NR Description: mitochondrial carrier protein family; protein id: supported by cDNA: 260615., supported by cDNA: gi_13877984,
  misc_feature (1)..(333): Homolog of NCBI NO: 21554682 NR Description: Ca-dependent solute carrier-like protein
  misc_feature (22)..(328): Homolog of NCBI NO: 11277067 NR Description: hypothetical protein F5K20.240 - Arabidopsis >gi|7630014|emb|CAB88356.1| putative protein [Arabidopsis
  misc_feature (1)..(330): Homolog of NCBI NO: 30687297 NR Description: mitochondrial carrier protein family [Arabidopsis >gi|22135876|gb|AAM91520.1| putative mitochondrial carrier [Arabidopsis thaliana] >gi|23197668|gb|AAN15361.1| putative
  misc_feature (1)..(330): Homolog of NCBI NO: 25295875 NR Description: probable mitochondrial carrier protein [imported]
  misc_feature (40)..(332): Homolog of NCBI NO: 27694792 NR Description: Similar to hypothetical protein MGC36388 [Xenopus
  misc_feature (41)..(327): Homolog of NCBI NO: 33598954 NR Description: calcium-binding transporter [Homo sapiens]
MAAATMDGTGAAASAARRYTTQQQQQQLQHHQPQLGTVPHLLAGGVAGAVSKTCTAPLARLTILFQVQGMHSDVATMRNTSIWREASRIVYGEGFRAFWKGNLVTIAHRLPYSSISFYAYERYKNLLQMLPGLEKNGGFGADVGVRLLGGGLSGITAASVTYPLDLVRTRLAAQTNTAYYRGISHALYAICRDEGVRGLYKGLGATLLGVGPSIAVSFSVYETLRSHWQIERPCDSPVLISLACGSLSGIASSTFTFPLDLVRRRMQLEGAAGRARVYQTGLFGTFGHIVRTEGFRGMYRGILPEYCKVVPGVGIVFMTYEMLKAILTGLESDD

SEQ ID NO: 6936 - protein, 329 aa, Zea mays subsp. mays
  peptide (1)..(329): Ceres Seq. ID no. 12365645
  misc_feature (1)..(329): Homolog of NCBI NO: 34902034 NR Description: putative peroxisomal Ca-dependent solute carrier
  misc_feature (30)..(329): Homolog of NCBI NO: 34895726 NR Description: putative peroxisomal Ca-dependent solute carrier
  misc_feature (17)..(323): Homolog of NCBI NO: 22331775 NR Description: mitochondrial carrier protein family; protein id: supported by cDNA: gi_17064803, supported by cDNA: gi_20259827 thaliana] >gi|17064804|gb|AAL32556.1| putative protein
  misc_feature (1)..(328): Homolog of NCBI NO: 15228163 NR Description: mitochondrial carrier protein family; protein id: supported by cDNA: 260615., supported by cDNA: gi_13877984,
  misc_feature (1)..(328): Homolog of NCBI NO: 21554682 NR Description: Ca-dependent solute carrier-like protein
  misc_feature (17)..(323): Homolog of NCBI NO: 11277067 NR Description: hypothetical protein F5K20.240 - Arabidopsis >gi|7630014|emb|CAB88356.1| putative protein [Arabidopsis
  misc_feature (1)..(325): Homolog of NCBI NO: 30687297 NR Description: mitochondrial carrier protein family [Arabidopsis >gi|22135876|gb|AAM91520.1| putative mitochondrial carrier [Arabidopsis thaliana] >gi|23197668|gb|AAN15361.1| putative
  misc_feature (1)..(325): Homolog of NCBI NO: 25295875 NR Description: probable mitochondrial carrier protein [imported]
  misc_feature (35)..(327): Homolog of NCBI NO: 27694792 NR Description: Similar to hypothetical protein MGC36388 [Xenopus
  misc_feature (36)..(322): Homolog of NCBI NO: 33598954 NR Description: calcium-binding transporter [Homo sapiens]
MDGTGAAASAARRYTTQQQQQQLQHHQPQLGTVPHLLAGGVAGAVSKTCTAPLARLTILFQVQGMHSDVATMRNTSIWREASRIVYGEGFRAFWKGNLVTIAHRLPYSSISFYAYERYKNLLQMLPGLEKNGGFGADVGVRLLGGGLSGITAASVTYPLDLVRTRLAAQTNTAYYRGISHALYAICRDEGVRGLYKGLGATLLGVGPSIAVSFSVYETLRSHWQIERPCDSPVLISLACGSLSGIASSTFTFPLDLVRRRMQLEGAAGRARVYQTGLFGTFGHIVRTEGFRGMYRGILPEYCKVVPGVGIVFMTYEMLKAILTGLESDD

SEQ ID NO: 6937 - DNA, 1659 bp, Zea mays subsp. mays
  misc_feature (1)..(1659): Ceres Seq. ID no. 12387042
  misc_feature: MA Experiment ID: 108504 Result: Down-regulated in Transcription
  misc_feature: MA Experiment 108504 PARAMETER Experiment Name: Zm_Drought_P Parameter: Age (day) Value: 8
  misc_feature: MA Experiment 108504 PARAMETER Experiment Name: Zm_Drought_P Parameter: Organism Value: Zea mays
  misc_feature: MA Experiment 108504 PARAMETER Experiment Name: Zm_Drought_P Parameter: Plant Line Value: 35A19
  misc_feature: MA Experiment 108504 PARAMETER Experiment Name: Zm_Drought_P Parameter: Timepoint (hr) Value: 12
  misc_feature: MA Experiment 108504 PARAMETER Experiment Name: Zm_Drought_P Parameter: Tissue Value: Aerial
  misc_feature: MA Experiment 108504 PARAMETER Experiment Name: Zm_Drought_P Parameter: Treatment Value: Drought vs. No Drought
  misc_feature: MA Experiment ID: 108522 Result: Down-regulated in Transcription
  misc_feature: MA Experiment 108522 PARAMETER Experiment Name: Zm_42deg_Heat_P Parameter: Age (day) Value: 8
  misc_feature: MA Experiment 108522 PARAMETER Experiment Name: Zm_42deg_Heat_P Parameter: Organism Value: Zea mays
  misc_feature: MA Experiment 108522 PARAMETER Experiment Name: Zm_42deg_Heat_P Parameter: Plant Line Value: 35A19
  misc_feature: MA Experiment 108522 PARAMETER Experiment Name: Zm_42deg_Heat_P Parameter: Temperature (deg C) Value: 42 vs. 22
  misc_feature: MA Experiment 108522 PARAMETER Experiment Name: Zm_42deg_Heat_P Parameter: Timepoint (hr) Value: 1
  misc_feature: MA Experiment 108522 PARAMETER Experiment Name: Zm_42deg_Heat_P Parameter: Tissue Value: Aerial
  misc_feature: MA Experiment ID: 108523 Result: Down-regulated in Transcription
  misc_feature: MA Experiment 108523 PARAMETER Experiment Name: Zm_42deg_Heat_P Parameter: Age (day) Value: 8
  misc_feature: MA Experiment 108523 PARAMETER Experiment Name: Zm_42deg_Heat_P Parameter: Organism Value: Zea mays
  misc_feature: MA Experiment 108523 PARAMETER Experiment Name: Zm_42deg_Heat_P Parameter: Plant Line Value: 35A19
  misc_feature: MA Experiment 108523 PARAMETER Experiment Name: Zm_42deg_Heat_P Parameter: Temperature (deg C) Value: 42 vs. 22
  misc_feature: MA Experiment 108523 PARAMETER Experiment Name: Zm_42deg_Heat_P Parameter: Timepoint (hr) Value: 6
  misc_feature: MA Experiment 108523 PARAMETER Experiment Name: Zm_42deg_Heat_P Parameter: Tissue Value: Aerial
  misc_feature: MA Experiment ID: 108527 Result: Down-regulated in Transcription
  misc_feature: MA Experiment 108527 PARAMETER Experiment Name: Zm_5mM_NO_P Parameter: Age (day) Value: 8
  misc_feature: MA Experiment 108527 PARAMETER Experiment Name: Zm_5mM_NO_P Parameter: Organism Value: Zea mays
  misc_feature: MA Experiment 108527 PARAMETER Experiment Name: Zm_5mM_NO_P Parameter: Plant Line Value: 35A19
  misc_feature: MA Experiment 108527 PARAMETER Experiment Name: Zm_5mM_NO_P Parameter: Timepoint (hr) Value: 6
  misc_feature: MA Experiment 108527 PARAMETER Experiment Name: Zm_5mM_NO_P Parameter: Tissue Value: Aerial
  misc_feature: MA Experiment 108527 PARAMETER Experiment Name: Zm_5mM_NO_P Parameter: Treatment Value: 5mM NO vs. No Treatment
  misc_feature: MA Experiment ID: 108528 Result: Down-regulated in Transcription
  misc_feature: MA Experiment 108528 PARAMETER Experiment Name: Zm_Imbibed_Seeds_P Parameter: Age (day) Value: 5 vs. 2
  misc_feature: MA Experiment 108528 PARAMETER Experiment Name: Zm_Imbibed_Seeds_P Parameter: Organism Value: Zea mays
  misc_feature: MA Experiment 108528 PARAMETER Experiment Name: Zm_Imbibed_Seeds_P Parameter: Plant Line Value: 35A19
  misc_feature: MA Experiment 108528 PARAMETER Experiment Name: Zm_Imbibed_Seeds_P Parameter: Tissue Value: Aerial vs. Embryo
  misc_feature: MA Experiment ID: 108530 Result: Down-regulated in Transcription
  misc_feature: MA Experiment 108530 PARAMETER Experiment Name: Zm_Imbibed_Seeds_P Parameter: Age (day) Value: 6 vs. 2
  misc_feature: MA Experiment 108530 PARAMETER Experiment Name: Zm_Imbibed_Seeds_P Parameter: Organism Value: Zea mays
  misc_feature: MA Experiment 108530 PARAMETER Experiment Name: Zm_Imbibed_Seeds_P Parameter: Plant Line Value: 35A19
  misc_feature: MA Experiment 108530 PARAMETER Experiment Name: Zm_Imbibed_Seeds_P Parameter: Tissue Value: Aerial vs. Embryo
  misc_feature: MA Experiment ID: 108535 Result: Down-regulated in Transcription
  misc_feature: MA Experiment 108535 PARAMETER Experiment Name: Zm_Meristem_P Parameter: Age (day) Value: 8
  misc_feature: MA Experiment 108535 PARAMETER Experiment Name: Zm_Meristem_P Parameter: Organism Value: Zea mays
  misc_feature: MA Experiment 108535 PARAMETER Experiment Name: Zm_Meristem_P Parameter: Plant Line Value: 35A19
  misc_feature: MA Experiment 108535 PARAMETER Experiment Name: Zm_Meristem_P Parameter: Tissue Value: Root Meristem vs. Above Root Meristem
  misc_feature: MA Experiment ID: 108543 Result: Up-regulated in Transcription
  misc_feature: MA Experiment ID: 108545 Result: Down-regulated in Transcription
  misc_feature: MA Experiment 108545 PARAMETER Experiment Name: Zm_Imbibed_Seeds_P Parameter: Age (day) Value: 3 vs. 2
  misc_feature: MA Experiment 108545 PARAMETER Experiment Name: Zm_Imbibed_Seeds_P Parameter: Organism Value: Zea mays
  misc_feature: MA Experiment 108545 PARAMETER Experiment Name: Zm_Imbibed_Seeds_P Parameter: Plant Line Value: 35A19
  misc_feature: MA Experiment 108545 PARAMETER Experiment Name: Zm_Imbibed_Seeds_P Parameter: Tissue Value: Aerial vs. Embryo
  misc_feature: MA Experiment ID: 108597 Result: Down-regulated in Transcription
  misc_feature: MA Experiment 108597 PARAMETER Experiment Name: Zm_100uM_ABA_P Parameter: Age (day) Value: 9
  misc_feature: MA Experiment 108597 PARAMETER Experiment Name: Zm_100uM_ABA_P Parameter: Organism Value: Zea mays
  misc_feature: MA Experiment 108597 PARAMETER Experiment Name: Zm_100uM_ABA_P Parameter: Plant Line Value: 35A19
  misc_feature: MA Experiment 108597 PARAMETER Experiment Name: Zm_100uM_ABA_P Parameter: Timepoint (hr) Value: 24
  misc_feature: MA Experiment 108597 PARAMETER Experiment Name: Zm_100uM_ABA_P Parameter: Tissue Value: Aerial
  misc_feature: MA Experiment 108597 PARAMETER Experiment Name: Zm_100uM_ABA_P Parameter: Treatment Value: 100uM ABA vs. No Treatment
  misc_feature: MA Experiment ID: 108689 Result: Down-regulated in Transcription
  misc_feature: MA Experiment 108689 PARAMETER Experiment Name: Zm_Drought_Roots_P Parameter: Age (day) Value: 9
  misc_feature: MA Experiment 108689 PARAMETER Experiment Name: Zm_Drought_Roots_P Parameter: Organism Value: Zea mays
  misc_feature: MA Experiment 108689 PARAMETER Experiment Name: Zm_Drought_Roots_P Parameter: Plant Line Value: 35A19
  misc_feature: MA Experiment 108689 PARAMETER Experiment Name: Zm_Drought_Roots_P Parameter: Timepoint (hr) Value: 24
  misc_feature: MA Experiment 108689 PARAMETER Experiment Name: Zm_Drought_Roots_P Parameter: Tissue Value: Roots
  misc_feature: MA Experiment 108689 PARAMETER Experiment Name: Zm_Drought_Roots_P Parameter: Treatment Value: Drought vs. No Drought
aaagaacccgagcaccgcctcagctcatcctcgcagatacgtttcagttccggagcgactagcgcgagcgttcagggattatttactgaaagagagagtgttcagggattttagcacttgttcatggctgctgcgtgcatcagccatcgctttcgccactccaagctcccggtactggtcctggcgctggcgacggtggtggccgccgcacgggctcagctgtcgccgccgacgttctacgcctcgtcgtgccctgccgcgctcgtcaccatcaacgccgccgtgagggctgccgtgctgctggaccgccgcatgggcgcctccctgctccggctccacttccacgactgcttcgtgcagggctgcgacgcgtccgttctgctggacgacacgggcaacttcaccggggagaagggcgcgggccccaacgcgggctcgctcagggggttcggcgtcatcgacaccgtcaaggccctgctggaggcgctgtgcccgcggaccgtgtcgtgcgccgacatcctcgccgtcgccgcccgtgactctgtcgtcgcgctcggaggcccatcgtggaccgtgcagctcggcaggagggactccaccacggcgagcctctccaccgcgaacaccgacctcccctcgccggcgtccagcctgagcaccctgctcgccgcattcgccaggaaaggcggtcagcagcaccgacatggtcgctctgtctggtgcgtccctcaccgatcaatcaaccacggaccacgctttcatcagtgaccagtcatcaccgcagcgcctggcttcacatcacagtgatgttatggcatggtcaccgacgtgaccatgcaactaccagttcccctgtgcctctactctaacagcggtggcagcttggcagttagcaccagcgcggcagcgccaccgccacgtactggtcaccactgacacgtgagcggttgcgtatgcatgatgcaggagcccacacggtggggcaagcgcagtgccagaactaccaggccaggatctacaacgacgccaacatcaacgcggccttcgcggcgtcgctgagggccggctgcccggcgtccggagggggcggcgccaacgcgccgctggacgcgtccacgccgaacgcgttcgacaacgcgtactacggcgatctggtcgcgcagcagggcctgctgcactccgatcaagagctcttcaacggtggctccacggacgcactggtcaggagctacgcggccagctcggcgcggtttagtagcgacttcgccgcagccatggtcaggatgggcgccattggtgtcctgaccgggagcagcggacaggtgcggcgcaactgccggaaggtgaactagccagctcgcagaatactgcattgtatgcatcacactggtggaagaaattgtgtgtgctgagttatccaaccatggttgaacgaagttgtaaagattaaagggcaacgaagtcatatagcttgcattgatgttgtcattaaagaagtacaccctccatttttttctgcaaatacctagaacatttaggtatcactgtagctcaactttgagtataaatgtagcatataattatctctttcatatggccaacaataatatacaaatgtattctgtataagttacaattattataataaaattcaattcc

SEQ ID NO: 6938 - protein, 214 aa, Zea mays subsp. mays
  peptide (1)..(214): Ceres Seq. ID no. 12387043
  misc_feature (50)..(188): Pfam Name: Peroxidase Pfam Description: Peroxidase
  misc_feature (17)..(191): Homolog of NCBI NO: 34393249 NR Description: putative peroxidase precursor [Oryza sativa
  misc_feature (19)..(188): Homolog of NCBI NO: 2117619 NR Description: peroxidase (EC 1.11.1.7) 4 precursor - wheat
  misc_feature (13)..(188): Homolog of NCBI NO: 585662 NR Description: Peroxidase 2 precursor >gi|7433040|pir||T03929
  misc_feature (19)..(188): Homolog of NCBI NO: 34393250 NR Description: peroxidase [Oryza sativa (japonica
  misc_feature (13)..(188): Homolog of NCBI NO: 2429292 NR Description: peroxidase [Oryza sativa]
  misc_feature (13)..(188): Homolog of NCBI NO: 6093671 NR Description: Cationic peroxidase 1 precursor (PNPC1)
  misc_feature (12)..(188): Homolog of NCBI NO: 34393251 NR Description: peroxidase [Oryza sativa (japonica
  misc_feature (12)..(188): Homolog of NCBI NO: 100694 NR Description: peroxidase (EC 1.11.1.7) precursor - rice
  misc_feature (13)..(188): Homolog of NCBI NO: 99872 NR Description: peroxidase (EC 1.11.1.7) precursor, cationic
  misc_feature (19)..(188): Homolog of NCBI NO: 2429288 NR Description: peroxidase [Oryza sativa]
MAAACISHRFRHSKLPVLVLALATVVAAARAQLSPPTFYASSCPAALVTINAAVRAAVLLDRRMGASLLRLHFHDCFVQGCDASVLLDDTGNFTGEKGAGPNAGSLRGFGVIDTVKALLEALCPRTVSCADILAVAARDSVVALGGPSWTVQLGRRDSTTASLSTANTDLPSPASSLSTLLAAFARKGGQQHRHGRSVWCVPHRSINHGPRFHQ

SEQ ID NO: 6939 - protein, 151 aa, Zea mays subsp. mays
  peptide (1)..(151): Ceres Seq. ID no. 12387044
  misc_feature (1)..(125): Pfam Name: Peroxidase Pfam Description: Peroxidase
  misc_feature (1)..(128): Homolog of NCBI NO: 34393249 NR Description: putative peroxidase precursor [Oryza sativa
  misc_feature (1)..(125): Homolog of NCBI NO: 2117619 NR Description: peroxidase (EC 1.11.1.7) 4 precursor - wheat
  misc_feature (1)..(125): Homolog of NCBI NO: 585662 NR Description: Peroxidase 2 precursor >gi|7433040|pir||T03929
  misc_feature (1)..(125): Homolog of NCBI NO: 34393250 NR Description: peroxidase [Oryza sativa (japonica
  misc_feature (1)..(125): Homolog of NCBI NO: 2429292 NR Description: peroxidase [Oryza sativa]
  misc_feature (1)..(125): Homolog of NCBI NO: 6093671 NR Description: Cationic peroxidase 1 precursor (PNPC1)
  misc_feature (1)..(125): Homolog of NCBI NO: 34393251 NR Description: peroxidase [Oryza sativa (japonica
  misc_feature (1)..(125): Homolog of NCBI NO: 100694 NR Description: peroxidase (EC 1.11.1.7) precursor - rice
  misc_feature (1)..(125): Homolog of NCBI NO: 99872 NR Description: peroxidase (EC 1.11.1.7) precursor, cationic
  misc_feature (1)..(125): Homolog of NCBI NO: 2429288 NR Description: peroxidase [Oryza sativa]
MGASLLRLHFHDCFVQGCDASVLLDDTGNFTGEKGAGPNAGSLRGFGVIDTVKALLEALCPRTVSCADILAVAARDSVVALGGPSWTVQLGRRDSTTASLSTANTDLPSPASSLSTLLAAFARKGGQQHRHGRSVWCVPHRSINHGPRFHQ

SEQ ID NO: 6940 - protein, 132 aa, Zea mays subsp. mays
  peptide (1)..(132): Ceres Seq. ID no. 12387045
  misc_feature (4)..(96): Pfam Name: Peroxidase Pfam Description: Peroxidase
  misc_feature (4)..(132): Homolog of NCBI NO: 34393249 NR Description: putative peroxidase precursor [Oryza sativa
  misc_feature (4)..(132): Homolog of NCBI NO: 2117619 NR Description: peroxidase (EC 1.11.1.7) 4 precursor - wheat
  misc_feature (4)..(132): Homolog of NCBI NO: 585662 NR Description: Peroxidase 2 precursor >gi|7433040|pir||T03929
  misc_feature (4)..(132): Homolog of NCBI NO: 34393250 NR Description: peroxidase [Oryza sativa (japonica
  misc_feature (4)..(132): Homolog of NCBI NO: 2429292 NR Description: peroxidase [Oryza sativa]
  misc_feature (1)..(132): Homolog of NCBI NO: 6093671 NR Description: Cationic peroxidase 1 precursor (PNPC1)
  misc_feature (4)..(132): Homolog of NCBI NO: 34393251 NR Description: peroxidase [Oryza sativa (japonica
  misc_feature (1)..(132): Homolog of NCBI NO: 99872 NR Description: peroxidase (EC 1.11.1.7) precursor, cationic
  misc_feature (4)..(132): Homolog of NCBI NO: 100694 NR Description: peroxidase (EC 1.11.1.7) precursor - rice
  misc_feature (4)..(132): Homolog of NCBI NO: 2429288 NR Description: peroxidase [Oryza sativa]
MHDAGAHTVGQAQCQNYQARIYNDANINAAFAASLRAGCPASGGGGANAPLDASTPNAFDNAYYGDLVAQQGLLHSDQELFNGGSTDALVRSYAASSARFSSDFAAAMVRMGAIGVLTGSSGQVRRNCRKVN

SEQ ID NO: 6941 - DNA, 1157 bp, Zea mays subsp. mays
  misc_feature (1)..(1157): Ceres Seq. ID no. 13496128
  misc_feature: MA Experiment ID: 108535 Result: Up-regulated in Transcription
  misc_feature: MA Experiment 108535 PARAMETER Experiment Name: Zm_Meristem_P Parameter: Age (day) Value: 8
  misc_feature: MA Experiment 108535 PARAMETER Experiment Name: Zm_Meristem_P Parameter: Organism Value: Zea mays
  misc_feature: MA Experiment 108535 PARAMETER Experiment Name: Zm_Meristem_P Parameter: Plant Line Value: 35A19
  misc_feature: MA Experiment 108535 PARAMETER Experiment Name: Zm_Meristem_P Parameter: Tissue Value: Root Meristem vs. Above Root Meristem
  misc_feature: MA Experiment ID: 108556 Result: Down-regulated in Transcription
  misc_feature: MA Experiment 108556 PARAMETER Experiment Name: Zm_Drought_P Parameter: Age (day) Value: 9
  misc_feature: MA Experiment 108556 PARAMETER Experiment Name: Zm_Drought_P Parameter: Organism Value: Zea mays
  misc_feature: MA Experiment 108556 PARAMETER Experiment Name: Zm_Drought_P Parameter: Plant Line Value: 35A19
  misc_feature: MA Experiment 108556 PARAMETER Experiment Name: Zm_Drought_P Parameter: Timepoint (hr) Value: 24
  misc_feature: MA Experiment 108556 PARAMETER Experiment Name: Zm_Drought_P Parameter: Tissue Value: Aerial
  misc_feature: MA Experiment 108556 PARAMETER Experiment Name: Zm_Drought_P Parameter: Treatment Value: Drought vs. No Drought
  misc_feature: MA Experiment ID: 20000488 Result: Up-regulated in Transcription
  misc_feature: MA Experiment 20000488 PARAMETER Experiment Name: Zm_50mM_NH4NO3_L_to_H_P Parameter: Organism Value: Zea mays
  misc_feature: MA Experiment 20000488 PARAMETER Experiment Name: Zm_50mM_NH4NO3_L_to_H_P Parameter: Timepoint (hr) Value: 8
  misc_feature: MA Experiment 20000488 PARAMETER Experiment Name: Zm_50mM_NH4NO3_L_to_H_P Parameter: Tissue Value: Leaves
  misc_feature: MA Experiment 20000488 PARAMETER Experiment Name: Zm_50mM_NH4NO3_L_to_H_P Parameter: Treatment Value: 50mM NH4NO3 vs. 100mM Mannitol
  misc_feature: MA Experiment ID: 20000492 Result: Up-regulated in Transcription
  misc_feature: MA Experiment 20000492 PARAMETER Experiment Name: Zm_Hybrid_Seed_Dev_P Parameter: DAP Value: 12
  misc_feature: MA Experiment 20000492 PARAMETER Experiment Name: Zm_Hybrid_Seed_Dev_P Parameter: Organism Value: Zea mays
  misc_feature: MA Experiment 20000492 PARAMETER Experiment Name: Zm_Hybrid_Seed_Dev_P Parameter: Plant Line Value: 35A19
  misc_feature: MA Experiment 20000492 PARAMETER Experiment Name: Zm_Hybrid_Seed_Dev_P Parameter: Tissue Value: Fert Kernel vs. Unfert Floret
aaagcccagcacgaccaaaacccagaacctgagaatggcgcagttccttcgcggcaaggccgccgccgccgccaccggggcggcggcgctgcgcgcgtcntctccggcgccatggcggcggacggcctccgcgtcgtaccaccacacgatccaggctgtaccgcgggagacagccggcccgcgcgccgcggcgcgcgagcgccgccacggccgcgtcccggcggtcctgctcacgctcgcgggcgccgcgccagggaacggaattgcccaccggcacctccttaccgccgacaggaggcagctcgcggagatgctcaagcagtcgccctacttcctctccacccccgtccgcctccaggtccgcgcgggcgagcgatccaacgccatcctccacgccggcaccgtcctccccatcaaggtgcatagagatgaaaattctgggaatatactgaatttggtaatggtgaaggcagatgaaggaacaatgctgaaggtggatttgcctgtagagttcaagggagaggatgcttgccctgggttgaagaaaggaggctttttgcagaaaataaggaccagcctggtgtatctctgcccagctgagcacatccctccaaaaattgaggtggacctgacaaatcttgatgtcggagatagggtattgatgcatgacattcccgtccatccatcgctcaagttgctgagtaaaaacgagaccatgcccgtctgcaagatcttggcctcaaagccagacgagtaggaggcgctgcaaatacttcagagctgataacattgtacctttaggtggtacagccctccagcagctccgtccctagttcttggcttgctttttggtcatctgtcccctaggtttcaatgtgatagtggattcagacaagctatgggcttcaagtaaagatacgaaggaacaaaatgaagaaatatcactggagagacattgtctgtaccaaccgctatagaataacatcctttctcattcagtttgggttcagggacacatgacatgtaagacgactatcctttgctgtggcctgggtgaattcattctctaagctactcttgcagcggctcacaattcatcgtcctgactgcatgcattgtactgtcatgattctacgtattgaatgttgtattcatgc

SEQ ID NO: 6942 - protein, 251 aa, Zea mays subsp. mays
  peptide (1)..(251): Ceres Seq. ID no. 13496129
  misc_feature (12)..(251): Homolog of NCBI NO: 15240108 NR Description: expressed protein [Arabidopsis thaliana] gene_id:MUD21.12~pir||T05594~similar to unknown protein thaliana] >gi|15450930|gb|AAK96736.1| Unknown protein
  misc_feature (49)..(248): Homolog of NCBI NO: 15236554 NR Description: expressed protein [Arabidopsis thaliana]
  misc_feature (37)..(210): Homolog of NCBI NO: 34912284 NR Description: P0451D05.2 [Oryza sativa (japonica
  misc_feature (49)..(248): Homolog of NCBI NO: 15644375 NR Description: general stress protein Ctc [Thermotoga maritima]
  misc_feature (49)..(241): Homolog of NCBI NO: 22998879 NR Description: hypothetical protein [Magnetococcus sp. MC-1]
  misc_feature (67)..(234): Homolog of NCBI NO: 37519968 NR Description: 50S ribosomal protein L25 [Gloeobacter violaceus]
  misc_feature (135)..(251): Homolog of NCBI NO: 13472406 NR Description: 50S ribosomal protein L25 [Mesorhizobium loti]
  misc_feature (154)..(231): Homolog of NCBI NO: 16124740 NR Description: ribosomal 5S rRNA E-loop binding protein [Caulobacter crescentus CB15] >gi|25351958|pir||D87309
  misc_feature (49)..(246): Homolog of NCBI NO: 22965584 NR Description: hypothetical protein [Rhodospirillum rubrum]
  misc_feature (97)..(251): Homolog of NCBI NO: 29375409 NR Description: ribosomal protein L25 [Enterococcus faecalis >gi|29342869|gb|AAO80633.1| ribosomal protein L25 [Enterococcus
  misc_feature (33)..(33): Xaa is any aa, unknown or other
KPSTTKTQNLRMAQFLRGKAAAAATGAAALRAXSPAPWRRTASASYHHTIQAVPRETAGPRAAARERRHGRVPAVLLTLAGAAPGNGIAHRHLLTADRRQLAEMLKQSPYFLSTPVRLQVRAGERSNAILHAGTVLPIKVHRDENSGNILNLVMVKADEGTMLKVDLPVEFKGEDACPGLKKGGFLQKIRTSLVYLCPAEHIPPKIEVDLTNLDVGDRVLMHDIPVHPSLKLLSKNETMPVCKILASKPDE

SEQ ID NO: 6943 - protein, 240 aa, Zea mays subsp. mays
  peptide (1)..(240): Ceres Seq. ID no. 13496130
  misc_feature (1)..(240): Homolog of NCBI NO: 15240108 NR Description: expressed protein [Arabidopsis thaliana] gene_id:MUD21.12~pir||T05594~similar to unknown protein thaliana] >gi|15450930|gb|AAK96736.1| Unknown protein
  misc_feature (38)..(237): Homolog of NCBI NO: 15236554 NR Description: expressed protein [Arabidopsis thaliana]
  misc_feature (26)..(199): Homolog of NCBI NO: 34912284 NR Description: P0451D05.2 [Oryza sativa (japonica
  misc_feature (38)..(237): Homolog of NCBI NO: 15644375 NR Description: general stress protein Ctc [Thermotoga maritima]
  misc_feature (38)..(230): Homolog of NCBI NO: 22998879 NR Description: hypothetical protein [Magnetococcus sp. MC-1]
  misc_feature (56)..(223): Homolog of NCBI NO: 37519968 NR Description: 50S ribosomal protein L25 [Gloeobacter violaceus]
  misc_feature (124)..(240): Homolog of NCBI NO: 13472406 NR Description: 50S ribosomal protein L25 [Mesorhizobium loti]
  misc_feature (143)..(220): Homolog of NCBI NO: 16124740 NR Description: ribosomal 5S rRNA E-loop binding protein [Caulobacter crescentus CB15] >gi|25351958|pir||D87309
  misc_feature (38)..(235): Homolog of NCBI NO: 22965584 NR Description: hypothetical protein [Rhodospirillum rubrum]
  misc_feature (86)..(240): Homolog of NCBI NO: 29375409 NR Description: ribosomal protein L25 [Enterococcus faecalis >gi|29342869|gb|AAO80633.1| ribosomal protein L25 [Enterococcus
  misc_feature (22)..(22): Xaa is any aa, unknown or other
MAQFLRGKAAAAATGAAALRAXSPAPWRRTASASYHHTIQAVPRETAGPRAAARERRHGRVPAVLLTLAGAAPGNGIAHRHLLTADRRQLAEMLKQSPYFLSTPVRLQVRAGERSNAILHAGTVLPIKVHRDENSGNILNLVMVKADEGTMLKVDLPVEFKGEDACPGLKKGGFLQKIRTSLVYLCPAEHIPPKIEVDLTNLDVGDRVLMHDIPVHPSLKLLSKNETMPVCKILASKPDE

SEQ ID NO: 6944 - protein, 148 aa, Zea mays subsp. mays
  peptide (1)..(148): Ceres Seq. ID no. 13496131
  misc_feature (1)..(148): Homolog of NCBI NO: 15240108 NR Description: expressed protein [Arabidopsis thaliana] gene_id:MUD21.12~pir||T05594~similar to unknown protein thaliana] >gi|15450930|gb|AAK96736.1| Unknown protein
  misc_feature (1)..(145): Homolog of NCBI NO: 15236554 NR Description: expressed protein [Arabidopsis thaliana]
  misc_feature (1)..(107): Homolog of NCBI NO: 34912284 NR Description: P0451D05.2 [Oryza sativa (japonica
  misc_feature (1)..(145): Homolog of NCBI NO: 15644375 NR Description: general stress protein Ctc [Thermotoga maritima]
  misc_feature (1)..(138): Homolog of NCBI NO: 22998879 NR Description: hypothetical protein [Magnetococcus sp. MC-1]
  misc_feature (1)..(131): Homolog of NCBI NO: 37519968 NR Description: 50S ribosomal protein L25 [Gloeobacter violaceus]
  misc_feature (32)..(148): Homolog of NCBI NO: 13472406 NR Description: 50S ribosomal protein L25 [Mesorhizobium loti]
  misc_feature (51)..(128): Homolog of NCBI NO: 16124740 NR Description: ribosomal 5S rRNA E-loop binding protein [Caulobacter crescentus CB15] >gi|25351958|pir||D87309
  misc_feature (1)..(143): Homolog of NCBI NO: 22965584 NR Description: hypothetical protein [Rhodospirillum rubrum]
  misc_feature (1)..(148): Homolog of NCBI NO: 29375409 NR Description: ribosomal protein L25 [Enterococcus faecalis >gi|29342869|gb|AAO80633.1| ribosomal protein L25 [Enterococcus
MLKQSPYFLSTPVRLQVRAGERSNAILHAGTVLPIKVHRDENSGNILNLVMVKADEGTMLKVDLPVEFKGEDACPGLKKGGFLQKIRTSLVYLCPAEHIPPKIEVDLTNLDVGDRVLMHDIPVHPSLKLLSKNETMPVCKILASKPDE

SEQ ID NO: 6945 - DNA, 1620 bp, Zea mays subsp. mays
  misc_feature (1)..(1620): Ceres Seq. ID no. 12408990
  misc_feature: MA Experiment ID: 108529 Result: Up-regulated in Transcription
  misc_feature: MA Experiment 108529 PARAMETER Experiment Name: Zm_Imbibed_Seeds_P Parameter: Age (day) Value: 5 vs. 2
  misc_feature: MA Experiment 108529 PARAMETER Experiment Name: Zm_Imbibed_Seeds_P Parameter: Organism Value: Zea mays
  misc_feature: MA Experiment 108529 PARAMETER Experiment Name: Zm_Imbibed_Seeds_P Parameter: Plant Line Value: 35A19
  misc_feature: MA Experiment 108529 PARAMETER Experiment Name: Zm_Imbibed_Seeds_P Parameter: Tissue Value: Roots vs. Embryo
  misc_feature: MA Experiment ID: 108535 Result: Down-regulated in Transcription
  misc_feature: MA Experiment 108535 PARAMETER Experiment Name: Zm_Meristem_P Parameter: Age (day) Value: 8
  misc_feature: MA Experiment 108535 PARAMETER Experiment Name: Zm_Meristem_P Parameter: Organism Value: Zea mays
  misc_feature: MA Experiment 108535 PARAMETER Experiment Name: Zm_Meristem_P Parameter: Plant Line Value: 35A19
  misc_feature: MA Experiment 108535 PARAMETER Experiment Name: Zm_Meristem_P Parameter: Tissue Value: Root Meristem vs. Above Root Meristem
actgtactaaaccgcgaggaaaagtagcaaagaaattacaagggggtggacgcgcggggggcaagtcgtctccttcgatttcgttcttgcctctttgcctctctcaaggtctgctcaaactcaaagtggattcggcagaacacgcatggcgtagagcgcggggagcaagagatttcctagcttcaagaacctggaagaacaagtcgaggatccgtcgtcgagcccgactgttctaagagaaagtaattagcaagcagctctcgattatactgtattatttatcgaaaccctatctaagctagtagcaagctagctagctagaagaggaggaggaagctggcgaactggtggtgggacgaggggcggggcggcctgccggagccatcccttggcaagaaccaagaagaaatggcaccttcctccaaggacggcgccaccgccaccgagcagccgacgagcggcgacgacgaccgggagaacggcggcacgggcgagcccaaggaaggcgcggtggtggcgggcaaccggcggccccgcgggcggccgccggggtccaagaacaagcccaagccgcccatcttcgtgacgcgcgacagccccaacgcgctgcgcagccacgtgatggaggtggccggcggcgccgacgtggccgagtccatcgcccacttcgcgcgccgcaggcagcgcggcgtgtgcgtgctcagcggcgcgggcaccgtcgccgacgtggcgctccgccagcccgcggctccgggcgccgtggtcgccctccgcggccgcttcgagatcctctcgctcaccggcacgttcctgccgggccccgcgccgccgggctccacggggctcaccgtgtacctcgcgggcggccaggggcaggtcgtcggcggcagcgtcgtcggcacgctcaccgcggcggggcccgtcatggtgatggcgtccacgttcgccaacgccacctacgagaggctgccgctggacgacgccgacgaggagcccgccgggcagcaggcggcgcagctgcctcccggaccgggcggagggcagcctatggtaatgggcgggatggccgacccctcagcggtgccaatgttcggcggcgccggcgntgtgccgccaagcctcatgccagcaggggccgcagccgcctcctccggtgcgggcctgcagctcgggcacgaccgacttgcatgggctcatgcacggccaccgccatactaggaagccggggaggatgcatcatccatgaccgaggaaattgatgaattagaaatggaggatcgttcagcgcaacaacagctagcagcagctcaaggacgactgccactcaccatcatatagtaactagaaccgaacgaagatcgaattaagcgctagcttccaggagctaataaaactctcttcgatcaattctacctattacagtactctgctaagaaggtaaactacttatagtgctatatatgtatgtatattactacactgctactgcatgcatgtgactgtgtggctgtgccaaatgtcagcgcaagatacgatggagcttgcattgttttttcccattgtaatgtttgatttatattaattattagatacagcatgataaatagatgatggatgatt

SEQ ID NO: 6946 - protein, 269 aa, Zea mays subsp. mays
  peptide (1)..(269): Ceres Seq. ID no. 12408991
  misc_feature (1)..(267): Homolog of NCBI NO: 18414224 NR Description: Expressed protein; protein id: At4g14465.1, by cDNA: 36844. [Arabidopsis thaliana]
  misc_feature (1)..(267): Homolog of NCBI NO: 21593180 NR Description: putative DNA-binding protein [Arabidopsis
  misc_feature (17)..(265): Homolog of NCBI NO: 18396925 NR Description: expressed protein; protein id: At3g04570.1, by cDNA: 15781. [Arabidopsis thaliana] hypothetical protein [Arabidopsis thaliana]
  misc_feature (3)..(267): Homolog of NCBI NO: 38346718 NR Description: OSJNBa0086O06.16 [Oryza sativa (japonica
  misc_feature (17)..(232): Homolog of NCBI NO: 34902080 NR Description: unknown protein [Oryza sativa (japonica >gi|34902088|ref|NP_912390.1| hypothetical protein [Oryza sativa
  misc_feature (1)..(267): Homolog of NCBI NO: 15235815 NR Description: putative DNA binding protein; protein id:
  misc_feature (7)..(252): Homolog of NCBI NO: 34905212 NR Description: P0672D01.8 [Oryza sativa (japonica
  misc_feature (1)..(267): Homolog of NCBI NO: 15234404 NR Description: putative DNA-binding protein; protein id:
  misc_feature (17)..(251): Homolog of NCBI NO: 15236657 NR Description: hypothetical protein; protein id: At4g17800.1, by cDNA: gi_17933298, supported by cDNA: gi_20453386 [Arabidopsis
  misc_feature (13)..(211): Homolog of NCBI NO: 15225475 NR Description: putative AT-hook DNA-binding protein; protein id:
  misc_feature (233)..(233): Xaa is any aa, unknown or other
MAPSSKDGATATEQPTSGDDDRENGGTGEPKEGAVVAGNRRPRGRPPGSKNKPKPPIFVTRDSPNALRSHVMEVAGGADVAESIAHFARRRQRGVCVLSGAGTVADVALRQPAAPGAVVALRGRFEILSLTGTFLPGPAPPGSTGLTVYLAGGQGQVVGGSVVGTLTAAGPVMVMASTFANATYERLPLDDADEEPAGQQAAQLPPGPGGGQPMVMGGMADPSAVPMFGGAGXVPPSLMPAGAAAASSGAGLQLGHDRLAWAHARPPPY

SEQ ID NO: 6947 - protein, 198 aa, Zea mays subsp. mays
  peptide (1)..(198): Ceres Seq. ID no. 12408992
  misc_feature (1)..(196): Homolog of NCBI NO: 18414224 NR Description: Expressed protein; protein id: At4g14465.1, by cDNA: 36844. [Arabidopsis thaliana]
  misc_feature (1)..(196): Homolog of NCBI NO: 21593180 NR Description: putative DNA-binding protein [Arabidopsis
  misc_feature (1)..(194): Homolog of NCBI NO: 18396925 NR Description: expressed protein; protein id: At3g04570.1, by cDNA: 15781. [Arabidopsis thaliana] hypothetical protein [Arabidopsis thaliana]
  misc_feature (1)..(196): Homolog of NCBI NO: 38346718 NR Description: OSJNBa0086O06.16 [Oryza sativa (japonica
  misc_feature (1)..(161): Homolog of NCBI NO: 34902080 NR Description: unknown protein [Oryza sativa (japonica >gi|34902088|ref|NP_912390.1| hypothetical protein [Oryza sativa
  misc_feature (1)..(196): Homolog of NCBI NO: 15235815 NR Description: putative DNA binding protein; protein id:
  misc_feature (1)..(181): Homolog of NCBI NO: 34905212 NR Description: P0672D01.8 [Oryza sativa (japonica
  misc_feature (1)..(196): Homolog of NCBI NO: 15234404 NR Description: putative DNA-binding protein; protein id:
  misc_feature (1)..(180): Homolog of NCBI NO: 15236657 NR Description: hypothetical protein; protein id: At4g17800.1, by cDNA: gi_17933298, supported by cDNA: gi_20453386 [Arabidopsis
  misc_feature (1)..(140): Homolog of NCBI NO: 15225475 NR Description: putative AT-hook DNA-binding protein; protein id:
  misc_feature (162)..(162): Xaa is any aa, unknown or other
MEVAGGADVAESIAHFARRRQRGVCVLSGAGTVADVALRQPAAPGAVVALRGRFEILSLTGTFLPGPAPPGSTGLTVYLAGGQGQVVGGSVVGTLTAAGPVMVMASTFANATYERLPLDDADEEPAGQQAAQLPPGPGGGQPMVMGGMADPSAVPMFGGAGXVPPSLMPAGAAAASSGAGLQLGHDRLAWAHARPPPY

SEQ ID NO: 6948 - DNA, 1555 bp, Zea mays subsp. mays
  misc_feature (1)..(1555): Ceres Seq. ID no. 12408986
  misc_feature: MA Experiment ID: 108523 Result: Down-regulated in Transcription
  misc_feature: MA Experiment 108523 PARAMETER Experiment Name: Zm_42deg_Heat_P Parameter: Age (day) Value: 8
  misc_feature: MA Experiment 108523 PARAMETER Experiment Name: Zm_42deg_Heat_P Parameter: Organism Value: Zea mays
  misc_feature: MA Experiment 108523 PARAMETER Experiment Name: Zm_42deg_Heat_P Parameter: Plant Line Value: 35A19
  misc_feature: MA Experiment 108523 PARAMETER Experiment Name: Zm_42deg_Heat_P Parameter: Temperature (deg C) Value: 42 vs. 22
  misc_feature: MA Experiment 108523 PARAMETER Experiment Name: Zm_42deg_Heat_P Parameter: Timepoint (hr) Value: 6
  misc_feature: MA Experiment 108523 PARAMETER Experiment Name: Zm_42deg_Heat_P Parameter: Tissue Value: Aerial
  misc_feature: MA Experiment ID: 108527 Result: Up-regulated in Transcription
  misc_feature: MA Experiment 108527 PARAMETER Experiment Name: Zm_5mM_NO_P Parameter: Age (day) Value: 8
  misc_feature: MA Experiment 108527 PARAMETER Experiment Name: Zm_5mM_NO_P Parameter: Organism Value: Zea mays
  misc_feature: MA Experiment 108527 PARAMETER Experiment Name: Zm_5mM_NO_P Parameter: Plant Line Value: 35A19
  misc_feature: MA Experiment 108527 PARAMETER Experiment Name: Zm_5mM_NO_P Parameter: Timepoint (hr) Value: 6
  misc_feature: MA Experiment 108527 PARAMETER Experiment Name: Zm_5mM_NO_P Parameter: Tissue Value: Aerial
  misc_feature: MA Experiment 108527 PARAMETER Experiment Name: Zm_5mM_NO_P Parameter: Treatment Value: 5mM NO vs. No Treatment
  misc_feature: MA Experiment ID: 108535 Result: Down-regulated in Transcription
  misc_feature: MA Experiment 108535 PARAMETER Experiment Name: Zm_Meristem_P Parameter: Age (day) Value: 8
  misc_feature: MA Experiment 108535 PARAMETER Experiment Name: Zm_Meristem_P Parameter: Organism Value: Zea mays
  misc_feature: MA Experiment 108535 PARAMETER Experiment Name: Zm_Meristem_P Parameter: Plant Line Value: 35A19
  misc_feature: MA Experiment 108535 PARAMETER Experiment Name: Zm_Meristem_P Parameter: Tissue Value: Root Meristem vs. Above Root Meristem
  misc_feature: MA Experiment ID: 108689 Result: Down-regulated in Transcription
  misc_feature: MA Experiment 108689 PARAMETER Experiment Name: Zm_Drought_Roots_P Parameter: Age (day) Value: 9
  misc_feature: MA Experiment 108689 PARAMETER Experiment Name: Zm_Drought_Roots_P Parameter: Organism Value: Zea mays
  misc_feature: MA Experiment 108689 PARAMETER Experiment Name: Zm_Drought_Roots_P Parameter: Plant Line Value: 35A19
  misc_feature: MA Experiment 108689 PARAMETER Experiment Name: Zm_Drought_Roots_P Parameter: Timepoint (hr) Value: 24
  misc_feature: MA Experiment 108689 PARAMETER Experiment Name: Zm_Drought_Roots_P Parameter: Tissue Value: Roots
  misc_feature: MA Experiment 108689 PARAMETER Experiment Name: Zm_Drought_Roots_P Parameter: Treatment Value: Drought vs. No Drought
  misc_feature: MA Experiment ID: 20000108 Result: Down-regulated in Transcription
  misc_feature: MA Experiment 20000108 PARAMETER Experiment Name: Zm_Root-Tips_P Parameter: Age (day) Value: 12
  misc_feature: MA Experiment 20000108 PARAMETER Experiment Name: Zm_Root-Tips_P Parameter: Organism Value: Zea mays
  misc_feature: MA Experiment 20000108 PARAMETER Experiment Name: Zm_Root-Tips_P Parameter: Tissue Value: Root tips vs. Root mid region    35
  misc_feature: MA Experiment 20000108 PARAMETER Experiment Name: Zm_Root-Tips_P Parameter: Tissue Value: Root tips vs. Root mid region   Sequence Listing-Misc Features (4)
  misc_feature: MA Experiment ID: 20000480 Result: Down-regulated in Transcription
  misc_feature: MA Experiment 20000480 PARAMETER Experiment Name: Zm_Drought_P Parameter: Age (day) Value: 11
  misc_feature: MA Experiment 20000480 PARAMETER Experiment Name: Zm_Drought_P Parameter: Organism Value: Zea mays
  misc_feature: MA Experiment 20000480 PARAMETER Experiment Name: Zm_Drought_P Parameter: Plant Line Value: 35A19
  misc_feature: MA Experiment 20000480 PARAMETER Experiment Name: Zm_Drought_P Parameter: Timepoint (hr) Value: 72
  misc_feature: MA Experiment 20000480 PARAMETER Experiment Name: Zm_Drought_P Parameter: Tissue Value: Aerial
  misc_feature: MA Experiment 20000480 PARAMETER Experiment Name: Zm_Drought_P Parameter: Treatment Value: Drought vs. No Drought
  misc_feature: MA Experiment ID: 20000492 Result: Down-regulated in Transcription
  misc_feature: MA Experiment 20000492 PARAMETER Experiment Name: Zm_Hybrid_Seed_Dev_P Parameter: DAP Value: 12
  misc_feature: MA Experiment 20000492 PARAMETER Experiment Name: Zm_Hybrid_Seed_Dev_P Parameter: Organism Value: Zea mays
  misc_feature: MA Experiment 20000492 PARAMETER Experiment Name: Zm_Hybrid_Seed_Dev_P Parameter: Plant Line Value: 35A19
  misc_feature: MA Experiment 20000492 PARAMETER Experiment Name: Zm_Hybrid_Seed_Dev_P Parameter: Tissue Value: Fert Kernel vs. Unfert Floret
  misc_feature: MA Experiment ID: 20000535 Result: Down-regulated in Transcription
  misc_feature: MA Experiment 20000535 PARAMETER Experiment Name: Zm_Hybrid_Seed_Dev_P Parameter: DAP Value: 30 vs. 12
  misc_feature: MA Experiment 20000535 PARAMETER Experiment Name: Zm_Hybrid_Seed_Dev_P Parameter: Organism Value: Zea mays
  misc_feature: MA Experiment 20000535 PARAMETER Experiment Name: Zm_Hybrid_Seed_Dev_P Parameter: Plant Line Value: 35A19
  misc_feature: MA Experiment 20000535 PARAMETER Experiment Name: Zm_Hybrid_Seed_Dev_P Parameter: Tissue Value: Embryo vs. Unfert Floret
ttctgcaagccttgctccatttgcgactcgcgagctcaccttccacaccctacctactcctccactctgagctcacaccaaacagcccgtgcaccaaggccaccattcacctccaccaacaacaaacgggaactcttcacagcttcgcacctcgcgtcacaacaccaagacgcacgtaggagggaacctcaagcttcagtcgtccatggctcagcagcaaacaaatcctgaagaggtggtcctcgggcaggaggtcggggccgcgagggtggccactctcaaccgcccgcgccagctcaacggcatctccgacagagtggtgtacctcctcgcacagtttctggagaaatgggagaaggatgagaacgccaaattcgtcatctttaagggtgctgggcgtgcattttctgctggtggggacctaaagatgttttatgaagggaaatcaaatgattcctgcctcgaggttgtgtatagaatgtattggctttgctaccacattcacacgtacaagaaaaccatggttgctcttgttaatgggcttgtcatgggtggtggcgctgcaatggttgcgccactaaagtttgcagttgtcacagagaaaacaatctttgctactcctgaggctagtgttggattgcacacagattgtagcttttcctacatccattcccggctccctggatatttaggcgagtatctggctttaactggtgctagactgaatgcgaaggaaatgatttctgctggtcttgctactcattttgtcagttctgaaaaattggaagaacttgaaaaacgtctactggatttggacacaggtgctgagtctgcagtccgagctgttattgaagaattttcaacagatgttcaaactgatgaagatagtatattgaataagctttcaactatcaacaaatgcttctctgcagagactgttgaggatatcataaaagcatttgaatcagaagcgagcatagacggaaaccaatggatagctccagtcctaaagggtctgagaagatcatctccaactgcactgaagatcaccctgagatcgatcagagaaggtcgaaaacagagtttgcctgaatgtttgactaaggaatttaggcttacaatgaatatactgcggtctgttgtcaatggggatgtttatgagggcattagagctcttagcatcgataaagacaatgcccctaagtggaatcccactacccttgaggaggtgaagtacgaggacatcgaccgtctgttccagccgttcagtccggagctggaacttcaggtcccatctgatgattccaacaggtggagcggcaaatacgagaacacggtctatggcagagcttcccagtgactgtatacaagatcccccagccttttgttattttcatccgaaccactgcattacggaatattcagtttgcggcacgtgtgtatttcgagtgtttgtgtagcgcgacgttccaatgtatgaactgttgcaaaggttacacgatgacatgaagtttgatccaacaccaaaaccatctattagatgggaaagttctgc

SEQ ID NO: 6949 - protein, 384 aa, Zea mays subsp. mays
  peptide (1)..(384): Ceres Seq. ID no. 12408987
  misc_feature (62)..(188): Pfam Name: Enoyl-CoA hydratase/isomerase family Pfam Description: Enoyl-CoA hydratase/isomerase family
  misc_feature (1)..(379): Homolog of NCBI NO: 30679729 NR Description: 3-hydroxyisobutyryl-coenzyme A hydrolase
  misc_feature (62)..(379): Homolog of NCBI NO: 6692680 NR Description: F12K11.12 [Arabidopsis thaliana]
  misc_feature (10)..(38): Homolog of NCBI NO: 6692680 NR Description: F12K11.12 [Arabidopsis thaliana]
  misc_feature (1)..(367): Homolog of NCBI NO: 37536724 NR Description: putative enoyl-CoA-hydratase [Oryza sativa
  misc_feature (1)..(363): Homolog of NCBI NO: 15239206 NR Description: 3-hydroxyisobutyryl-coenzyme A hydrolase; protein
  misc_feature (9)..(364): Homolog of NCBI NO: 22329062 NR Description: enoyl-CoA hydratase - like protein; protein id: supported by cDNA: gi_19424018, supported by cDNA: gi_21281144
  misc_feature (12)..(357): Homolog of NCBI NO: 15224549 NR Description: 3-hydroxyisobutyryl-coenzyme A hydrolase; protein
  misc_feature (12)..(357): Homolog of NCBI NO: 15224539 NR Description: 3-hydroxyisobutyryl-coenzyme A hydrolase; protein
  misc_feature (38)..(364): Homolog of NCBI NO: 6014701 NR Description: enoyl-CoA-hydratase [Avicennia marina]
  misc_feature (1)..(352): Homolog of NCBI NO: 37594471 NR Description: 3-hydroxyisobutyryl-Coenzyme A hydrolase isoform
MAQQQTNPEEVVLGQEVGAARVATLNRPRQLNGISDRVVYLLAQFLEKWEKDENAKFVIFKGAGRAFSAGGDLKMFYEGKSNDSCLEVVYRMYWLCYHIHTYKKTMVALVNGLVMGGGAAMVAPLKFAVVTEKTIFATPEASVGLHTDCSFSYIHSRLPGYLGEYLALTGARLNAKEMISAGLATHFVSSEKLEELEKRLLDLDTGAESAVRAVIEEFSTDVQTDEDSILNKLSTINKCFSAETVEDIIKAFESEASIDGNQWIAPVLKGLRRSSPTALKITLRSIREGRKQSLPECLTKEFRLTMNILRSVVNGDVYEGIRALSIDKDNAPKWNPTTLEEVKYEDIDRLFQPFSPELELQVPSDDSNRWSGKYENTVYGRASQ

SEQ ID NO: 6950 - protein, 310 aa, Zea mays subsp. mays
  peptide (1)..(310): Ceres Seq. ID no. 12408988
  misc_feature (1)..(114): Pfam Name: Enoyl-CoA hydratase/isomerase family Pfam Description: Enoyl-CoA hydratase/isomerase family
  misc_feature (1)..(305): Homolog of NCBI NO: 30679729 NR Description: 3-hydroxyisobutyryl-coenzyme A hydrolase
  misc_feature (1)..(305): Homolog of NCBI NO: 6692680 NR Description: F12K11.12 [Arabidopsis thaliana]
  misc_feature (1)..(293): Homolog of NCBI NO: 37536724 NR Description: putative enoyl-CoA-hydratase [Oryza sativa
  misc_feature (1)..(289): Homolog of NCBI NO: 15239206 NR Description: 3-hydroxyisobutyryl-coenzyme A hydrolase; protein
  misc_feature (1)..(290): Homolog of NCBI NO: 22329062 NR Description: enoyl-CoA hydratase - like protein; protein id: supported by cDNA: gi_19424018, supported by cDNA: gi_21281144
  misc_feature (1)..(283): Homolog of NCBI NO: 15224549 NR Description: 3-hydroxyisobutyryl-coenzyme A hydrolase; protein
  misc_feature (1)..(283): Homolog of NCBI NO: 15224539 NR Description: 3-hydroxyisobutyryl-coenzyme A hydrolase; protein
  misc_feature (1)..(290): Homolog of NCBI NO: 6014701 NR Description: enoyl-CoA-hydratase [Avicennia marina]
  misc_feature (1)..(278): Homolog of NCBI NO: 37594471 NR Description: 3-hydroxyisobutyryl-Coenzyme A hydrolase isoform
  misc_feature (1)..(278): Homolog of NCBI NO: 22122625 NR Description: RIKEN cDNA 2610509I15 [Mus musculus]
MFYEGKSNDSCLEVVYRMYWLCYHIHTYKKTMVALVNGLVMGGGAAMVAPLKFAVVTEKTIFATPEASVGLHTDCSFSYIHSRLPGYLGEYLALTGARLNAKEMISAGLATHFVSSEKLEELEKRLLDLDTGAESAVRAVIEEFSTDVQTDEDSILNKLSTINKCFSAETVEDIIKAFESEASIDGNQWIAPVLKGLRRSSPTALKITLRSIREGRKQSLPECLTKEFRLTMNILRSVVNGDVYEGIRALSIDKDNAPKWNPTTLEEVKYEDIDRLFQPFSPELELQVPSDDSNRWSGKYENTVYGRASQ

SEQ ID NO: 6951 - protein, 293 aa, Zea mays subsp. mays
  peptide (1)..(293): Ceres Seq. ID no. 12408989
  misc_feature (1)..(97): Pfam Name: Enoyl-CoA hydratase/isomerase family Pfam Description: Enoyl-CoA hydratase/isomerase family
  misc_feature (1)..(288): Homolog of NCBI NO: 30679729 NR Description: 3-hydroxyisobutyryl-coenzyme A hydrolase
  misc_feature (1)..(288): Homolog of NCBI NO: 6692680 NR Description: F12K11.12 [Arabidopsis thaliana]
  misc_feature (1)..(276): Homolog of NCBI NO: 37536724 NR Description: putative enoyl-CoA-hydratase [Oryza sativa
  misc_feature (1)..(272): Homolog of NCBI NO: 15239206 NR Description: 3-hydroxyisobutyryl-coenzyme A hydrolase; protein
  misc_feature (1)..(273): Homolog of NCBI NO: 22329062 NR Description: enoyl-CoA hydratase - like protein; protein id: supported by cDNA: gi_19424018, supported by cDNA: gi_21281144
  misc_feature (1)..(266): Homolog of NCBI NO: 15224549 NR Description: 3-hydroxyisobutyryl-coenzyme A hydrolase; protein
  misc_feature (1)..(266): Homolog of NCBI NO: 15224539 NR Description: 3-hydroxyisobutyryl-coenzyme A hydrolase; protein
  misc_feature (1)..(273): Homolog of NCBI NO: 6014701 NR Description: enoyl-CoA-hydratase [Avicennia marina]
  misc_feature (1)..(261): Homolog of NCBI NO: 37594471 NR Description: 3-hydroxyisobutyryl-Coenzyme A hydrolase isoform
  misc_feature (1)..(261): Homolog of NCBI NO: 22122625 NR Description: RIKEN cDNA 2610509I15 [Mus musculus]
MYWLCYHIHTYKKTMVALVNGLVMGGGAAMVAPLKFAVVTEKTIFATPEASVGLHTDCSFSYIHSRLPGYLGEYLALTGARLNAKEMISAGLATHFVSSEKLEELEKRLLDLDTGAESAVRAVIEEFSTDVQTDEDSILNKLSTINKCFSAETVEDIIKAFESEASIDGNQWIAPVLKGLRRSSPTALKITLRSIREGRKQSLPECLTKEFRLTMNILRSVVNGDVYEGIRALSIDKDNAPKWNPTTLEEVKYEDIDRLFQPFSPELELQVPSDDSNRWSGKYENTVYGRASQ

SEQ ID NO: 6952 - DNA, 1274 bp, Zea mays subsp. mays
  misc_feature (1)..(1274): Ceres Seq. ID no. 12352466
  misc_feature: MA Experiment ID: 108523 Result: Down-regulated in Transcription
  misc_feature: MA Experiment 108523 PARAMETER Experiment Name: Zm_42deg_Heat_P Parameter: Age (day) Value: 8
  misc_feature: MA Experiment 108523 PARAMETER Experiment Name: Zm_42deg_Heat_P Parameter: Organism Value: Zea mays
  misc_feature: MA Experiment 108523 PARAMETER Experiment Name: Zm_42deg_Heat_P Parameter: Plant Line Value: 35A19
  misc_feature: MA Experiment 108523 PARAMETER Experiment Name: Zm_42deg_Heat_P Parameter: Temperature (deg C) Value: 42 vs. 22
  misc_feature: MA Experiment 108523 PARAMETER Experiment Name: Zm_42deg_Heat_P Parameter: Timepoint (hr) Value: 6
  misc_feature: MA Experiment 108523 PARAMETER Experiment Name: Zm_42deg_Heat_P Parameter: Tissue Value: Aerial
  misc_feature: MA Experiment ID: 108527 Result: Down-regulated in Transcription
  misc_feature: MA Experiment 108527 PARAMETER Experiment Name: Zm_5mM_NO_P Parameter: Age (day) Value: 8
  misc_feature: MA Experiment 108527 PARAMETER Experiment Name: Zm_5mM_NO_P Parameter: Organism Value: Zea mays
  misc_feature: MA Experiment 108527 PARAMETER Experiment Name: Zm_5mM_NO_P Parameter: Plant Line Value: 35A19
  misc_feature: MA Experiment 108527 PARAMETER Experiment Name: Zm_5mM_NO_P Parameter: Timepoint (hr) Value: 6
  misc_feature: MA Experiment 108527 PARAMETER Experiment Name: Zm_5mM_NO_P Parameter: Tissue Value: Aerial
  misc_feature: MA Experiment 108527 PARAMETER Experiment Name: Zm_5mM_NO_P Parameter: Treatment Value: 5mM NO vs. No Treatment
  misc_feature: MA Experiment ID: 108528 Result: Up-regulated in Transcription
  misc_feature: MA Experiment 108528 PARAMETER Experiment Name: Zm_Imbibed_Seeds_P Parameter: Age (day) Value: 5 vs. 2
  misc_feature: MA Experiment 108528 PARAMETER Experiment Name: Zm_Imbibed_Seeds_P Parameter: Organism Value: Zea mays
  misc_feature: MA Experiment 108528 PARAMETER Experiment Name: Zm_Imbibed_Seeds_P Parameter: Plant Line Value: 35A19
  misc_feature: MA Experiment 108528 PARAMETER Experiment Name: Zm_Imbibed_Seeds_P Parameter: Tissue Value: Aerial vs. Embryo
  misc_feature: MA Experiment ID: 108536 Result: Up-regulated in Transcription
  misc_feature: MA Experiment 108536 PARAMETER Experiment Name: Zm_Meristem_P Parameter: Age (day) Value: 8
  misc_feature: MA Experiment 108536 PARAMETER Experiment Name: Zm_Meristem_P Parameter: Organism Value: Zea mays
  misc_feature: MA Experiment 108536 PARAMETER Experiment Name: Zm_Meristem_P Parameter: Plant Line Value: 35A19
  misc_feature: MA Experiment 108536 PARAMETER Experiment Name: Zm_Meristem_P Parameter: Tissue Value: Shoot Meristem vs. Above Shoot Meristem
  misc_feature: MA Experiment ID: 108543 Result: Up-regulated in Transcription
  misc_feature: MA Experiment ID: 108545 Result: Up-regulated in Transcription
  misc_feature: MA Experiment 108545 PARAMETER Experiment Name: Zm_Imbibed_Seeds_P Parameter: Age (day) Value: 3 vs. 2
  misc_feature: MA Experiment 108545 PARAMETER Experiment Name: Zm_Imbibed_Seeds_P Parameter: Organism Value: Zea mays
  misc_feature: MA Experiment 108545 PARAMETER Experiment Name: Zm_Imbibed_Seeds_P Parameter: Plant Line Value: 35A19
  misc_feature: MA Experiment 108545 PARAMETER Experiment Name: Zm_Imbibed_Seeds_P Parameter: Tissue Value: Aerial vs. Embryo
  misc_feature: MA Experiment ID: 108547 Result: Up-regulated in Transcription
  misc_feature: MA Experiment 108547 PARAMETER Experiment Name: Zm_Imbibed_Seeds_P Parameter: Age (day) Value: 4 vs. 2
  misc_feature: MA Experiment 108547 PARAMETER Experiment Name: Zm_Imbibed_Seeds_P Parameter: Organism Value: Zea mays
  misc_feature: MA Experiment 108547 PARAMETER Experiment Name: Zm_Imbibed_Seeds_P Parameter: Plant Line Value: 35A19
  misc_feature: MA Experiment 108547 PARAMETER Experiment Name: Zm_Imbibed_Seeds_P Parameter: Tissue Value: Aerial vs. Embryo
  misc_feature: MA Experiment ID: 108687 Result: Down-regulated in Transcription
  misc_feature: MA Experiment 108687 PARAMETER Experiment Name: Zm_Embryos-Flowers__P Parameter: Tissue Value: Embryo vs. Aerial+
  misc_feature: MA Experiment ID: 20000477 Result: Down-regulated in Transcription
  misc_feature: MA Experiment 20000477 PARAMETER Experiment Name: Zm_5mM_SA_P Parameter: Age (day) Value: 10
  misc_feature: MA Experiment 20000477 PARAMETER Experiment Name: Zm_5mM_SA_P Parameter: Organism Value: Zea mays
  misc_feature: MA Experiment 20000477 PARAMETER Experiment Name: Zm_5mM_SA_P Parameter: Plant Line Value: 35A19
  misc_feature: MA Experiment 20000477 PARAMETER Experiment Name: Zm_5mM_SA_P Parameter: Timepoint (hr) Value: 48
  misc_feature: MA Experiment 20000477 PARAMETER Experiment Name: Zm_5mM_SA_P Parameter: Tissue Value: Aerial
  misc_feature: MA Experiment 20000477 PARAMETER Experiment Name: Zm_5mM_SA_P Parameter: Treatment Value: 5mM SA vs. No Treatment
  misc_feature: MA Experiment ID: 20000478 Result: Down-regulated in Transcription
  misc_feature: MA Experiment 20000478 PARAMETER Experiment Name: Zm_5mM_SA_P Parameter: Age (day) Value: 11
  misc_feature: MA Experiment 20000478 PARAMETER Experiment Name: Zm_5mM_SA_P Parameter: Organism Value: Zea mays
  misc_feature: MA Experiment 20000478 PARAMETER Experiment Name: Zm_5mM_SA_P Parameter: Plant Line Value: 35A19
  misc_feature: MA Experiment 20000478 PARAMETER Experiment Name: Zm_5mM_SA_P Parameter: Timepoint (hr) Value: 72
  misc_feature: MA Experiment 20000478 PARAMETER Experiment Name: Zm_5mM_SA_P Parameter: Tissue Value: Aerial
  misc_feature: MA Experiment 20000478 PARAMETER Experiment Name: Zm_5mM_SA_P Parameter: Treatment Value: 5mM SA vs. No Treatment
  misc_feature: MA Experiment ID: 20000479 Result: Down-regulated in Transcription
  misc_feature: MA Experiment 20000479 PARAMETER Experiment Name: Zm_Drought_P Parameter: Age (day) Value: 10
  misc_feature: MA Experiment 20000479 PARAMETER Experiment Name: Zm_Drought_P Parameter: Organism Value: Zea mays
  misc_feature: MA Experiment 20000479 PARAMETER Experiment Name: Zm_Drought_P Parameter: Plant Line Value: 35A19
  misc_feature: MA Experiment 20000479 PARAMETER Experiment Name: Zm_Drought_P Parameter: Timepoint (hr) Value: 48
  misc_feature: MA Experiment 20000479 PARAMETER Experiment Name: Zm_Drought_P Parameter: Tissue Value: Aerial
  misc_feature: MA Experiment 20000479 PARAMETER Experiment Name: Zm_Drought_P Parameter: Treatment Value: Drought vs. No Drought
  misc_feature: MA Experiment ID: 20000480 Result: Down-regulated in Transcription
  misc_feature: MA Experiment 20000480 PARAMETER Experiment Name: Zm_Drought_P Parameter: Age (day) Value: 11
  misc_feature: MA Experiment 20000480 PARAMETER Experiment Name: Zm_Drought_P Parameter: Organism Value: Zea mays
  misc_feature: MA Experiment 20000480 PARAMETER Experiment Name: Zm_Drought_P Parameter: Plant Line Value: 35A19
  misc_feature: MA Experiment 20000480 PARAMETER Experiment Name: Zm_Drought_P Parameter: Timepoint (hr) Value: 72
  misc_feature: MA Experiment 20000480 PARAMETER Experiment Name: Zm_Drought_P Parameter: Tissue Value: Aerial
  misc_feature: MA Experiment 20000480 PARAMETER Experiment Name: Zm_Drought_P Parameter: Treatment Value: Drought vs. No Drought
  misc_feature: MA Experiment ID: 20000492 Result: Down-regulated in Transcription
  misc_feature: MA Experiment 20000492 PARAMETER Experiment Name: Zm_Hybrid_Seed_Dev_P Parameter: DAP Value: 12
  misc_feature: MA Experiment 20000492 PARAMETER Experiment Name: Zm_Hybrid_Seed_Dev_P Parameter: Organism Value: Zea mays
  misc_feature: MA Experiment 20000492 PARAMETER Experiment Name: Zm_Hybrid_Seed_Dev_P Parameter: Plant Line Value: 35A19
  misc_feature: MA Experiment 20000492 PARAMETER Experiment Name: Zm_Hybrid_Seed_Dev_P Parameter: Tissue Value: Fert Kernel vs. Unfert Floret
  misc_feature: MA Experiment ID: 20000535 Result: Down-regulated in Transcription
  misc_feature: MA Experiment 20000535 PARAMETER Experiment Name: Zm_Hybrid_Seed_Dev_P Parameter: DAP Value: 30 vs. 12
  misc_feature: MA Experiment 20000535 PARAMETER Experiment Name: Zm_Hybrid_Seed_Dev_P Parameter: Organism Value: Zea mays
  misc_feature: MA Experiment 20000535 PARAMETER Experiment Name: Zm_Hybrid_Seed_Dev_P Parameter: Plant Line Value: 35A19
  misc_feature: MA Experiment 20000535 PARAMETER Experiment Name: Zm_Hybrid_Seed_Dev_P Parameter: Tissue Value: Embryo vs. Unfert Floret
  misc_feature: MA Experiment ID: 20000630 Result: Down-regulated in Transcription
  misc_feature: MA Experiment 20000630 PARAMETER Experiment Name: Zm_Herbicide-Treatments_P Parameter: Timepoint (hr) Value: 4
  misc_feature: MA Experiment 20000630 PARAMETER Experiment Name: Zm_Herbicide-Treatments_P Parameter: Tissue Value: Aerial
  misc_feature: MA Experiment 20000630 PARAMETER Experiment Name: Zm_Herbicide-Treatments_P Parameter: Treatment Value: Roundup vs. No Treatment
ctacaaatatatggctgcagctgaggtccgacaccacacaaacagcacatctgtttagccaagctgtggccaacctctgcgaggaatggagatggagtcgactcctctcttgacaccatacaagatgggcgatttcaacctggcacacagggttgtgctggcgccgctgacgaggtgccgggcgttcgggaacgtgccgcagccggagcacatggctctctactaccgccagcgggcgacgcccggcggcttcctcatcgccgaggcctgcgccgtgtcggagagcgcgcgcgggtacccggacgttccggggctgtggacccaccaacaggtcgtggcctggaagccgatcgtcgacgccgtccacgccagcggtgccgtcttcttcgcccagctctggcacaccggccgggcctccccctcagaattccaaccaaatgggcaggcaccgatctctagcacggacaagcaaatcccagcacaggtgaaccattccggtgacgtcaacacgttcgcggtgcctcggagactagagacagaggagataccacacgtcgtcaatgacttccgggttgccgccagaaacgccatcaaagcaggctttgatggagtggagatccacgcggcaaacgggtacctgttcgatcagttcatgaaggacagcaccaatgaccgagacgactcctacgggggcagcttggagaaccggtgccgtttcacagccgaggtgatggcagccgtcgcggacgaggtcggtgccaaccgcctcggtgtgcgcctctctccgttcgcggattatatggactgccacgactccaacccagaggcgctcgcgcttcatgtcatcgacgagacgctgaacccgctcggcgtgctttactgccacatggtagagccaaggatgcgggtgaacccagacgacggtattatgactctcgagcacatgctgctaccgttcaggagggcgtttcgcgggacgttcattgctaatggaggctacgaccgtgaggaaggcaatgacgccattgcccgtggccgtggctatgcagatctcatcgcatacggccggatattccttgccaacccggaccttccgatgcgttttgccaagaatgccccgctgaacaagtatgataggagcaccttctatacctctgatccggtggttgggtacacagattatccatttctcgatcaactctaggatgattggcttataaacaatttccccacctggagtactatcttgaccttaaaataaaatgagtgtcact

SEQ ID NO: 6953 - protein, 372 aa, Zea mays subsp. mays
  peptide (1)..(372): Ceres Seq. ID no. 12352467
  misc_feature (7)..(347): Pfam Name: NADH:flavin oxidoreductase / NADH oxidase family Pfam Description: NADH:flavin oxidoreductase / NADH oxidase family
  misc_feature (1)..(372): Homolog of NCBI NO: 23495288 NR Description: 12-oxophytodienoic acid reductase [Oryza sativa]
  misc_feature (1)..(370): Homolog of NCBI NO: 15223138 NR Description: 12-oxophytodienoate reductase (OPR1); protein id: supported by cDNA: 38527., supported by cDNA: gi_18650649
  misc_feature (1)..(370): Homolog of NCBI NO: 21593388 NR Description: 12-oxophytodienoate reductase (OPR1) [Arabidopsis
  misc_feature (4)..(370): Homolog of NCBI NO: 15223140 NR Description: 12-oxophytodienoate reductase (OPR2); protein id: [Arabidopsis thaliana] >gi|25325950|pir||C96795 hypothetical
  misc_feature (4)..(370): Homolog of NCBI NO: 26450549 NR Description: putative 12-oxophytodienoate reductase OPR2
  misc_feature (1)..(370): Homolog of NCBI NO: 2765083 NR Description: 12-oxophytodienoate reductase [Arabidopsis
  misc_feature (7)..(370): Homolog of NCBI NO: 40645347 NR Description: hypothetical protein [Pisum sativum]
  misc_feature (4)..(370): Homolog of NCBI NO: 40645353 NR Description: hypothetical protein [Pisum sativum]
  misc_feature (2)..(370): Homolog of NCBI NO: 40645459 NR Description: LEDI-5c protein [Lithospermum erythrorhizon]
  misc_feature (7)..(370): Homolog of NCBI NO: 40645345 NR Description: hypothetical protein [Pisum sativum]
MEMESTPLLTPYKMGDFNLAHRVVLAPLTRCRAFGNVPQPEHMALYYRQRATPGGFLIAEACAVSESARGYPDVPGLWTHQQVVAWKPIVDAVHASGAVFFAQLWHTGRASPSEFQPNGQAPISSTDKQIPAQVNHSGDVNTFAVPRRLETEEIPHVVNDFRVAARNAIKAGFDGVEIHAANGYLFDQFMKDSTNDRDDSYGGSLENRCRFTAEVMAAVADEVGANRLGVRLSPFADYMDCHDSNPEALALHVIDETLNPLGVLYCHMVEPRMRVNPDDGIMTLEHMLLPFRRAFRGTFIANGGYDREEGNDAIARGRGYADLIAYGRIFLANPDLPMRFAKNAPLNKYDRSTFYTSDPVVGYTDYPFLDQL

SEQ ID NO: 6954 - protein, 370 aa, Zea mays subsp. mays
  peptide (1)..(370): Ceres Seq. ID no. 12352468
  misc_feature (5)..(345): Pfam Name: NADH:flavin oxidoreductase / NADH oxidase family Pfam Description: NADH:flavin oxidoreductase / NADH oxidase family
  misc_feature (1)..(370): Homolog of NCBI NO: 23495288 NR Description: 12-oxophytodienoic acid reductase [Oryza sativa]
  misc_feature (1)..(368): Homolog of NCBI NO: 15223138 NR Description: 12-oxophytodienoate reductase (OPR1); protein id: supported by cDNA: 38527., supported by cDNA: gi_18650649
  misc_feature (1)..(368): Homolog of NCBI NO: 21593388 NR Description: 12-oxophytodienoate reductase (OPR1) [Arabidopsis
  misc_feature (2)..(368): Homolog of NCBI NO: 15223140 NR Description: 12-oxophytodienoate reductase (OPR2); protein id: [Arabidopsis thaliana] >gi|25325950|pir||C96795 hypothetical
  misc_feature (2)..(368): Homolog of NCBI NO: 26450549 NR Description: putative 12-oxophytodienoate reductase OPR2
  misc_feature (1)..(368): Homolog of NCBI NO: 2765083 NR Description: 12-oxophytodienoate reductase [Arabidopsis
  misc_feature (5)..(368): Homolog of NCBI NO: 40645347 NR Description: hypothetical protein [Pisum sativum]
  misc_feature (2)..(368): Homolog of NCBI NO: 40645353 NR Description: hypothetical protein [Pisum sativum]
  misc_feature (1)..(368): Homolog of NCBI NO: 40645459 NR Description: LEDI-5c protein [Lithospermum erythrorhizon]
  misc_feature (5)..(368): Homolog of NCBI NO: 40645345 NR Description: hypothetical protein [Pisum sativum]
MESTPLLTPYKMGDFNLAHRVVLAPLTRCRAFGNVPQPEHMALYYRQRATPGGFLIAEACAVSESARGYPDVPGLWTHQQVVAWKPIVDAVHASGAVFFAQLWHTGRASPSEFQPNGQAPISSTDKQIPAQVNHSGDVNTFAVPRRLETEEIPHVVNDFRVAARNAIKAGFDGVEIHAANGYLFDQFMKDSTNDRDDSYGGSLENRCRFTAEVMAAVADEVGANRLGVRLSPFADYMDCHDSNPEALALHVIDETLNPLGVLYCHMVEPRMRVNPDDGIMTLEHMLLPFRRAFRGTFIANGGYDREEGNDAIARGRGYADLIAYGRIFLANPDLPMRFAKNAPLNKYDRSTFYTSDPVVGYTDYPFLDQL

SEQ ID NO: 6955 - protein, 359 aa, Zea mays subsp. mays
  peptide (1)..(359): Ceres Seq. ID no. 12352469
  misc_feature (1)..(334): Pfam Name: NADH:flavin oxidoreductase / NADH oxidase family Pfam Description: NADH:flavin oxidoreductase / NADH oxidase family
  misc_feature (1)..(359): Homolog of NCBI NO: 23495288 NR Description: 12-oxophytodienoic acid reductase [Oryza sativa]
  misc_feature (1)..(357): Homolog of NCBI NO: 15223138 NR Description: 12-oxophytodienoate reductase (OPR1); protein id: supported by cDNA: 38527., supported by cDNA: gi_18650649
  misc_feature (1)..(357): Homolog of NCBI NO: 21593388 NR Description: 12-oxophytodienoate reductase (OPR1) [Arabidopsis
  misc_feature (1)..(357): Homolog of NCBI NO: 15223140 NR Description: 12-oxophytodienoate reductase (OPR2); protein id: [Arabidopsis thaliana] >gi|25325950|pir||C96795 hypothetical
  misc_feature (1)..(357): Homolog of NCBI NO: 26450549 NR Description: putative 12-oxophytodienoate reductase OPR2
  misc_feature (1)..(357): Homolog of NCBI NO: 2765083 NR Description: 12-oxophytodienoate reductase [Arabidopsis
  misc_feature (1)..(357): Homolog of NCBI NO: 40645347 NR Description: hypothetical protein [Pisum sativum]
  misc_feature (1)..(357): Homolog of NCBI NO: 40645353 NR Description: hypothetical protein [Pisum sativum]
  misc_feature (1)..(357): Homolog of NCBI NO: 40645459 NR Description: LEDI-5c protein [Lithospermum erythrorhizon]
  misc_feature (1)..(357): Homolog of NCBI NO: 40645345 NR Description: hypothetical protein [Pisum sativum]
MGDFNLAHRVVLAPLTRCRAFGNVPQPEHMALYYRQRATPGGFLIAEACAVSESARGYPDVPGLWTHQQVVAWKPIVDAVHASGAVFFAQLWHTGRASPSEFQPNGQAPISSTDKQIPAQVNHSGDVNTFAVPRRLETEEIPHVVNDFRVAARNAIKAGFDGVEIHAANGYLFDQFMKDSTNDRDDSYGGSLENRCRFTAEVMAAVADEVGANRLGVRLSPFADYMDCHDSNPEALALHVIDETLNPLGVLYCHMVEPRMRVNPDDGIMTLEHMLLPFRRAFRGTFIANGGYDREEGNDAIARGRGYADLIAYGRIFLANPDLPMRFAKNAPLNKYDRSTFYTSDPVVGYTDYPFLDQL

SEQ ID NO: 6956 - DNA, 1177 bp, Zea mays subsp. mays
  misc_feature (1)..(1177): Ceres Seq. ID no. 12408979
  misc_feature: MA Experiment ID: 108547 Result: Down-regulated in Transcription
  misc_feature: MA Experiment 108547 PARAMETER Experiment Name: Zm_Imbibed_Seeds_P Parameter: Age (day) Value: 4 vs. 2
  misc_feature: MA Experiment 108547 PARAMETER Experiment Name: Zm_Imbibed_Seeds_P Parameter: Organism Value: Zea mays
  misc_feature: MA Experiment 108547 PARAMETER Experiment Name: Zm_Imbibed_Seeds_P Parameter: Plant Line Value: 35A19
  misc_feature: MA Experiment 108547 PARAMETER Experiment Name: Zm_Imbibed_Seeds_P Parameter: Tissue Value: Aerial vs. Embryo
atagcgtatcacaaatagaatacaaccaatggctagtcgtccgagcacattccgatttgccgtcgtggccgtgctgtcgaccctgccacttgttgccagctctgcctccggccacgagaaccccgagcccgtggtcagggactcgccgcagaacggcaccaacaggaggtacctgtgggcgtcgtcgtcggcgcgaggctacggcggctggtcctccggcggcgcgacgtggtacgggagccctaacggcgccggcaccgacggtggcgcttgtggttatcacggtgacgtcagccagcgcccattcaagtcgatgatcgcggccggcggcccttccctcttcaagaacggcaaaggatgcggcgcatgctaccaaattaggtgcacgggcaacagagcctgctccggccggccagtgaccgtcaccgtcaccgactcgtgccccggcggtgcctgcctcgccgagtcggcgcacttcgacatgagcggcacggccttcggcgccatggccaacaaccgaggcatggccgaccgcctccgctccgccggaatcctcaagatccaatacaggagggtggcctgcaactacaacggcaggaccgtcagcttcaaggtggacgcggggtctaacccgtactacctcgccgttctcatcgagtacgtggccggcgacggcgacatctccgcggcggacatcatgcaagccggctgcgactcgtgggcgccgatgcagcagtcatggggcgccgtgtggcgcgtcaactccaacaacggccagccactccgtgcgcccttctcggtccgcgtcacctcgggctccggcaaggtcctcgtcgtcaggaacgccatccccgccgggtggaccgccgggaggacctaccggtccaccgtgaactacggctactgaggcagtgcgtgcgtgcgtatctcttcttcggtcttgggttttataagtgcgtccggaaaacgcgagaggccgatctggaagaggaggtttaggtatattcgtacgcgttcgatgtaacgacgtcttggtgcctccctccacacagaccgcagtgtgttttccttgtgatgtactaatgtttttatattagtatcggttgctctaacccgacagtaatatcaaacatcacttcatgttattcttctaaaccgataatgatatctttatttg

SEQ ID NO: 6957 - protein, 292 aa, Zea mays subsp. mays
  peptide (1)..(292): Ceres Seq. ID no. 12408980
  misc_feature (192)..(275): Pfam Name: Pollen allergen Pfam Description: Pollen allergen
  misc_feature (1)..(290): Homolog of NCBI NO: 16303229 NR Description: beta-expansin 5 [Oryza sativa]
  misc_feature (1)..(290): Homolog of NCBI NO: 8118428 NR Description: beta-expansin [Oryza sativa]
  misc_feature (61)..(290): Homolog of NCBI NO: 34101047 NR Description: beta-expansin 1 precursor [Hordeum vulgare]
  misc_feature (3)..(290): Homolog of NCBI NO: 16517013 NR Description: beta-expansin [Oryza sativa]
  misc_feature (56)..(290): Homolog of NCBI NO: 21666630 NR Description: beta-expansin [Oryza sativa]
  misc_feature (1)..(290): Homolog of NCBI NO: 40363749 NR Description: putative beta-expansin [Triticum aestivum]
  misc_feature (27)..(290): Homolog of NCBI NO: 14193767 NR Description: beta-expansin 4 [Zea mays]
  misc_feature (56)..(285): Homolog of NCBI NO: 16303233 NR Description: beta-expansin [Oryza sativa]
  misc_feature (56)..(285): Homolog of NCBI NO: 16517017 NR Description: beta-expansin [Oryza sativa]
  misc_feature (52)..(290): Homolog of NCBI NO: 20138423 NR Description: Putative beta-expansin 2 precursor (At-EXPB2)
MASRPSTFRFAVVAVLSTLPLVASSASGHENPEPVVRDSPQNGTNRRYLWASSSARGYGGWSSGGATWYGSPNGAGTDGGACGYHGDVSQRPFKSMIAAGGPSLFKNGKGCGACYQIRCTGNRACSGRPVTVTVTDSCPGGACLAESAHFDMSGTAFGAMANNRGMADRLRSAGILKIQYRRVACNYNGRTVSFKVDAGSNPYYLAVLIEYVAGDGDISAADIMQAGCDSWAPMQQSWGAVWRVNSNNGQPLRAPFSVRVTSGSGKVLVVRNAIPAGWTAGRTYRSTVNYGY

SEQ ID NO: 6958 - protein, 197 aa, Zea mays subsp. mays
  peptide (1)..(197): Ceres Seq. ID no. 12408981
  misc_feature (97)..(180): Pfam Name: Pollen allergen Pfam Description: Pollen allergen
  misc_feature (1)..(195): Homolog of NCBI NO: 16303229 NR Description: beta-expansin 5 [Oryza sativa]
  misc_feature (1)..(195): Homolog of NCBI NO: 8118428 NR Description: beta-expansin [Oryza sativa]
  misc_feature (1)..(195): Homolog of NCBI NO: 34101047 NR Description: beta-expansin 1 precursor [Hordeum vulgare]
  misc_feature (1)..(195): Homolog of NCBI NO: 16517013 NR Description: beta-expansin [Oryza sativa]
  misc_feature (1)..(195): Homolog of NCBI NO: 21666630 NR Description: beta-expansin [Oryza sativa]
  misc_feature (1)..(195): Homolog of NCBI NO: 40363749 NR Description: putative beta-expansin [Triticum aestivum]
  misc_feature (1)..(195): Homolog of NCBI NO: 14193767 NR Description: beta-expansin 4 [Zea mays]
  misc_feature (1)..(190): Homolog of NCBI NO: 16303233 NR Description: beta-expansin [Oryza sativa]
  misc_feature (1)..(190): Homolog of NCBI NO: 16517017 NR Description: beta-expansin [Oryza sativa]
  misc_feature (1)..(195): Homolog of NCBI NO: 20138423 NR Description: Putative beta-expansin 2 precursor (At-EXPB2)
MIAAGGPSLFKNGKGCGACYQIRCTGNRACSGRPVTVTVTDSCPGGACLAESAHFDMSGTAFGAMANNRGMADRLRSAGILKIQYRRVACNYNGRTVSFKVDAGSNPYYLAVLIEYVAGDGDISAADIMQAGCDSWAPMQQSWGAVWRVNSNNGQPLRAPFSVRVTSGSGKVLVVRNAIPAGWTAGRTYRSTVNYGY

SEQ ID NO: 6959 - DNA, 1092 bp, Zea mays subsp. mays
  misc_feature (1)..(1092): Ceres Seq. ID no. 12408975
  misc_feature: MA Experiment ID: 108527 Result: Down-regulated in Transcription
  misc_feature: MA Experiment 108527 PARAMETER Experiment Name: Zm_5mM_NO_P Parameter: Age (day) Value: 8
  misc_feature: MA Experiment 108527 PARAMETER Experiment Name: Zm_5mM_NO_P Parameter: Organism Value: Zea mays
  misc_feature: MA Experiment 108527 PARAMETER Experiment Name: Zm_5mM_NO_P Parameter: Plant Line Value: 35A19
  misc_feature: MA Experiment 108527 PARAMETER Experiment Name: Zm_5mM_NO_P Parameter: Timepoint (hr) Value: 6
  misc_feature: MA Experiment 108527 PARAMETER Experiment Name: Zm_5mM_NO_P Parameter: Tissue Value: Aerial
  misc_feature: MA Experiment 108527 PARAMETER Experiment Name: Zm_5mM_NO_P Parameter: Treatment Value: 5mM NO vs. No Treatment
  misc_feature: MA Experiment ID: 108543 Result: Up-regulated in Transcription
  misc_feature: MA Experiment ID: 108544 Result: Down-regulated in Transcription
  misc_feature: MA Experiment ID: 20000626 Result: Down-regulated in Transcription
  misc_feature: MA Experiment 20000626 PARAMETER Experiment Name: Zm_Herbicide-Treatments_P Parameter: Timepoint (hr) Value: 12
  misc_feature: MA Experiment 20000626 PARAMETER Experiment Name: Zm_Herbicide-Treatments_P Parameter: Tissue Value: Aerial
  misc_feature: MA Experiment 20000626 PARAMETER Experiment Name: Zm_Herbicide-Treatments_P Parameter: Treatment Value: Roundup vs. No Treatment
ctgatggcacaggcacaccaccctcttctcctactaattcttttgctcttcctctcctccactgccattccttcctccaagagaacccagccgaagttctcggccgtcttctacttcggcgactcggttctcgacaccggcaacaacaaccatctccccacggtagctgtggcgaaccatgctccttacggaagggacttcccagggaagaaaccgacggggaggttttccgacggccggcttatcccagacctcctcaacgagaggctgcagctcaaagagttctcgccgccgtttctggacgcaaggctgccgaacaacgatgtcgcgacgggggtgaacttcgcttcggctgggtcaggattcgacgaccagacgtcgcggctgtccaacactctgccgatgtcgaaacaggtggacctcttcgaggactacctgctccggctcagaggcatcgttggggacaaggaggcttccaggatcgttgccagatctctgatctttatcagctcggggaccaacgatttctcacattactaccgttcgccaaagaagaggaagatggagattggtgactaccaggatattgttctccagatggtacaggtttatgtcaaggaattgtatgaccttggggggcgacagttctgtttggcaggccttccgccgtttggctgcacacctatccaaatcacgttgagcggagaccctggcagggcatgtgtggatgagcaaaactgggatgctcatgtctacaactctaaacttcaaagactgcttgcgaagttgcaaggctcactccatgggagcagaattgtgtacgtggacgcatacagagctctcgtggagatcctggagaacccggccaaatatggatttacagagacatcacgaggatgttgtgggactgggctcagagaggtcgctctgttttgcaatgcattcactcctatctgcaaaaatgtgtcatcctatgtattttacgatgctgtgcacccaacagagagggtttacatgttagtaaacgattacatagtcaacgatgttattccacagttttaattaatcaaatacccagataaggttttctcg

SEQ ID NO: 6960 - protein, 353 aa, Zea mays subsp. mays
  peptide (1)..(353): Ceres Seq. ID no. 12408976
  misc_feature (36)..(345): Pfam Name: GDSL-like Lipase/Acylhydrolase Pfam Description: GDSL-like Lipase/Acylhydrolase
  misc_feature (7)..(353): Homolog of NCBI NO: 34907922 NR Description: putative GDSL-motif lipase/hydrolase [Oryza
  misc_feature (11)..(345): Homolog of NCBI NO: 15217963 NR Description: proline-rich protein, putative; protein id:
  misc_feature (11)..(345): Homolog of NCBI NO: 25336283 NR Description: hypothetical protein RXF26 [imported] -
  misc_feature (13)..(345): Homolog of NCBI NO: 21592974 NR Description: proline-rich protein, putative [Arabidopsis
  misc_feature (12)..(345): Homolog of NCBI NO: 15225096 NR Description: putative GDSL-motif lipase/hydrolase; protein id:
  misc_feature (12)..(343): Homolog of NCBI NO: 21537117 NR Description: putative GDSL-motif lipase/hydrolase [Arabidopsis
  misc_feature (12)..(345): Homolog of NCBI NO: 15227734 NR Description: putative GDSL-motif lipase/hydrolase; protein id:
  misc_feature (33)..(349): Homolog of NCBI NO: 18390708 NR Description: expressed protein; protein id: At1g06990.1,
  misc_feature (33)..(349): Homolog of NCBI NO: 25336267 NR Description: hypothetical protein [imported] - Arabidopsis
  misc_feature (11)..(345): Homolog of NCBI NO: 15227723 NR Description: putative GDSL-motif lipase hydrolase; protein id:
LMAQAHHPLLLLILLLFLSSTAIPSSKRTQPKFSAVFYFGDSVLDTGNNNHLPTVAVANHAPYGRDFPGKKPTGRFSDGRLIPDLLNERLQLKEFSPPFLDARLPNNDVATGVNFASAGSGFDDQTSRLSNTLPMSKQVDLFEDYLLRLRGIVGDKEASRIVARSLIFISSGTNDFSHYYRSPKKRKMEIGDYQDIVLQMVQVYVKELYDLGGRQFCLAGLPPFGCTPIQITLSGDPGRACVDEQNWDAHVYNSKLQRLLAKLQGSLHGSRIVYVDAYRALVEILENPAKYGFTETSRGCCGTGLREVALFCNAFTPICKNVSSYVFYDAVHPTERVYMLVNDYIVNDVIPQF

SEQ ID NO: 6961 - protein, 352 aa, Zea mays subsp. mays
  peptide (1)..(352): Ceres Seq. ID no. 12408977
  misc_feature (35)..(344): Pfam Name: GDSL-like Lipase/Acylhydrolase Pfam Description: GDSL-like Lipase/Acylhydrolase
  misc_feature (6)..(352): Homolog of NCBI NO: 34907922 NR Description: putative GDSL-motif lipase/hydrolase [Oryza
  misc_feature (10)..(344): Homolog of NCBI NO: 15217963 NR Description: proline-rich protein, putative; protein id:
  misc_feature (10)..(344): Homolog of NCBI NO: 25336283 NR Description: hypothetical protein RXF26 [imported] -
  misc_feature (12)..(344): Homolog of NCBI NO: 21592974 NR Description: proline-rich protein, putative [Arabidopsis
  misc_feature (11)..(344): Homolog of NCBI NO: 15225096 NR Description: putative GDSL-motif lipase/hydrolase; protein id:
  misc_feature (11)..(342): Homolog of NCBI NO: 21537117 NR Description: putative GDSL-motif lipase/hydrolase [Arabidopsis
  misc_feature (11)..(344): Homolog of NCBI NO: 15227734 NR Description: putative GDSL-motif lipase/hydrolase; protein id:
  misc_feature (32)..(348): Homolog of NCBI NO: 18390708 NR Description: expressed protein; protein id: At1g06990.1,
  misc_feature (32)..(348): Homolog of NCBI NO: 25336267 NR Description: hypothetical protein [imported] - Arabidopsis
  misc_feature (10)..(344): Homolog of NCBI NO: 15227723 NR Description: putative GDSL-motif lipase hydrolase; protein id:
MAQAHHPLLLLILLLFLSSTAIPSSKRTQPKFSAVFYFGDSVLDTGNNNHLPTVAVANHAPYGRDFPGKKPTGRFSDGRLIPDLLNERLQLKEFSPPFLDARLPNNDVATGVNFASAGSGFDDQTSRLSNTLPMSKQVDLFEDYLLRLRGIVGDKEASRIVARSLIFISSGTNDFSHYYRSPKKRKMEIGDYQDIVLQMVQVYVKELYDLGGRQFCLAGLPPFGCTPIQITLSGDPGRACVDEQNWDAHVYNSKLQRLLAKLQGSLHGSRIVYVDAYRALVEILENPAKYGFTETSRGCCGTGLREVALFCNAFTPICKNVSSYVFYDAVHPTERVYMLVNDYIVNDVIPQF

SEQ ID NO: 6962 - protein, 219 aa, Zea mays subsp. mays
  peptide (1)..(219): Ceres Seq. ID no. 12408978
  misc_feature (1)..(211): Pfam Name: GDSL-like Lipase/Acylhydrolase Pfam Description: GDSL-like Lipase/Acylhydrolase
  misc_feature (1)..(219): Homolog of NCBI NO: 34907922 NR Description: putative GDSL-motif lipase/hydrolase [Oryza
  misc_feature (1)..(211): Homolog of NCBI NO: 15217963 NR Description: proline-rich protein, putative; protein id:
  misc_feature (1)..(211): Homolog of NCBI NO: 25336283 NR Description: hypothetical protein RXF26 [imported] -
  misc_feature (1)..(211): Homolog of NCBI NO: 21592974 NR Description: proline-rich protein, putative [Arabidopsis
  misc_feature (1)..(211): Homolog of NCBI NO: 15225096 NR Description: putative GDSL-motif lipase/hydrolase; protein id:
  misc_feature (1)..(209): Homolog of NCBI NO: 21537117 NR Description: putative GDSL-motif lipase/hydrolase [Arabidopsis
  misc_feature (1)..(211): Homolog of NCBI NO: 15227734 NR Description: putative GDSL-motif lipase/hydrolase; protein id:
  misc_feature (1)..(215): Homolog of NCBI NO: 18390708 NR Description: expressed protein; protein id: At1g06990.1,
  misc_feature (1)..(215): Homolog of NCBI NO: 25336267 NR Description: hypothetical protein [imported] - Arabidopsis
  misc_feature (1)..(211): Homolog of NCBI NO: 15227723 NR Description: putative GDSL-motif lipase hydrolase; protein id:
MSKQVDLFEDYLLRLRGIVGDKEASRIVARSLIFISSGTNDFSHYYRSPKKRKMEIGDYQDIVLQMVQVYVKELYDLGGRQFCLAGLPPFGCTPIQITLSGDPGRACVDEQNWDAHVYNSKLQRLLAKLQGSLHGSRIVYVDAYRALVEILENPAKYGFTETSRGCCGTGLREVALFCNAFTPICKNVSSYVFYDAVHPTERVYMLVNDYIVNDVIPQF

SEQ ID NO: 6963 - DNA, 1727 bp, Zea mays subsp. mays
  misc_feature (1)..(1727): Ceres Seq. ID no. 12349196
  misc_feature: MA Experiment ID: 108523 Result: Up-regulated in Transcription
  misc_feature: MA Experiment 108523 PARAMETER Experiment Name: Zm_42deg_Heat_P Parameter: Age (day) Value: 8
  misc_feature: MA Experiment 108523 PARAMETER Experiment Name: Zm_42deg_Heat_P Parameter: Organism Value: Zea mays
  misc_feature: MA Experiment 108523 PARAMETER Experiment Name: Zm_42deg_Heat_P Parameter: Plant Line Value: 35A19
  misc_feature: MA Experiment 108523 PARAMETER Experiment Name: Zm_42deg_Heat_P Parameter: Temperature (deg C) Value: 42 vs. 22
  misc_feature: MA Experiment 108523 PARAMETER Experiment Name: Zm_42deg_Heat_P Parameter: Timepoint (hr) Value: 6
  misc_feature: MA Experiment 108523 PARAMETER Experiment Name: Zm_42deg_Heat_P Parameter: Tissue Value: Aerial
  misc_feature: MA Experiment ID: 108535 Result: Up-regulated in Transcription
  misc_feature: MA Experiment 108535 PARAMETER Experiment Name: Zm_Meristem_P Parameter: Age (day) Value: 8
  misc_feature: MA Experiment 108535 PARAMETER Experiment Name: Zm_Meristem_P Parameter: Organism Value: Zea mays
  misc_feature: MA Experiment 108535 PARAMETER Experiment Name: Zm_Meristem_P Parameter: Plant Line Value: 35A19
  misc_feature: MA Experiment 108535 PARAMETER Experiment Name: Zm_Meristem_P Parameter: Tissue Value: Root Meristem vs. Above Root Meristem
  misc_feature: MA Experiment ID: 108544 Result: Down-regulated in Transcription
  misc_feature: MA Experiment ID: 108556 Result: Down-regulated in Transcription
  misc_feature: MA Experiment 108556 PARAMETER Experiment Name: Zm_Drought_P Parameter: Age (day) Value: 9
  misc_feature: MA Experiment 108556 PARAMETER Experiment Name: Zm_Drought_P Parameter: Organism Value: Zea mays
  misc_feature: MA Experiment 108556 PARAMETER Experiment Name: Zm_Drought_P Parameter: Plant Line Value: 35A19
  misc_feature: MA Experiment 108556 PARAMETER Experiment Name: Zm_Drought_P Parameter: Timepoint (hr) Value: 24
  misc_feature: MA Experiment 108556 PARAMETER Experiment Name: Zm_Drought_P Parameter: Tissue Value: Aerial
  misc_feature: MA Experiment 108556 PARAMETER Experiment Name: Zm_Drought_P Parameter: Treatment Value: Drought vs. No Drought
  misc_feature: MA Experiment ID: 20000477 Result: Down-regulated in Transcription
  misc_feature: MA Experiment 20000477 PARAMETER Experiment Name: Zm_5mM_SA_P Parameter: Age (day) Value: 10
  misc_feature: MA Experiment 20000477 PARAMETER Experiment Name: Zm_5mM_SA_P Parameter: Organism Value: Zea mays
  misc_feature: MA Experiment 20000477 PARAMETER Experiment Name: Zm_5mM_SA_P Parameter: Plant Line Value: 35A19
  misc_feature: MA Experiment 20000477 PARAMETER Experiment Name: Zm_5mM_SA_P Parameter: Timepoint (hr) Value: 48
  misc_feature: MA Experiment 20000477 PARAMETER Experiment Name: Zm_5mM_SA_P Parameter: Tissue Value: Aerial
  misc_feature: MA Experiment 20000477 PARAMETER Experiment Name: Zm_5mM_SA_P Parameter: Treatment Value: 5mM SA vs. No Treatment
  misc_feature: MA Experiment ID: 20000478 Result: Down-regulated in Transcription
  misc_feature: MA Experiment 20000478 PARAMETER Experiment Name: Zm_5mM_SA_P Parameter: Age (day) Value: 11
  misc_feature: MA Experiment 20000478 PARAMETER Experiment Name: Zm_5mM_SA_P Parameter: Organism Value: Zea mays
  misc_feature: MA Experiment 20000478 PARAMETER Experiment Name: Zm_5mM_SA_P Parameter: Plant Line Value: 35A19
  misc_feature: MA Experiment 20000478 PARAMETER Experiment Name: Zm_5mM_SA_P Parameter: Timepoint (hr) Value: 72
  misc_feature: MA Experiment 20000478 PARAMETER Experiment Name: Zm_5mM_SA_P Parameter: Tissue Value: Aerial
  misc_feature: MA Experiment 20000478 PARAMETER Experiment Name: Zm_5mM_SA_P Parameter: Treatment Value: 5mM SA vs. No Treatment
  misc_feature: MA Experiment ID: 20000492 Result: Up-regulated in Transcription
  misc_feature: MA Experiment 20000492 PARAMETER Experiment Name: Zm_Hybrid_Seed_Dev_P Parameter: DAP Value: 12
  misc_feature: MA Experiment 20000492 PARAMETER Experiment Name: Zm_Hybrid_Seed_Dev_P Parameter: Organism Value: Zea mays
  misc_feature: MA Experiment 20000492 PARAMETER Experiment Name: Zm_Hybrid_Seed_Dev_P Parameter: Plant Line Value: 35A19
  misc_feature: MA Experiment 20000492 PARAMETER Experiment Name: Zm_Hybrid_Seed_Dev_P Parameter: Tissue Value: Fert Kernel vs. Unfert Floret
  misc_feature: MA Experiment ID: 20000632 Result: Down-regulated in Transcription
  misc_feature: MA Experiment 20000632 PARAMETER Experiment Name: Zm_Herbicide-Treatments_P Parameter: Timepoint (hr) Value: 4
  misc_feature: MA Experiment 20000632 PARAMETER Experiment Name: Zm_Herbicide-Treatments_P Parameter: Tissue Value: Aerial
  misc_feature: MA Experiment 20000632 PARAMETER Experiment Name: Zm_Herbicide-Treatments_P Parameter: Treatment Value: Glean vs. No Treatment
aacctaaacctcgtctcgcctccttcagtccatcccctcaaccccggcggccaaaagccggcacaccgaagcggcggccatggcggagctaaagcggctgtcagagagccgggacctgacgcggatcgagcgcatcggcgcgcactcccacatccgggggctagggctggactcctccatggaggcgcgcgacgcctcggagggcatggtcgggcagctgcccgcgcgccgcgccgcggggctcatactccagctcatccgccagggcaagatcgccggccgcgccgttctcctcgcgggccagcccggcaccggcaagaccgcgctcgccatgggcatcgccaagtcgctcggcgcggagacgcccttcgcctccgtcgcagcctcggagctcttctcgctcgacctctccaagacggaggcgctcacgcaggccttccgccgcgccatcggcgtgcgcatcaaggaggagacggaaatcatcgagggcgaggtcgtggagatcttgatcgaccgccctttgtcggcctctgccgctggcggcagctcggctgcccctacaggtgctactgcggctggtaagtcggggcggctcacgctgaagaccacggacatggaaacggtgtacgagctcgggggaaagatgattgaggctcttgggaaggagaaggtgcagagcggggatgtgattgcacttgacaaggcctccgggaaggtcaccaagcttggacgctccattgggaggtcgcgggattatgatgccgttggcccgcacaccaagtttgtcaagtgtcctgatggcgagctccagaagcgcaaggagatcgtgcactgtgttaccttacatgagattgatgtcattaatagcaggacacagggttttcttgcactgttcactggtgacaccggtgaaattcgtgcagaggttcgggaacagatcgacacaaaagtcgcagagtggagagaggaaggaaaagctgatattgtccctggtgttctgttcatcgatgaagttcacatgctagacattgagtgcttctccttcctcaaccgagcattggaaaatgacatggctccgatcctagtaatcgcaacaaacagagggatcacatccattcgtgggacaaactaccgctcgccacacgggatcccgccagacttccttgaccggttactgatcatcacgacgcagccctacacggaggatgagatcaggaagatcctggacatccggtgcgatgaggaggatgtggagatgtccgcggacgccaaggtcctgctcaccaaaatcggcgtggagacctcgctgcggtacgccatcaaccttatcacatctgccgcattagcctgccagaggcgcaaggggaaggtggttgacatggaggacattagccgggtgtaccagttgttcctggacgtgaagcggtcgacgcagtacctgatggagtaccagagccagtacatgttcaacgaagtgcccggggaagcagatggagaggacgcgatgcaatcctagatgaacttttcttcaccaggtgtctgtgttagtatgtactgcgtgtctgcgtcgtctatttctggtgcatcttgcttgtttagttgctgttatatcctgacaaggcgtggtgtgtgcgatgggctgcctgtaagctgatttaggtaactatatatgcaattcagatgtatcttagtaaaattcaccccagttggagtgagattgtttgttt

SEQ ID NO: 6964 - protein, 478 aa, Zea mays subsp. mays
  peptide (1)..(478): Ceres Seq. ID no. 12349197
  misc_feature (121)..(447): Pfam Name: TIP49 C-terminus Pfam Description: TIP49 C-terminus
  misc_feature (1)..(477): Homolog of NCBI NO: 15240788 NR Description: RuvB DNA helicase-like protein; protein id:
  misc_feature (1)..(467): Homolog of NCBI NO: 15229623 NR Description: RuvB DNA helicase - like protein; protein id:
  misc_feature (1)..(469): Homolog of NCBI NO: 6755382 NR Description: RuvB-like protein 2 [Mus musculus]
  misc_feature (1)..(466): Homolog of NCBI NO: 29126859 NR Description: Similar to RuvB-like protein 2 [Xenopus laevis]
  misc_feature (1)..(469): Homolog of NCBI NO: 5730023 NR Description: RuvB-like 2; erythrocyte cytosolic protein,
  misc_feature (1)..(465): Homolog of NCBI NO: 27819634 NR Description: RuvB-like protein 2 [Danio rerio]
  misc_feature (1)..(475): Homolog of NCBI NO: 17737635 NR Description: reptin CG9750-PA
  misc_feature (1)..(411): Homolog of NCBI NO: 4929561 NR Description: CGI-46 protein [Homo sapiens]
  misc_feature (6)..(478): Homolog of NCBI NO: 23480914 NR Description: Arabidopsis thaliana At5g67630/K9I9_20
  misc_feature (7)..(465): Homolog of NCBI NO: 38105112 NR Description: hypothetical protein MG03173.4 [Magnaporthe
MAELKRLSESRDLTRIERIGAHSHIRGLGLDSSMEARDASEGMVGQLPARRAAGLILQLIRQGKIAGRAVLLAGQPGTGKTALAMGIAKSLGAETPFASVAASELFSLDLSKTEALTQAFRRAIGVRIKEETEIIEGEVVEILIDRPLSASAAGGSSAAPTGATAAGKSGRLTLKTTDMETVYELGGKMIEALGKEKVQSGDVIALDKASGKVTKLGRSIGRSRDYDAVGPHTKFVKCPDGELQKRKEIVHCVTLHEIDVINSRTQGFLALFTGDTGEIRAEVREQIDTKVAEWREEGKADIVPGVLFIDEVHMLDIECFSFLNRALENDMAPILVIATNRGITSIRGTNYRSPHGIPPDFLDRLLIITTQPYTEDEIRKILDIRCDEEDVEMSADAKVLLTKIGVETSLRYAINLITSAALACQRRKGKVVDMEDISRVYQLFLDVKRSTQYLMEYQSQYMFNEVPGEADGEDAMQS

SEQ ID NO: 6965 - protein, 445 aa, Zea mays subsp. mays
  peptide (1)..(445): Ceres Seq. ID no. 12349198
  misc_feature (88)..(414): Pfam Name: TIP49 C-terminus Pfam Description: TIP49 C-terminus
  misc_feature (1)..(444): Homolog of NCBI NO: 15240788 NR Description: RuvB DNA helicase-like protein; protein id:
  misc_feature (1)..(434): Homolog of NCBI NO: 15229623 NR Description: RuvB DNA helicase - like protein; protein id:
  misc_feature (1)..(436): Homolog of NCBI NO: 6755382 NR Description: RuvB-like protein 2 [Mus musculus]
  misc_feature (1)..(433): Homolog of NCBI NO: 29126859 NR Description: Similar to RuvB-like protein 2 [Xenopus laevis]
  misc_feature (1)..(436): Homolog of NCBI NO: 5730023 NR Description: RuvB-like 2; erythrocyte cytosolic protein,
  misc_feature (1)..(432): Homolog of NCBI NO: 27819634 NR Description: RuvB-like protein 2 [Danio rerio]
  misc_feature (1)..(442): Homolog of NCBI NO: 17737635 NR Description: reptin CG9750-PA
  misc_feature (1)..(378): Homolog of NCBI NO: 4929561 NR Description: CGI-46 protein [Homo sapiens]
  misc_feature (1)..(445): Homolog of NCBI NO: 23480914 NR Description: Arabidopsis thaliana At5g67630/K9I9_20
  misc_feature (1)..(432): Homolog of NCBI NO: 38105112 NR Description: hypothetical protein MG03173.4 [Magnaporthe
MEARDASEGMVGQLPARRAAGLILQLIRQGKIAGRAVLLAGQPGTGKTALAMGIAKSLGAETPFASVAASELFSLDLSKTEALTQAFRRAIGVRIKEETEIIEGEVVEILIDRPLSASAAGGSSAAPTGATAAGKSGRLTLKTTDMETVYELGGKMIEALGKEKVQSGDVIALDKASGKVTKLGRSIGRSRDYDAVGPHTKFVKCPDGELQKRKEIVHCVTLHEIDVINSRTQGFLALFTGDTGEIRAEVREQIDTKVAEWREEGKADIVPGVLFIDEVHMLDIECFSFLNRALENDMAPILVIATNRGITSIRGTNYRSPHGIPPDFLDRLLIITTQPYTEDEIRKILDIRCDEEDVEMSADAKVLLTKIGVETSLRYAINLITSAALACQRRKGKVVDMEDISRVYQLFLDVKRSTQYLMEYQSQYMFNEVPGEADGEDAMQS

SEQ ID NO: 6966 - protein, 436 aa, Zea mays subsp. mays
  peptide (1)..(436): Ceres Seq. ID no. 12349199
  misc_feature (79)..(405): Pfam Name: TIP49 C-terminus Pfam Description: TIP49 C-terminus
  misc_feature (1)..(427): Homolog of NCBI NO: 5730023 NR Description: RuvB-like 2; erythrocyte cytosolic protein,
  misc_feature (1)..(423): Homolog of NCBI NO: 27819634 NR Description: RuvB-like protein 2 [Danio rerio]
  misc_feature (1)..(433): Homolog of NCBI NO: 17737635 NR Description: reptin CG9750-PA
  misc_feature (1)..(435): Homolog of NCBI NO: 15240788 NR Description: RuvB DNA helicase-like protein; protein id:
  misc_feature (1)..(427): Homolog of NCBI NO: 6755382 NR Description: RuvB-like protein 2 [Mus musculus]
  misc_feature (1)..(424): Homolog of NCBI NO: 29126859 NR Description: Similar to RuvB-like protein 2 [Xenopus laevis]
  misc_feature (1)..(425): Homolog of NCBI NO: 15229623 NR Description: RuvB DNA helicase - like protein; protein id:
  misc_feature (1)..(369): Homolog of NCBI NO: 4929561 NR Description: CGI-46 protein [Homo sapiens]
  misc_feature (1)..(436): Homolog of NCBI NO: 23480914 NR Description: Arabidopsis thaliana At5g67630/K9I9_20
  misc_feature (1)..(423): Homolog of NCBI NO: 38105112 NR Description: hypothetical protein MG03173.4 [Magnaporthe
MVGQLPARRAAGLILQLIRQGKIAGRAVLLAGQPGTGKTALAMGIAKSLGAETPFASVAASELFSLDLSKTEALTQAFRRAIGVRIKEETEIIEGEVVEILIDRPLSASAAGGSSAAPTGATAAGKSGRLTLKTTDMETVYELGGKMIEALGKEKVQSGDVIALDKASGKVTKLGRSIGRSRDYDAVGPHTKFVKCPDGELQKRKEIVHCVTLHEIDVINSRTQGFLALFTGDTGEIRAEVREQIDTKVAEWREEGKADIVPGVLFIDEVHMLDIECFSFLNRALENDMAPILVIATNRGITSIRGTNYRSPHGIPPDFLDRLLIITTQPYTEDEIRKILDIRCDEEDVEMSADAKVLLTKIGVETSLRYAINLITSAALACQRRKGKVVDMEDISRVYQLFLDVKRSTQYLMEYQSQYMFNEVPGEADGEDAMQS

SEQ ID NO: 6967 - DNA, 1743 bp, Zea mays subsp. mays
  misc_feature (1)..(1743): Ceres Seq. ID no. 12353879
  misc_feature: MA Experiment ID: 108522 Result: Up-regulated in Transcription
  misc_feature: MA Experiment 108522 PARAMETER Experiment Name: Zm_42deg_Heat_P Parameter: Age (day) Value: 8
  misc_feature: MA Experiment 108522 PARAMETER Experiment Name: Zm_42deg_Heat_P Parameter: Organism Value: Zea mays
  misc_feature: MA Experiment 108522 PARAMETER Experiment Name: Zm_42deg_Heat_P Parameter: Plant Line Value: 35A19
  misc_feature: MA Experiment 108522 PARAMETER Experiment Name: Zm_42deg_Heat_P Parameter: Temperature (deg C) Value: 42 vs. 22
  misc_feature: MA Experiment 108522 PARAMETER Experiment Name: Zm_42deg_Heat_P Parameter: Timepoint (hr) Value: 1
  misc_feature: MA Experiment 108522 PARAMETER Experiment Name: Zm_42deg_Heat_P Parameter: Tissue Value: Aerial
aaacccacagagacagccagacaccaggcaactagtgtgtgctctctccagatctttctcgtagtttctcacacgacgacgacgagtccatgtccgccgcggtgatgacggcgccgccctgccacaggcagccgtcccctctcaaccccaactcgagggccacgcagtcgccgatcagcaacggcaagcccaacgcggtctccacgacaaggaggcacctcgccaacctcgaccgcctcctcgtcaagccgccaccgctcccgctcccgctcccgccgcagcccaggaaactgccagccgatgaggtaccaggcgacggggaggccacccccgacgaccgcagcggccacggcgggctcctcaacgcgctgaacctgtccacgtttctgcccttcacgcggaaggcagccgtggacgagatgtccccgagcagcctggcgtacatgcagcgcctcctcacgctctccccgcggctgtcgcccaagggctccatcgcgggcgagtggcggaggtaccacggcgaaggcaggtgggagggcctcctcgacccgctcgaccagaacctgcgccgcgagctcctccgctacggcgacttcgtgcaggccgcgtacacggcgttccactccatgccgtcggcggcggaggcagcctccagcggtcagcagcgcaccctcgtgctcccggaccgctcgtaccacccgacccgcagcctgttcgcctcgtcgtcgctgtccatcccgccgtgggcgcagcggcggtcggcgcccagctggctcacgcagcgcaccagcttcgtcggctacgtcgccgtctgtgaaaacgagcgggaggtccgtcgcatgggccgccgcgacatagccatcgtgctacgtggcaccgccacgtgccccgagtgggccgagaacctccgcgccggcctcgtgccgctcacggcggacgacgacgcgtccgcgcccaaggtggcgaaggggttcctgagcctatacaggacgccaggagaccatgcgcccagcctctcgaccgccatagtggaggaggtgaagcgtctcgtgcaggtgtacaggggggaggagctcagcatcacagtcgtgggccacagccttggcgcgtcgctggccctcctcgccgccgacgagctcagcccctgcctggctgctcaaacagacggcaccgcggaccaccagccgccgccgatcgcggtggtctccttcggaggccccaagaccggaaaccgcgcgttcgcagagcgtctgcagcgcgagcgcggtgtgaacgtcttgcgggtggtgaacgcgggcgacgtggtgacgcgcgtgccggcgccgatcgcgcgggaagggtatgtgcacgcgggtggcgctgagctgagactgcacaacagcgactcgccgtgcctgcgtcccgacgcgggtccagcgtgctgccacgacctggaggcgtacctacaccttctggatgggttcgccggctccgggcggccgttccgccccgacgcgagccgcagcgtggcgcggctgctgacataccagcggcccaacgtgaagcgtgcgtacgtggagcacgcgcggatgctcgggttcgagccggcctcaccgaacgccagcgccaatggcgccaccgccgacggccagtacggctacctggccagccctacatgactctactttgtagctacaaagcaagcaagcaaacatgcatgcatgcaaactccattcttaacaaaggatatggacgtgtttcttg

SEQ ID NO: 6968 - protein, 522 aa, Zea mays subsp. mays
  peptide (1)..(522): Ceres Seq. ID no. 12353880
  misc_feature (1)..(522): Homolog of NCBI NO: 37536870 NR Description: putative lipase [Oryza sativa (japonica
  misc_feature (8)..(522): Homolog of NCBI NO: 14140134 NR Description: lipase-like protein [Oryza sativa]
  misc_feature (71)..(488): Homolog of NCBI NO: 7488220 NR Description: probable triacylglycerol lipase - Arabidopsis >gi|2245036|emb|CAB10455.1| triacylglycerol lipase like protein thaliana] >gi|7268433|emb|CAB80953.1| triacylglycerol lipase like
  misc_feature (71)..(488): Homolog of NCBI NO: 18414755 NR Description: triacylglycerol lipase like protein; protein id:
  misc_feature (126)..(413): Homolog of NCBI NO: 24898901 NR Description: DAD1 [Brassica rapa]
  misc_feature (130)..(413): Homolog of NCBI NO: 16215706 NR Description: DEFECTIVE IN ANTHER DEHISCENCE1 [Arabidopsis
  misc_feature (418)..(475): Homolog of NCBI NO: 16215706 NR Description: DEFECTIVE IN ANTHER DEHISCENCE1 [Arabidopsis
  misc_feature (418)..(475): Homolog of NCBI NO: 24898901 NR Description: DAD1 [Brassica rapa]
  misc_feature (142)..(413): Homolog of NCBI NO: 15224963 NR Description: putative triacylglycerol lipase; protein id: supported by cDNA: gi_18491248 [Arabidopsis thaliana]
  misc_feature (418)..(475): Homolog of NCBI NO: 15224963 NR Description: putative triacylglycerol lipase; protein id: supported by cDNA: gi_18491248 [Arabidopsis thaliana]
MSAAVMTAPPCHRQPSPLNPNSRATQSPISNGKPNAVSTTRRHLANLDRLLVKPPPLPLPLPPQPRKLPADEVPGDGEATPDDRSGHGGLLNALNLSTFLPFTRKAAVDEMSPSSLAYMQRLLTLSPRLSPKGSIAGEWRRYHGEGRWEGLLDPLDQNLRRELLRYGDFVQAAYTAFHSMPSAAEAASSGQQRTLVLPDRSYHPTRSLFASSSLSIPPWAQRRSAPSWLTQRTSFVGYVAVCENEREVRRMGRRDIAIVLRGTATCPEWAENLRAGLVPLTADDDASAPKVAKGFLSLYRTPGDHAPSLSTAIVEEVKRLVQVYRGEELSITVVGHSLGASLALLAADELSPCLAAQTDGTADHQPPPIAVVSFGGPKTGNRAFAERLQRERGVNVLRVVNAGDVVTRVPAPIAREGYVHAGGAELRLHNSDSPCLRPDAGPACCHDLEAYLHLLDGFAGSGRPFRPDASRSVARLLTYQRPNVKRAYVEHARMLGFEPASPNASANGATADGQYGYLASPT

SEQ ID NO: 6969 - protein, 517 aa, Zea mays subsp. mays
  peptide (1)..(517): Ceres Seq. ID no. 12353881
  misc_feature (1)..(517): Homolog of NCBI NO: 37536870 NR Description: putative lipase [Oryza sativa (japonica
  misc_feature (3)..(517): Homolog of NCBI NO: 14140134 NR Description: lipase-like protein [Oryza sativa]
  misc_feature (66)..(483): Homolog of NCBI NO: 7488220 NR Description: probable triacylglycerol lipase - Arabidopsis >gi|2245036|emb|CAB10455.1| triacylglycerol lipase like protein thaliana] >gi|7268433|emb|CAB80953.1| triacylglycerol lipase like
  misc_feature (66)..(483): Homolog of NCBI NO: 18414755 NR Description: triacylglycerol lipase like protein; protein id:
  misc_feature (121)..(408): Homolog of NCBI NO: 24898901 NR Description: DAD1 [Brassica rapa]
  misc_feature (125)..(408): Homolog of NCBI NO: 16215706 NR Description: DEFECTIVE IN ANTHER DEHISCENCE1 [Arabidopsis
  misc_feature (413)..(470): Homolog of NCBI NO: 16215706 NR Description: DEFECTIVE IN ANTHER DEHISCENCE1 [Arabidopsis
  misc_feature (413)..(470): Homolog of NCBI NO: 24898901 NR Description: DAD1 [Brassica rapa]
  misc_feature (137)..(408): Homolog of NCBI NO: 15224963 NR Description: putative triacylglycerol lipase; protein id: supported by cDNA: gi_18491248 [Arabidopsis thaliana]
  misc_feature (413)..(470): Homolog of NCBI NO: 15224963 NR Description: putative triacylglycerol lipase; protein id: supported by cDNA: gi_18491248 [Arabidopsis thaliana]
MTAPPCHRQPSPLNPNSRATQSPISNGKPNAVSTTRRHLANLDRLLVKPPPLPLPLPPQPRKLPADEVPGDGEATPDDRSGHGGLLNALNLSTFLPFTRKAAVDEMSPSSLAYMQRLLTLSPRLSPKGSIAGEWRRYHGEGRWEGLLDPLDQNLRRELLRYGDFVQAAYTAFHSMPSAAEAASSGQQRTLVLPDRSYHPTRSLFASSSLSIPPWAQRRSAPSWLTQRTSFVGYVAVCENEREVRRMGRRDIAIVLRGTATCPEWAENLRAGLVPLTADDDASAPKVAKGFLSLYRTPGDHAPSLSTAIVEEVKRLVQVYRGEELSITVVGHSLGASLALLAADELSPCLAAQTDGTADHQPPPIAVVSFGGPKTGNRAFAERLQRERGVNVLRVVNAGDVVTRVPAPIAREGYVHAGGAELRLHNSDSPCLRPDAGPACCHDLEAYLHLLDGFAGSGRPFRPDASRSVARLLTYQRPNVKRAYVEHARMLGFEPASPNASANGATADGQYGYLASPT

SEQ ID NO: 6970 - protein, 412 aa, Zea mays subsp. mays
  peptide (1)..(412): Ceres Seq. ID no. 12353882
  misc_feature (1)..(412): Homolog of NCBI NO: 37536870 NR Description: putative lipase [Oryza sativa (japonica
  misc_feature (1)..(412): Homolog of NCBI NO: 14140134 NR Description: lipase-like protein [Oryza sativa]
  misc_feature (1)..(378): Homolog of NCBI NO: 7488220 NR Description: probable triacylglycerol lipase - Arabidopsis >gi|2245036|emb|CAB10455.1| triacylglycerol lipase like protein thaliana] >gi|7268433|emb|CAB80953.1| triacylglycerol lipase like
  misc_feature (1)..(378): Homolog of NCBI NO: 18414755 NR Description: triacylglycerol lipase like protein; protein id:
  misc_feature (16)..(303): Homolog of NCBI NO: 24898901 NR Description: DAD1 [Brassica rapa]
  misc_feature (20)..(303): Homolog of NCBI NO: 16215706 NR Description: DEFECTIVE IN ANTHER DEHISCENCE1 [Arabidopsis
  misc_feature (308)..(365): Homolog of NCBI NO: 16215706 NR Description: DEFECTIVE IN ANTHER DEHISCENCE1 [Arabidopsis
  misc_feature (308)..(365): Homolog of NCBI NO: 24898901 NR Description: DAD1 [Brassica rapa]
  misc_feature (32)..(303): Homolog of NCBI NO: 15224963 NR Description: putative triacylglycerol lipase; protein id: supported by cDNA: gi_18491248 [Arabidopsis thaliana]
  misc_feature (308)..(365): Homolog of NCBI NO: 15224963 NR Description: putative triacylglycerol lipase; protein id: supported by cDNA: gi_18491248 [Arabidopsis thaliana]
MSPSSLAYMQRLLTLSPRLSPKGSIAGEWRRYHGEGRWEGLLDPLDQNLRRELLRYGDFVQAAYTAFHSMPSAAEAASSGQQRTLVLPDRSYHPTRSLFASSSLSIPPWAQRRSAPSWLTQRTSFVGYVAVCENEREVRRMGRRDIAIVLRGTATCPEWAENLRAGLVPLTADDDASAPKVAKGFLSLYRTPGDHAPSLSTAIVEEVKRLVQVYRGEELSITVVGHSLGASLALLAADELSPCLAAQTDGTADHQPPPIAVVSFGGPKTGNRAFAERLQRERGVNVLRVVNAGDVVTRVPAPIAREGYVHAGGAELRLHNSDSPCLRPDAGPACCHDLEAYLHLLDGFAGSGRPFRPDASRSVARLLTYQRPNVKRAYVEHARMLGFEPASPNASANGATADGQYGYLASPT

SEQ ID NO: 6971 - DNA, 1353 bp, Zea mays subsp. mays
  misc_feature (1)..(1353): Ceres Seq. ID no. 12402491
  misc_feature: MA Experiment ID: 108504 Result: Up-regulated in Transcription
  misc_feature: MA Experiment 108504 PARAMETER Experiment Name: Zm_Drought_P Parameter: Age (day) Value: 8
  misc_feature: MA Experiment 108504 PARAMETER Experiment Name: Zm_Drought_P Parameter: Organism Value: Zea mays
  misc_feature: MA Experiment 108504 PARAMETER Experiment Name: Zm_Drought_P Parameter: Plant Line Value: 35A19
  misc_feature: MA Experiment 108504 PARAMETER Experiment Name: Zm_Drought_P Parameter: Timepoint (hr) Value: 12
  misc_feature: MA Experiment 108504 PARAMETER Experiment Name: Zm_Drought_P Parameter: Tissue Value: Aerial
  misc_feature: MA Experiment 108504 PARAMETER Experiment Name: Zm_Drought_P Parameter: Treatment Value: Drought vs. No Drought
  misc_feature: MA Experiment ID: 108522 Result: Down-regulated in Transcription
  misc_feature: MA Experiment 108522 PARAMETER Experiment Name: Zm_42deg_Heat_P Parameter: Age (day) Value: 8
  misc_feature: MA Experiment 108522 PARAMETER Experiment Name: Zm_42deg_Heat_P Parameter: Organism Value: Zea mays
  misc_feature: MA Experiment 108522 PARAMETER Experiment Name: Zm_42deg_Heat_P Parameter: Plant Line Value: 35A19
  misc_feature: MA Experiment 108522 PARAMETER Experiment Name: Zm_42deg_Heat_P Parameter: Temperature (deg C) Value: 42 vs. 22
  misc_feature: MA Experiment 108522 PARAMETER Experiment Name: Zm_42deg_Heat_P Parameter: Timepoint (hr) Value: 1
  misc_feature: MA Experiment 108522 PARAMETER Experiment Name: Zm_42deg_Heat_P Parameter: Tissue Value: Aerial
  misc_feature: MA Experiment ID: 108527 Result: Down-regulated in Transcription
  misc_feature: MA Experiment 108527 PARAMETER Experiment Name: Zm_5mM_NO_P Parameter: Age (day) Value: 8
  misc_feature: MA Experiment 108527 PARAMETER Experiment Name: Zm_5mM_NO_P Parameter: Organism Value: Zea mays
  misc_feature: MA Experiment 108527 PARAMETER Experiment Name: Zm_5mM_NO_P Parameter: Plant Line Value: 35A19
  misc_feature: MA Experiment 108527 PARAMETER Experiment Name: Zm_5mM_NO_P Parameter: Timepoint (hr) Value: 6
  misc_feature: MA Experiment 108527 PARAMETER Experiment Name: Zm_5mM_NO_P Parameter: Tissue Value: Aerial
  misc_feature: MA Experiment 108527 PARAMETER Experiment Name: Zm_5mM_NO_P Parameter: Treatment Value: 5mM NO vs. No Treatment
  misc_feature: MA Experiment ID: 108529 Result: Up-regulated in Transcription
  misc_feature: MA Experiment 108529 PARAMETER Experiment Name: Zm_Imbibed_Seeds_P Parameter: Age (day) Value: 5 vs. 2
  misc_feature: MA Experiment 108529 PARAMETER Experiment Name: Zm_Imbibed_Seeds_P Parameter: Organism Value: Zea mays
  misc_feature: MA Experiment 108529 PARAMETER Experiment Name: Zm_Imbibed_Seeds_P Parameter: Plant Line Value: 35A19
  misc_feature: MA Experiment 108529 PARAMETER Experiment Name: Zm_Imbibed_Seeds_P Parameter: Tissue Value: Roots vs. Embryo
  misc_feature: MA Experiment ID: 108546 Result: Up-regulated in Transcription
  misc_feature: MA Experiment 108546 PARAMETER Experiment Name: Zm_Imbibed_Seeds_P Parameter: Age (day) Value: 3 vs. 2
  misc_feature: MA Experiment 108546 PARAMETER Experiment Name: Zm_Imbibed_Seeds_P Parameter: Organism Value: Zea mays
  misc_feature: MA Experiment 108546 PARAMETER Experiment Name: Zm_Imbibed_Seeds_P Parameter: Plant Line Value: 35A19
  misc_feature: MA Experiment 108546 PARAMETER Experiment Name: Zm_Imbibed_Seeds_P Parameter: Tissue Value: Roots vs. Embryo
  misc_feature: MA Experiment ID: 108556 Result: Up-regulated in Transcription
  misc_feature: MA Experiment 108556 PARAMETER Experiment Name: Zm_Drought_P Parameter: Age (day) Value: 9
  misc_feature: MA Experiment 108556 PARAMETER Experiment Name: Zm_Drought_P Parameter: Organism Value: Zea mays
  misc_feature: MA Experiment 108556 PARAMETER Experiment Name: Zm_Drought_P Parameter: Plant Line Value: 35A19
  misc_feature: MA Experiment 108556 PARAMETER Experiment Name: Zm_Drought_P Parameter: Timepoint (hr) Value: 24
  misc_feature: MA Experiment 108556 PARAMETER Experiment Name: Zm_Drought_P Parameter: Tissue Value: Aerial
  misc_feature: MA Experiment 108556 PARAMETER Experiment Name: Zm_Drought_P Parameter: Treatment Value: Drought vs. No Drought
  misc_feature: MA Experiment ID: 108597 Result: Up-regulated in Transcription
  misc_feature: MA Experiment 108597 PARAMETER Experiment Name: Zm_100uM_ABA_P Parameter: Age (day) Value: 9
  misc_feature: MA Experiment 108597 PARAMETER Experiment Name: Zm_100uM_ABA_P Parameter: Organism Value: Zea mays
  misc_feature: MA Experiment 108597 PARAMETER Experiment Name: Zm_100uM_ABA_P Parameter: Plant Line Value: 35A19
  misc_feature: MA Experiment 108597 PARAMETER Experiment Name: Zm_100uM_ABA_P Parameter: Timepoint (hr) Value: 24
  misc_feature: MA Experiment 108597 PARAMETER Experiment Name: Zm_100uM_ABA_P Parameter: Tissue Value: Aerial
  misc_feature: MA Experiment 108597 PARAMETER Experiment Name: Zm_100uM_ABA_P Parameter: Treatment Value: 100uM ABA vs. No Treatment
  misc_feature: MA Experiment ID: 108689 Result: Up-regulated in Transcription
  misc_feature: MA Experiment 108689 PARAMETER Experiment Name: Zm_Drought_Roots_P Parameter: Age (day) Value: 9
  misc_feature: MA Experiment 108689 PARAMETER Experiment Name: Zm_Drought_Roots_P Parameter: Organism Value: Zea mays
  misc_feature: MA Experiment 108689 PARAMETER Experiment Name: Zm_Drought_Roots_P Parameter: Plant Line Value: 35A19
  misc_feature: MA Experiment 108689 PARAMETER Experiment Name: Zm_Drought_Roots_P Parameter: Timepoint (hr) Value: 24
  misc_feature: MA Experiment 108689 PARAMETER Experiment Name: Zm_Drought_Roots_P Parameter: Tissue Value: Roots
  misc_feature: MA Experiment 108689 PARAMETER Experiment Name: Zm_Drought_Roots_P Parameter: Treatment Value: Drought vs. No Drought
  misc_feature: MA Experiment ID: 20000492 Result: Down-regulated in Transcription
  misc_feature: MA Experiment 20000492 PARAMETER Experiment Name: Zm_Hybrid_Seed_Dev_P Parameter: DAP Value: 12
  misc_feature: MA Experiment 20000492 PARAMETER Experiment Name: Zm_Hybrid_Seed_Dev_P Parameter: Organism Value: Zea mays
  misc_feature: MA Experiment 20000492 PARAMETER Experiment Name: Zm_Hybrid_Seed_Dev_P Parameter: Plant Line Value: 35A19
  misc_feature: MA Experiment 20000492 PARAMETER Experiment Name: Zm_Hybrid_Seed_Dev_P Parameter: Tissue Value: Fert Kernel vs. Unfert Floret
  misc_feature: MA Experiment ID: 20000535 Result: Down-regulated in Transcription
  misc_feature: MA Experiment 20000535 PARAMETER Experiment Name: Zm_Hybrid_Seed_Dev_P Parameter: DAP Value: 30 vs. 12
  misc_feature: MA Experiment 20000535 PARAMETER Experiment Name: Zm_Hybrid_Seed_Dev_P Parameter: Organism Value: Zea mays
  misc_feature: MA Experiment 20000535 PARAMETER Experiment Name: Zm_Hybrid_Seed_Dev_P Parameter: Plant Line Value: 35A19
  misc_feature: MA Experiment 20000535 PARAMETER Experiment Name: Zm_Hybrid_Seed_Dev_P Parameter: Tissue Value: Embryo vs. Unfert Floret
acgctcatgactttgaagagtgtcccttggcttgggtccagccttcagacttcagaggcaaaccgccggccggcatgcagtagaggcaggctagctgcaagagagttcatctagctagctagctagtgtgtgtttagggtacctagctagctagcttcaacatatatatcttagttgcacacagagctcaaagaaaggaaccatcgatcgatcggcagggagcggggatggggctgagggagatcgagtccacattgccgccggggttcaggttctatcccagcgacgaggagctggtgtgccactacctctacaagaaggtggccaacgagcgcgccgcgcaggggacgctggtggaggtcgacctgcacgcgcgagagccatgggagcttccagacgcggccaagctgacggcgagcgagtggtacttcttcagcttccgggaccgcaagtacgccacggggtcgcgcaccaaccgcgccaccaagacggggtactggaaggccaccggcaaggaccgcgaggtgcgcagcccggccacccgcgccgtcgtcggcatgaggaagacgctcgtcttctaccagggccgcgcacccaacggcgtcaagtcctgctgggtcatgcacgagttccgcctcgactcgccgcatacgccaccaaaggaggactgggtgctctgcagggtgttccagaagcggaaagacagcgagcaagacaacggcggcggctcctcctcgccgacgacctttgccggcgcgtcgtcgcagggggtcgttctagatctgccggacgaccagcccagcatgacgatggccggcgcgtacgtagcagcggaccaccagccgggctcttccgccgccgtcgggttcgcactgccgccgcatgcgcaggacaacggcctcggcgatggcggcctggacgcgttgctgatgaacggagcgacgatgtggcagtacagctcagcatcggccctcgccgatcacttcccgccggaggaagtgaccgccgcgcccatgatggggctaggctccaggggaggaggaggtgacgggtgcagcttcttctacgacagcggcttcgacgacatggggttcccgcagggatggatgggctgaggaggcaaggcaccaactgcaacaacgccatgggatgatggattctgaaggaaacgattgaattgattccattagtggtagtattgtacagtaggtacgtagtgtgaggttaggttattggaaattattagagtgcacctccccaatccaaaacaacggaatgaaaagtagagcgcatgacgacaattgtatgtatccattcactcctactactatgcttgtacattaattaattagt

SEQ ID NO: 6972 - protein, 295 aa, Zea mays subsp. mays
  peptide (1)..(295): Ceres Seq. ID no. 12402492
  misc_feature (10)..(138): Pfam Name: No apical meristem (NAM) protein Pfam Description: No apical meristem (NAM) protein
  misc_feature (1)..(215): Homolog of NCBI NO: 32482946 NR Description: OSJNBb0072M01.11 [Oryza sativa (japonica
  misc_feature (2)..(288): Homolog of NCBI NO: 37535380 NR Description: putative NAM (no apical meristem) protein [Oryza
  misc_feature (1)..(164): Homolog of NCBI NO: 18417214 NR Description: NAM / CUC2 -like protein; protein id:
  misc_feature (1)..(164): Homolog of NCBI NO: 21593065 NR Description: NAM / CUC2-like protein [Arabidopsis thaliana]
  misc_feature (1)..(220): Homolog of NCBI NO: 15224139 NR Description: NAM (no apical meristem)-like protein; protein At2g24430.1 [Arabidopsis thaliana] >gi|25352290|pir||E84636 NAM
  misc_feature (1)..(278): Homolog of NCBI NO: 11994506 NR Description: contains similarity to NAM (no apical meristem)
  misc_feature (1)..(254): Homolog of NCBI NO: 15232511 NR Description: NAM-like protein; protein id: At3g15170.1, by cDNA: gi_12060421 [Arabidopsis thaliana]
  misc_feature (6)..(185): Homolog of NCBI NO: 15148912 NR Description: NAC domain protein NAC1 [Phaseolus vulgaris]
  misc_feature (6)..(277): Homolog of NCBI NO: 40737029 NR Description: putative OsNAC1 protein [Oryza sativa (japonica
  misc_feature (7)..(174): Homolog of NCBI NO: 1279640 NR Description: NAM [Petunia x hybrida]
MGLREIESTLPPGFRFYPSDEELVCHYLYKKVANERAAQGTLVEVDLHAREPWELPDAAKLTASEWYFFSFRDRKYATGSRTNRATKTGYWKATGKDREVRSPATRAVVGMRKTLVFYQGRAPNGVKSCWVMHEFRLDSPHTPPKEDWVLCRVFQKRKDSEQDNGGGSSSPTTFAGASSQGVVLDLPDDQPSMTMAGAYVAADHQPGSSAAVGFALPPHAQDNGLGDGGLDALLMNGATMWQYSSASALADHFPPEEVTAAPMMGLGSRGGGGDGCSFFYDSGFDDMGFPQGWMG

SEQ ID NO: 6973 - protein, 221 aa, Zea mays subsp. mays
  peptide (1)..(221): Ceres Seq. ID no. 12402493
MGASRRGQADGERVVLLQLPGPQVRHGVAHQPRHQDGVLEGHRQGPRGAQPGHPRRRRHEEDARLLPGPRTQRRQVLLGHARVPPRLAAYATKGGLGALQGVPEAERQRARQRRRLLLADDLCRRVVAGGRSRSAGRPAQHDDGRRVRSSGPPAGLFRRRRVRTAAACAGQRPRRWRPGRVADERSDDVAVQLSIGPRRSLPAGGSDRRAHDGARLQGRRR

SEQ ID NO: 6974 - protein, 185 aa, Zea mays subsp. mays
  peptide (1)..(185): Ceres Seq. ID no. 12402494
  misc_feature (1)..(105): Homolog of NCBI NO: 32482946 NR Description: OSJNBb0072M01.11 [Oryza sativa (japonica
  misc_feature (1)..(178): Homolog of NCBI NO: 37535380 NR Description: putative NAM (no apical meristem) protein [Oryza
  misc_feature (1)..(54): Homolog of NCBI NO: 18417214 NR Description: NAM / CUC2 -like protein; protein id:
  misc_feature (1)..(54): Homolog of NCBI NO: 21593065 NR Description: NAM / CUC2-like protein [Arabidopsis thaliana]
  misc_feature (1)..(110): Homolog of NCBI NO: 15224139 NR Description: NAM (no apical meristem)-like protein; protein At2g24430.1 [Arabidopsis thaliana] >gi|25352290|pir||E84636 NAM
  misc_feature (1)..(168): Homolog of NCBI NO: 11994506 NR Description: contains similarity to NAM (no apical meristem)
  misc_feature (1)..(144): Homolog of NCBI NO: 15232511 NR Description: NAM-like protein; protein id: At3g15170.1, by cDNA: gi_12060421 [Arabidopsis thaliana]
  misc_feature (1)..(75): Homolog of NCBI NO: 15148912 NR Description: NAC domain protein NAC1 [Phaseolus vulgaris]
  misc_feature (1)..(167): Homolog of NCBI NO: 40737029 NR Description: putative OsNAC1 protein [Oryza sativa (japonica
  misc_feature (1)..(64): Homolog of NCBI NO: 1279640 NR Description: NAM [Petunia x hybrida]
MRKTLVFYQGRAPNGVKSCWVMHEFRLDSPHTPPKEDWVLCRVFQKRKDSEQDNGGGSSSPTTFAGASSQGVVLDLPDDQPSMTMAGAYVAADHQPGSSAAVGFALPPHAQDNGLGDGGLDALLMNGATMWQYSSASALADHFPPEEVTAAPMMGLGSRGGGGDGCSFFYDSGFDDMGFPQGWMG

SEQ ID NO: 6975 - DNA, 906 bp, Zea mays subsp. mays
  misc_feature (1)..(906): Ceres Seq. ID no. 12401209
  misc_feature: MA Experiment ID: 20000479 Result: Up-regulated in Transcription
  misc_feature: MA Experiment 20000479 PARAMETER Experiment Name: Zm_Drought_P Parameter: Age (day) Value: 10
  misc_feature: MA Experiment 20000479 PARAMETER Experiment Name: Zm_Drought_P Parameter: Organism Value: Zea mays
  misc_feature: MA Experiment 20000479 PARAMETER Experiment Name: Zm_Drought_P Parameter: Plant Line Value: 35A19
  misc_feature: MA Experiment 20000479 PARAMETER Experiment Name: Zm_Drought_P Parameter: Timepoint (hr) Value: 48
  misc_feature: MA Experiment 20000479 PARAMETER Experiment Name: Zm_Drought_P Parameter: Tissue Value: Aerial
  misc_feature: MA Experiment 20000479 PARAMETER Experiment Name: Zm_Drought_P Parameter: Treatment Value: Drought vs. No Drought
aatgatattcagcttagtattcgtatgcccagtggaaatagactggagatcaaactaacaaaacaagatgttttaaggaaagtgaagaatttcgtggatgaaaaccaaggcaatgggcttggctcatatgacctttctctggtttatcctaaaagagttttctctgaacaagatatggaagcaacactatccgagctgggtattcaaaaccgtcatgcaatgattgttgttccacatcggcagtctggtcaggtatcaaggcgtcactcctcggcatcttatgatatgggtgtcaattcaggtgcggatgatgttggtggcaattcaggtgcggggggatactttggttacctgagaaccgtcctgtcttatgtgaatccactctcctacctgaggggaaataccaactcatcaaatacagagctacagtcaaatgaaggcctgcggcagcttagacatggatctggtccatggagtgagccacggcctcttggcaataggggccatgaagtgactgatgcagactctgcaaacacgctgcgaaggcggcctagaccatttggtgccaatatccacactctggggagcgaggatcatggtccgtctgatgaaagaaatgttttctggaacgggaactcgacagagtttggaggcgacgacagaaaataggttgtggcgtggctggcagggcctgggacgacactatcagacagaatcaaagttgggaatagacagctgaaacaaatgcctcgacaggcttattgaggaataagtattgagattatagtgctgaaataatcgctgaattgtgatgtttacatttgtggaaacatacggtcgctggatccgtatactcgttgtatagtacatagccacagatatattaaatccgaactgcttggttcc

SEQ ID NO: 6976 - protein, 222 aa, Zea mays subsp. mays
  peptide (1)..(222): Ceres Seq. ID no. 12401210
  misc_feature (1)..(78): Pfam Name: UBX domain Pfam Description: UBX domain
  misc_feature (1)..(218): Homolog of NCBI NO: 30689298 NR Description: expressed protein [Arabidopsis thaliana] expressed protein [Arabidopsis thaliana] expressed protein [Arabidopsis thaliana]
  misc_feature (1)..(218): Homolog of NCBI NO: 20147205 NR Description: MFL8.1/MFL8.1 [Arabidopsis thaliana]
  misc_feature (1)..(146): Homolog of NCBI NO: 25408846 NR Description: hypothetical protein At2g43210 [imported] -
NDIQLSIRMPSGNRLEIKLTKQDVLRKVKNFVDENQGNGLGSYDLSLVYPKRVFSEQDMEATLSELGIQNRHAMIVVPHRQSGQVSRRHSSASYDMGVNSGADDVGGNSGAGGYFGYLRTVLSYVNPLSYLRGNTNSSNTELQSNEGLRQLRHGSGPWSEPRPLGNRGHEVTDADSANTLRRRPRPFGANIHTLGSEDHGPSDERNVFWNGNSTEFGGDDRK

SEQ ID NO: 6977 - protein, 214 aa, Zea mays subsp. mays
  peptide (1)..(214): Ceres Seq. ID no. 12401211
  misc_feature (1)..(70): Pfam Name: UBX domain Pfam Description: UBX domain
  misc_feature (1)..(210): Homolog of NCBI NO: 30689298 NR Description: expressed protein [Arabidopsis thaliana] expressed protein [Arabidopsis thaliana] expressed protein [Arabidopsis thaliana]
  misc_feature (1)..(210): Homolog of NCBI NO: 20147205 NR Description: MFL8.1/MFL8.1 [Arabidopsis thaliana]
  misc_feature (1)..(138): Homolog of NCBI NO: 25408846 NR Description: hypothetical protein At2g43210 [imported] -
MPSGNRLEIKLTKQDVLRKVKNFVDENQGNGLGSYDLSLVYPKRVFSEQDMEATLSELGIQNRHAMIVVPHRQSGQVSRRHSSASYDMGVNSGADDVGGNSGAGGYFGYLRTVLSYVNPLSYLRGNTNSSNTELQSNEGLRQLRHGSGPWSEPRPLGNRGHEVTDADSANTLRRRPRPFGANIHTLGSEDHGPSDERNVFWNGNSTEFGGDDRK

SEQ ID NO: 6978 - protein, 164 aa, Zea mays subsp. mays
  peptide (1)..(164): Ceres Seq. ID no. 12401212
  misc_feature (1)..(160): Homolog of NCBI NO: 30689298 NR Description: expressed protein [Arabidopsis thaliana] expressed protein [Arabidopsis thaliana] expressed protein [Arabidopsis thaliana]
  misc_feature (1)..(160): Homolog of NCBI NO: 20147205 NR Description: MFL8.1/MFL8.1 [Arabidopsis thaliana]
  misc_feature (1)..(88): Homolog of NCBI NO: 25408846 NR Description: hypothetical protein At2g43210 [imported] -
MEATLSELGIQNRHAMIVVPHRQSGQVSRRHSSASYDMGVNSGADDVGGNSGAGGYFGYLRTVLSYVNPLSYLRGNTNSSNTELQSNEGLRQLRHGSGPWSEPRPLGNRGHEVTDADSANTLRRRPRPFGANIHTLGSEDHGPSDERNVFWNGNSTEFGGDDRK

SEQ ID NO: 6979 - DNA, 1107 bp, Zea mays subsp. mays
  misc_feature (1)..(1107): Ceres Seq. ID no. 12412322
  misc_feature: MA Experiment ID: 108515 Result: Up-regulated in Transcription
  misc_feature: MA Experiment 108515 PARAMETER Experiment Name: Zm_2mM_SA_P Parameter: Age (day) Value: 8
  misc_feature: MA Experiment 108515 PARAMETER Experiment Name: Zm_2mM_SA_P Parameter: Organism Value: Zea mays
  misc_feature: MA Experiment 108515 PARAMETER Experiment Name: Zm_2mM_SA_P Parameter: Plant Line Value: 35A19
  misc_feature: MA Experiment 108515 PARAMETER Experiment Name: Zm_2mM_SA_P Parameter: Timepoint (hr) Value: 12
  misc_feature: MA Experiment 108515 PARAMETER Experiment Name: Zm_2mM_SA_P Parameter: Tissue Value: Aerial
  misc_feature: MA Experiment 108515 PARAMETER Experiment Name: Zm_2mM_SA_P Parameter: Treatment Value: 2mM SA vs. No Treatment
  misc_feature: MA Experiment ID: 108527 Result: Up-regulated in Transcription
  misc_feature: MA Experiment 108527 PARAMETER Experiment Name: Zm_5mM_NO_P Parameter: Age (day) Value: 8
  misc_feature: MA Experiment 108527 PARAMETER Experiment Name: Zm_5mM_NO_P Parameter: Organism Value: Zea mays
  misc_feature: MA Experiment 108527 PARAMETER Experiment Name: Zm_5mM_NO_P Parameter: Plant Line Value: 35A19
  misc_feature: MA Experiment 108527 PARAMETER Experiment Name: Zm_5mM_NO_P Parameter: Timepoint (hr) Value: 6
  misc_feature: MA Experiment 108527 PARAMETER Experiment Name: Zm_5mM_NO_P Parameter: Tissue Value: Aerial
  misc_feature: MA Experiment 108527 PARAMETER Experiment Name: Zm_5mM_NO_P Parameter: Treatment Value: 5mM NO vs. No Treatment
  misc_feature: MA Experiment ID: 108556 Result: Up-regulated in Transcription
  misc_feature: MA Experiment 108556 PARAMETER Experiment Name: Zm_Drought_P Parameter: Age (day) Value: 9
  misc_feature: MA Experiment 108556 PARAMETER Experiment Name: Zm_Drought_P Parameter: Organism Value: Zea mays
  misc_feature: MA Experiment 108556 PARAMETER Experiment Name: Zm_Drought_P Parameter: Plant Line Value: 35A19
  misc_feature: MA Experiment 108556 PARAMETER Experiment Name: Zm_Drought_P Parameter: Timepoint (hr) Value: 24
  misc_feature: MA Experiment 108556 PARAMETER Experiment Name: Zm_Drought_P Parameter: Tissue Value: Aerial
  misc_feature: MA Experiment 108556 PARAMETER Experiment Name: Zm_Drought_P Parameter: Treatment Value: Drought vs. No Drought
  misc_feature: MA Experiment ID: 20000477 Result: Up-regulated in Transcription
  misc_feature: MA Experiment 20000477 PARAMETER Experiment Name: Zm_5mM_SA_P Parameter: Age (day) Value: 10
  misc_feature: MA Experiment 20000477 PARAMETER Experiment Name: Zm_5mM_SA_P Parameter: Organism Value: Zea mays
  misc_feature: MA Experiment 20000477 PARAMETER Experiment Name: Zm_5mM_SA_P Parameter: Plant Line Value: 35A19
  misc_feature: MA Experiment 20000477 PARAMETER Experiment Name: Zm_5mM_SA_P Parameter: Timepoint (hr) Value: 48
  misc_feature: MA Experiment 20000477 PARAMETER Experiment Name: Zm_5mM_SA_P Parameter: Tissue Value: Aerial
  misc_feature: MA Experiment 20000477 PARAMETER Experiment Name: Zm_5mM_SA_P Parameter: Treatment Value: 5mM SA vs. No Treatment
  misc_feature: MA Experiment ID: 20000478 Result: Up-regulated in Transcription
  misc_feature: MA Experiment 20000478 PARAMETER Experiment Name: Zm_5mM_SA_P Parameter: Age (day) Value: 11
  misc_feature: MA Experiment 20000478 PARAMETER Experiment Name: Zm_5mM_SA_P Parameter: Organism Value: Zea mays
  misc_feature: MA Experiment 20000478 PARAMETER Experiment Name: Zm_5mM_SA_P Parameter: Plant Line Value: 35A19
  misc_feature: MA Experiment 20000478 PARAMETER Experiment Name: Zm_5mM_SA_P Parameter: Timepoint (hr) Value: 72
  misc_feature: MA Experiment 20000478 PARAMETER Experiment Name: Zm_5mM_SA_P Parameter: Tissue Value: Aerial
  misc_feature: MA Experiment 20000478 PARAMETER Experiment Name: Zm_5mM_SA_P Parameter: Treatment Value: 5mM SA vs. No Treatment
  misc_feature: MA Experiment ID: 20000479 Result: Up-regulated in Transcription
  misc_feature: MA Experiment 20000479 PARAMETER Experiment Name: Zm_Drought_P Parameter: Age (day) Value: 10
  misc_feature: MA Experiment 20000479 PARAMETER Experiment Name: Zm_Drought_P Parameter: Organism Value: Zea mays
  misc_feature: MA Experiment 20000479 PARAMETER Experiment Name: Zm_Drought_P Parameter: Plant Line Value: 35A19
  misc_feature: MA Experiment 20000479 PARAMETER Experiment Name: Zm_Drought_P Parameter: Timepoint (hr) Value: 48
  misc_feature: MA Experiment 20000479 PARAMETER Experiment Name: Zm_Drought_P Parameter: Tissue Value: Aerial
  misc_feature: MA Experiment 20000479 PARAMETER Experiment Name: Zm_Drought_P Parameter: Treatment Value: Drought vs. No Drought
  misc_feature: MA Experiment ID: 20000480 Result: Up-regulated in Transcription
  misc_feature: MA Experiment 20000480 PARAMETER Experiment Name: Zm_Drought_P Parameter: Age (day) Value: 11
  misc_feature: MA Experiment 20000480 PARAMETER Experiment Name: Zm_Drought_P Parameter: Organism Value: Zea mays
  misc_feature: MA Experiment 20000480 PARAMETER Experiment Name: Zm_Drought_P Parameter: Plant Line Value: 35A19
  misc_feature: MA Experiment 20000480 PARAMETER Experiment Name: Zm_Drought_P Parameter: Timepoint (hr) Value: 72
  misc_feature: MA Experiment 20000480 PARAMETER Experiment Name: Zm_Drought_P Parameter: Tissue Value: Aerial
  misc_feature: MA Experiment 20000480 PARAMETER Experiment Name: Zm_Drought_P Parameter: Treatment Value: Drought vs. No Drought
  misc_feature: MA Experiment ID: 20000626 Result: Up-regulated in Transcription
  misc_feature: MA Experiment 20000626 PARAMETER Experiment Name: Zm_Herbicide-Treatments_P Parameter: Timepoint (hr) Value: 12
  misc_feature: MA Experiment 20000626 PARAMETER Experiment Name: Zm_Herbicide-Treatments_P Parameter: Tissue Value: Aerial
  misc_feature: MA Experiment 20000626 PARAMETER Experiment Name: Zm_Herbicide-Treatments_P Parameter: Treatment Value: Roundup vs. No Treatment
  misc_feature: MA Experiment ID: 20000630 Result: Up-regulated in Transcription
  misc_feature: MA Experiment 20000630 PARAMETER Experiment Name: Zm_Herbicide-Treatments_P Parameter: Timepoint (hr) Value: 4
  misc_feature: MA Experiment 20000630 PARAMETER Experiment Name: Zm_Herbicide-Treatments_P Parameter: Tissue Value: Aerial
  misc_feature: MA Experiment 20000630 PARAMETER Experiment Name: Zm_Herbicide-Treatments_P Parameter: Treatment Value: Roundup vs. No Treatment
accagaaagatagacacgcacgtccgccgtctctgctccggttttcgctgtctcgctgccgtcctaggtttggagccaggtcaccggcgctaggagggcgtgaaatcgagtcgacggtcggcacccggcactcacgcgttctccacctactgctggcgctcctgtgaggcgacgccggaccggccaccccgcatgcgaacagcgcacggaccggccaccggtgtgactcctccatccaaggcttcagctccagaccgagccgccccgccaatcgccgtccgccgaaccaggcctaggaatttgttttcctcatcgaaagttactgcattgtattccatagaaatggctatggggttgattaatgctaatcctataatccatgagaaaaaagaaagacgcatccgacaggcaccagagaccacagatgaaaatgcggcagagtccatagaccagctggaaatatttgatcacattagagatataaaggatccagagcacccatactcactggaacagctgaatgtggtaactgaagactcaattgaactcaatgatgaaagcaatcatgtcagggttattttcaccccaacagtggagcactgcagtatggcaactattattggcctttgcatacgggtgaaacttgtacggagtctccctccttattacaaggtggacataagggttgcccctggatcacacgcaactgaagctgctgtgaataagcaactgaatgacaaagaacgtgttgcggctgcattggaaaacccaaacctactggacatggttgaagagtgcttatcaccaacattcgattgaggtctcagttgttgcacatctgggagccatggtgtttcatgttcagaagccacacaagcttattgccataggaattcactcctgaatattatatctgagggccatggtgtttcatgtgcatgatttttttttttgtcctccgtccctttgagttaatacaattgttatctttttggacatttgttggtgcttgtgacctccctgggcaaagggacctgtaatcagatcttgtgtagtagctttcagagcgtttccagtgccacgccattttgtggctgttgtaccccc

SEQ ID NO: 6980 - protein, 208 aa, Zea mays subsp. mays
  peptide (1)..(208): Ceres Seq. ID no. 12412323
  misc_feature (86)..(165): Pfam Name: Domain of unknown function DUF59 Pfam Description: Domain of unknown function DUF59
  misc_feature (51)..(207): Homolog of NCBI NO: 38347077 NR Description: OSJNBa0006A01.18 [Oryza sativa (japonica
  misc_feature (51)..(203): Homolog of NCBI NO: 28973748 NR Description: unknown protein [Arabidopsis thaliana]
  misc_feature (51)..(203): Homolog of NCBI NO: 15221347 NR Description: unknown protein; protein id: At1g68310.1 thaliana] >gi|20455357|sp|Q9C9G6|U195_ARATH Hypothetical protein
  misc_feature (90)..(207): Homolog of NCBI NO: 38567963 NR Description: OSJNBa0093F12.4 [Oryza sativa (japonica
  misc_feature (51)..(203): Homolog of NCBI NO: 34896898 NR Description: hypothetical protein [Oryza sativa (japonica group)] >gi|24899438|gb|AAN65008.1| hypothetical protein [Oryza
  misc_feature (57)..(204): Homolog of NCBI NO: 24662341 NR Description: CG7949-PA [Drosophila melanogaster]
  misc_feature (54)..(204): Homolog of NCBI NO: 21312046 NR Description: RIKEN cDNA 1110019N10 [Mus musculus]
  misc_feature (54)..(204): Homolog of NCBI NO: 27658356 NR Description: similar to RIKEN cDNA 1110019N10 [Mus musculus]
  misc_feature (54)..(204): Homolog of NCBI NO: 7706343 NR Description: CGI-128 protein [Homo sapiens]
  misc_feature (55)..(203): Homolog of NCBI NO: 39586567 NR Description: Hypothetical protein CBG21205 [Caenorhabditis
MRTAHGPATGVTPPSKASAPDRAAPPIAVRRTRPRNLFSSSKVTALYSIEMAMGLINANPIIHEKKERRIRQAPETTDENAAESIDQLEIFDHIRDIKDPEHPYSLEQLNVVTEDSIELNDESNHVRVIFTPTVEHCSMATIIGLCIRVKLVRSLPPYYKVDIRVAPGSHATEAAVNKQLNDKERVAAALENPNLLDMVEECLSPTFD

SEQ ID NO: 6981 - protein, 158 aa, Zea mays subsp. mays
  peptide (1)..(158): Ceres Seq. ID no. 12412324
  misc_feature (36)..(115): Pfam Name: Domain of unknown function DUF59 Pfam Description: Domain of unknown function DUF59
  misc_feature (1)..(157): Homolog of NCBI NO: 38347077 NR Description: OSJNBa0006A01.18 [Oryza sativa (japonica
  misc_feature (1)..(153): Homolog of NCBI NO: 28973748 NR Description: unknown protein [Arabidopsis thaliana]
  misc_feature (1)..(153): Homolog of NCBI NO: 15221347 NR Description: unknown protein; protein id: At1g68310.1 thaliana] >gi|20455357|sp|Q9C9G6|U195_ARATH Hypothetical protein
  misc_feature (40)..(157): Homolog of NCBI NO: 38567963 NR Description: OSJNBa0093F12.4 [Oryza sativa (japonica
  misc_feature (1)..(153): Homolog of NCBI NO: 34896898 NR Description: hypothetical protein [Oryza sativa (japonica group)] >gi|24899438|gb|AAN65008.1| hypothetical protein [Oryza
  misc_feature (7)..(154): Homolog of NCBI NO: 24662341 NR Description: CG7949-PA [Drosophila melanogaster]
  misc_feature (4)..(154): Homolog of NCBI NO: 21312046 NR Description: RIKEN cDNA 1110019N10 [Mus musculus]
  misc_feature (4)..(154): Homolog of NCBI NO: 27658356 NR Description: similar to RIKEN cDNA 1110019N10 [Mus musculus]
  misc_feature (4)..(154): Homolog of NCBI NO: 7706343 NR Description: CGI-128 protein [Homo sapiens]
  misc_feature (5)..(153): Homolog of NCBI NO: 39586567 NR Description: Hypothetical protein CBG21205 [Caenorhabditis
MAMGLINANPIIHEKKERRIRQAPETTDENAAESIDQLEIFDHIRDIKDPEHPYSLEQLNVVTEDSIELNDESNHVRVIFTPTVEHCSMATIIGLCIRVKLVRSLPPYYKVDIRVAPGSHATEAAVNKQLNDKERVAAALENPNLLDMVEECLSPTFD

SEQ ID NO: 6982 - protein, 156 aa, Zea mays subsp. mays
  peptide (1)..(156): Ceres Seq. ID no. 12412325
  misc_feature (34)..(113): Pfam Name: Domain of unknown function DUF59 Pfam Description: Domain of unknown function DUF59
  misc_feature (1)..(155): Homolog of NCBI NO: 38347077 NR Description: OSJNBa0006A01.18 [Oryza sativa (japonica
  misc_feature (1)..(151): Homolog of NCBI NO: 28973748 NR Description: unknown protein [Arabidopsis thaliana]
  misc_feature (1)..(151): Homolog of NCBI NO: 15221347 NR Description: unknown protein; protein id: At1g68310.1 thaliana] >gi|20455357|sp|Q9C9G6|U195_ARATH Hypothetical protein
  misc_feature (38)..(155): Homolog of NCBI NO: 38567963 NR Description: OSJNBa0093F12.4 [Oryza sativa (japonica
  misc_feature (1)..(151): Homolog of NCBI NO: 34896898 NR Description: hypothetical protein [Oryza sativa (japonica group)] >gi|24899438|gb|AAN65008.1| hypothetical protein [Oryza
  misc_feature (5)..(152): Homolog of NCBI NO: 24662341 NR Description: CG7949-PA [Drosophila melanogaster]
  misc_feature (2)..(152): Homolog of NCBI NO: 21312046 NR Description: RIKEN cDNA 1110019N10 [Mus musculus]
  misc_feature (2)..(152): Homolog of NCBI NO: 27658356 NR Description: similar to RIKEN cDNA 1110019N10 [Mus musculus]
  misc_feature (2)..(152): Homolog of NCBI NO: 7706343 NR Description: CGI-128 protein [Homo sapiens]
  misc_feature (3)..(151): Homolog of NCBI NO: 39586567 NR Description: Hypothetical protein CBG21205 [Caenorhabditis
MGLINANPIIHEKKERRIRQAPETTDENAAESIDQLEIFDHIRDIKDPEHPYSLEQLNVVTEDSIELNDESNHVRVIFTPTVEHCSMATIIGLCIRVKLVRSLPPYYKVDIRVAPGSHATEAAVNKQLNDKERVAAALENPNLLDMVEECLSPTFD

SEQ ID NO: 6983 - DNA, 1701 bp, Zea mays subsp. mays
  misc_feature (1)..(1701): Ceres Seq. ID no. 12412318
  misc_feature: MA Experiment ID: 108535 Result: Up-regulated in Transcription
  misc_feature: MA Experiment 108535 PARAMETER Experiment Name: Zm_Meristem_P Parameter: Age (day) Value: 8
  misc_feature: MA Experiment 108535 PARAMETER Experiment Name: Zm_Meristem_P Parameter: Organism Value: Zea mays
  misc_feature: MA Experiment 108535 PARAMETER Experiment Name: Zm_Meristem_P Parameter: Plant Line Value: 35A19
  misc_feature: MA Experiment 108535 PARAMETER Experiment Name: Zm_Meristem_P Parameter: Tissue Value: Root Meristem vs. Above Root Meristem
ctctctcgtgattctcccgtgccccggtctctgtctctagtggcgacgactgcgctgcgccgccgccctacccaggtgcccaagtgtctatcttcgggactgcgccggcgacgagcacccaccagagattgttggacctgggtctgcccctggattcgagcttggggccaagctaattcgagctctgagcatttgatttctagcatcttacatgcaaaaggctagtacttggaatccgagcaagatctaacccagacagtgcagtggcaggtcttttcagttcagcgcagcatatcaagattgtctctgttaatttgtgtatgagatcagttaactgataaggatatgtaaagaaccaatggtcagtaatttttacactccagattgtagtatcctctaagatggacggaagagaatcagtcttatggtaaatcctggtgaatattcatgggaggtcagcaagttctggcctgactaagtctggtaaaaaaagttgcttcatctcagatcatcaatgattcctggtggatgggcagcacagagaataggaggcagacgtgttctgctactgtcgtttgtattgtggtctatgatatgtggtttaatcccactcgaccccaacagatgggtgccaccgcaggagcgctctcgctcggtatctctcactacctcggggatgtatcttggtgcagctggtggcatgcttttcttcccaagtctggtgaagcacacgggaccccagtcagttttctttgtcgaagcagtgctgggagtagcatggtctgtcatatggttgaaattttccagcgacccacctcgtaccgatcttccaaaggtatcgatgccgaaagtggcatctcgggacatgattaaggcacaagcaggaggggttgttgcacctcgcacagtaaagatcccgtggcgaaggataatattcagtctacctgtttgggcaatcgttgtaaacaacttcaccttccactatgccctgtatgttcttatgaactggctccctacctattttgagcttggcctcaagcttagcctccaggacatgggttcctcaaagatgctcccttatttcaacatgttcattttctccaacatcggtggtgtgatcgccgatcacttgattacaaggaggattctgtctgttaccaagacgaggaagcttctgaacaccatcggattcatcatctcagcatttgcactcatggcccttcctttattcagcacaccctcaggcactgtaacgtgttcggcgatatccctcggttttcttgccctgggaagagcagggtttgccgtaaaccacatggatgttgctccgaagtttgcagggatagtgatgggcgtctctaacacggcggggacactggctgggattgttggtgtcggcctcactggtaatatcctggaggcggcgaaggcttctaacaaggatctaacggactcggaaacctggaaaacagtcttctttgttccggcatacctttgtatcttcagctctgtcatttttttaatcttttcgactggcgaaaagatattcgagtagaggatgattatatttttttgtttctcatttacagtgaggcaggatagcagaacgggaatctcacatgtacccgtagcatttttacaaaatttcatactgtatcatacacatgatctaaagctatgtcaggaaatctcacatttttc

SEQ ID NO: 6984 - protein, 346 aa, Zea mays subsp. mays
  peptide (1)..(346): Ceres Seq. ID no. 12412319
  misc_feature (37)..(345): Pfam Name: Sugar (and other) transporter Pfam Description: Sugar (and other) transporter
  misc_feature (37)..(346): Homolog of NCBI NO: 15241475 NR Description: Na+-dependent inorganic phosphate
  misc_feature (1)..(73): Homolog of NCBI NO: 15241475 NR Description: Na+-dependent inorganic phosphate
  misc_feature (36)..(346): Homolog of NCBI NO: 30678625 NR Description: expressed protein [Arabidopsis thaliana]
  misc_feature (36)..(346): Homolog of NCBI NO: 15227589 NR Description: putative Na+-dependent inorganic phosphate protein id: At2g29650.1, supported by cDNA: gi_17064975
  misc_feature (36)..(346): Homolog of NCBI NO: 17064976 NR Description: putative Na+-dependent inorganic phosphate
  misc_feature (36)..(346): Homolog of NCBI NO: 34903342 NR Description: unnamed protein product [Oryza sativa (japonica group)] >gi|6498428|dbj|BAA87831.1| unnamed protein product
  misc_feature (36)..(343): Homolog of NCBI NO: 23503776 NR Description: SI:PACKT73.2 (novel protein similar to human
  misc_feature (36)..(343): Homolog of NCBI NO: 9945322 NR Description: solute carrier family 17, member 7; Na- dependent inorganic phosphate cotransporter; vesicular
  misc_feature (36)..(343): Homolog of NCBI NO: 9966811 NR Description: differentiation-associated Na-dependent inorganic
  misc_feature (36)..(343): Homolog of NCBI NO: 21322234 NR Description: vesicular glutamate transporter 3 [Homo sapiens]
MIPGGWAAQRIGGRRVLLLSFVLWSMICGLIPLDPNRWVPPQERSRSVSLTTSGMYLGAAGGMLFFPSLVKHTGPQSVFFVEAVLGVAWSVIWLKFSSDPPRTDLPKVSMPKVASRDMIKAQAGGVVAPRTVKIPWRRIIFSLPVWAIVVNNFTFHYALYVLMNWLPTYFELGLKLSLQDMGSSKMLPYFNMFIFSNIGGVIADHLITRRILSVTKTRKLLNTIGFIISAFALMALPLFSTPSGTVTCSAISLGFLALGRAGFAVNHMDVAPKFAGIVMGVSNTAGTLAGIVGVGLTGNILEAAKASNKDLTDSETWKTVFFVPAYLCIFSSVIFLIFSTGEKIFE

SEQ ID NO: 6985 - protein, 321 aa, Zea mays subsp. mays
  peptide (1)..(321): Ceres Seq. ID no. 12412320
  misc_feature (12)..(320): Pfam Name: Sugar (and other) transporter Pfam Description: Sugar (and other) transporter
  misc_feature (11)..(318): Homolog of NCBI NO: 9945322 NR Description: solute carrier family 17, member 7; Na- dependent inorganic phosphate cotransporter; vesicular
  misc_feature (11)..(318): Homolog of NCBI NO: 9966811 NR Description: differentiation-associated Na-dependent inorganic
  misc_feature (1)..(48): Homolog of NCBI NO: 15241475 NR Description: Na+-dependent inorganic phosphate
  misc_feature (11)..(321): Homolog of NCBI NO: 15227589 NR Description: putative Na+-dependent inorganic phosphate protein id: At2g29650.1, supported by cDNA: gi_17064975
  misc_feature (11)..(321): Homolog of NCBI NO: 34903342 NR Description: unnamed protein product [Oryza sativa (japonica group)] >gi|6498428|dbj|BAA87831.1| unnamed protein product
  misc_feature (11)..(318): Homolog of NCBI NO: 23503776 NR Description: SI:PACKT73.2 (novel protein similar to human
  misc_feature (11)..(321): Homolog of NCBI NO: 17064976 NR Description: putative Na+-dependent inorganic phosphate
  misc_feature (11)..(321): Homolog of NCBI NO: 30678625 NR Description: expressed protein [Arabidopsis thaliana]
  misc_feature (12)..(321): Homolog of NCBI NO: 15241475 NR Description: Na+-dependent inorganic phosphate
  misc_feature (11)..(318): Homolog of NCBI NO: 21322234 NR Description: vesicular glutamate transporter 3 [Homo sapiens]
MICGLIPLDPNRWVPPQERSRSVSLTTSGMYLGAAGGMLFFPSLVKHTGPQSVFFVEAVLGVAWSVIWLKFSSDPPRTDLPKVSMPKVASRDMIKAQAGGVVAPRTVKIPWRRIIFSLPVWAIVVNNFTFHYALYVLMNWLPTYFELGLKLSLQDMGSSKMLPYFNMFIFSNIGGVIADHLITRRILSVTKTRKLLNTIGFIISAFALMALPLFSTPSGTVTCSAISLGFLALGRAGFAVNHMDVAPKFAGIVMGVSNTAGTLAGIVGVGLTGNILEAAKASNKDLTDSETWKTVFFVPAYLCIFSSVIFLIFSTGEKIFE

SEQ ID NO: 6986 - protein, 292 aa, Zea mays subsp. mays
  peptide (1)..(292): Ceres Seq. ID no. 12412321
  misc_feature (1)..(291): Pfam Name: Sugar (and other) transporter Pfam Description: Sugar (and other) transporter
  misc_feature (1)..(292): Homolog of NCBI NO: 15241475 NR Description: Na+-dependent inorganic phosphate
  misc_feature (1)..(19): Homolog of NCBI NO: 15241475 NR Description: Na+-dependent inorganic phosphate
  misc_feature (1)..(292): Homolog of NCBI NO: 30678625 NR Description: expressed protein [Arabidopsis thaliana]
  misc_feature (1)..(292): Homolog of NCBI NO: 15227589 NR Description: putative Na+-dependent inorganic phosphate protein id: At2g29650.1, supported by cDNA: gi_17064975
  misc_feature (1)..(292): Homolog of NCBI NO: 17064976 NR Description: putative Na+-dependent inorganic phosphate
  misc_feature (1)..(292): Homolog of NCBI NO: 34903342 NR Description: unnamed protein product [Oryza sativa (japonica group)] >gi|6498428|dbj|BAA87831.1| unnamed protein product
  misc_feature (1)..(289): Homolog of NCBI NO: 23503776 NR Description: SI:PACKT73.2 (novel protein similar to human
  misc_feature (1)..(289): Homolog of NCBI NO: 9945322 NR Description: solute carrier family 17, member 7; Na- dependent inorganic phosphate cotransporter; vesicular
  misc_feature (1)..(289): Homolog of NCBI NO: 9966811 NR Description: differentiation-associated Na-dependent inorganic
  misc_feature (1)..(289): Homolog of NCBI NO: 21322234 NR Description: vesicular glutamate transporter 3 [Homo sapiens]
MYLGAAGGMLFFPSLVKHTGPQSVFFVEAVLGVAWSVIWLKFSSDPPRTDLPKVSMPKVASRDMIKAQAGGVVAPRTVKIPWRRIIFSLPVWAIVVNNFTFHYALYVLMNWLPTYFELGLKLSLQDMGSSKMLPYFNMFIFSNIGGVIADHLITRRILSVTKTRKLLNTIGFIISAFALMALPLFSTPSGTVTCSAISLGFLALGRAGFAVNHMDVAPKFAGIVMGVSNTAGTLAGIVGVGLTGNILEAAKASNKDLTDSETWKTVFFVPAYLCIFSSVIFLIFSTGEKIFE

SEQ ID NO: 6987 - DNA, 1248 bp, Zea mays subsp. mays
  misc_feature (1)..(1248): Ceres Seq. ID no. 12412314
  misc_feature: MA Experiment ID: 108534 Result: Down-regulated in Transcription
  misc_feature: MA Experiment 108534 PARAMETER Experiment Name: Zm_4deg_Cold_P Parameter: Age (hr) Value: 8
  misc_feature: MA Experiment 108534 PARAMETER Experiment Name: Zm_4deg_Cold_P Parameter: Organism Value: Zea mays
  misc_feature: MA Experiment 108534 PARAMETER Experiment Name: Zm_4deg_Cold_P Parameter: Plant Line Value: 35A19
  misc_feature: MA Experiment 108534 PARAMETER Experiment Name: Zm_4deg_Cold_P Parameter: Temperature (deg C) Value: 4 vs. 22
  misc_feature: MA Experiment 108534 PARAMETER Experiment Name: Zm_4deg_Cold_P Parameter: Timepoint (hr) Value: 6
  misc_feature: MA Experiment 108534 PARAMETER Experiment Name: Zm_4deg_Cold_P Parameter: Tissue Value: Aerial
ctccatccccaatctcgggccttgactccttgagcacagcacaccgagtccaagccccgaagcctcctgaccttggttactgggtagcttctgcttggtactccatgcgaggacgacaatggcgatcgccgccgtccccgcctccctccccttcgtcctcctccctccgaggctgttccgcgggagggcggtgaggtggccgcgcccgattagggcttcggcgtcgaccaacgccgggtgacgttgcaggcggagagcggaagtttggggctctggtgagcagggtgggagatctgagggcgctcgtagcctccgtgcctcctgctgttgcttcgatgcagaaaaacattggcccaaattttgttgctggtttctgtgttagcatggcatttgtggctgctgctgcaagacagatctccttaagaagtcgagagcatgttagtaaaggttctgttgctgatcttgtaaggcgtggccagttaaaatcagggcaacgagggattgcaaagctccgtacatacgatgatcctttcaataacccgttagtaaagattgatgagggtacatctactgcacaaatgtttggcaaggagtaccgtttggctcctgttaggcttacgaaagagcagcaagaaatgcaccagaacaggagatcgcgtgcatatcagtggaaaaggccaaccgtgtttctcagggaaggtgattccttacctccagatgttgatccggatacagttagatggattccagcaaaccatcccttttctgctgcttcaagtgaagtggatgaggagaccgccaaacaaaatgtctaccaaaaggatggcatcccatcccgtgtcaaggctgagcatgaagctttgcgggcaaggctagaggcctcaaacgatgttgccagactcccttcggatccaaggagtattcagcgtaatgagagaccaatgagattgtcaggcgagccatctgaacatcttcagagctccaagtttgagaaccaagatagacaactggctactgagtctggtaaacatagctctgatggatgtttacaatcaaacgagccggaagggcaataaaaacgtgtgtatttcagctcttcgaagatatttgctttgttacgtagtgttatcagcttttaggttgtagctgtagatagagaagttttggaacagtgagcttatacggcttactggtttacatagtgagcagttaatatgcgagttgcttgacgtgttgggatcgaatggt

SEQ ID NO: 6988 - protein, 246 aa, Zea mays subsp. mays
  peptide (1)..(246): Ceres Seq. ID no. 12412315
  misc_feature (1)..(234): Homolog of NCBI NO: 15218043 NR Description: hypothetical protein; protein id: At1g20830.1 thaliana] >gi|26452945|dbj|BAC43549.1| unknown protein
  misc_feature (1)..(234): Homolog of NCBI NO: 25373024 NR Description: protein F2D10.35 [imported] - Arabidopsis >gi|8886939|gb|AAF80625.1|AC069251_18 F2D10.35 [Arabidopsis
MQKNIGPNFVAGFCVSMAFVAAAARQISLRSREHVSKGSVADLVRRGQLKSGQRGIAKLRTYDDPFNNPLVKIDEGTSTAQMFGKEYRLAPVRLTKEQQEMHQNRRSRAYQWKRPTVFLREGDSLPPDVDPDTVRWIPANHPFSAASSEVDEETAKQNVYQKDGIPSRVKAEHEALRARLEASNDVARLPSDPRSIQRNERPMRLSGEPSEHLQSSKFENQDRQLATESGKHSSDGCLQSNEPEGQ

SEQ ID NO: 6989 - protein, 230 aa, Zea mays subsp. mays
  peptide (1)..(230): Ceres Seq. ID no. 12412316
  misc_feature (1)..(218): Homolog of NCBI NO: 15218043 NR Description: hypothetical protein; protein id: At1g20830.1 thaliana] >gi|26452945|dbj|BAC43549.1| unknown protein
  misc_feature (1)..(218): Homolog of NCBI NO: 25373024 NR Description: protein F2D10.35 [imported] - Arabidopsis >gi|8886939|gb|AAF80625.1|AC069251_18 F2D10.35 [Arabidopsis
MAFVAAAARQISLRSREHVSKGSVADLVRRGQLKSGQRGIAKLRTYDDPFNNPLVKIDEGTSTAQMFGKEYRLAPVRLTKEQQEMHQNRRSRAYQWKRPTVFLREGDSLPPDVDPDTVRWIPANHPFSAASSEVDEETAKQNVYQKDGIPSRVKAEHEALRARLEASNDVARLPSDPRSIQRNERPMRLSGEPSEHLQSSKFENQDRQLATESGKHSSDGCLQSNEPEGQ

SEQ ID NO: 6990 - protein, 165 aa, Zea mays subsp. mays
  peptide (1)..(165): Ceres Seq. ID no. 12412317
  misc_feature (1)..(153): Homolog of NCBI NO: 15218043 NR Description: hypothetical protein; protein id: At1g20830.1 thaliana] >gi|26452945|dbj|BAC43549.1| unknown protein
  misc_feature (1)..(153): Homolog of NCBI NO: 25373024 NR Description: protein F2D10.35 [imported] - Arabidopsis >gi|8886939|gb|AAF80625.1|AC069251_18 F2D10.35 [Arabidopsis
MFGKEYRLAPVRLTKEQQEMHQNRRSRAYQWKRPTVFLREGDSLPPDVDPDTVRWIPANHPFSAASSEVDEETAKQNVYQKDGIPSRVKAEHEALRARLEASNDVARLPSDPRSIQRNERPMRLSGEPSEHLQSSKFENQDRQLATESGKHSSDGCLQSNEPEGQ

SEQ ID NO: 6991 - DNA, 1069 bp, Zea mays subsp. mays
  misc_feature (1)..(1069): Ceres Seq. ID no. 12408967
  misc_feature: MA Experiment ID: 108535 Result: Up-regulated in Transcription
  misc_feature: MA Experiment 108535 PARAMETER Experiment Name: Zm_Meristem_P Parameter: Age (day) Value: 8
  misc_feature: MA Experiment 108535 PARAMETER Experiment Name: Zm_Meristem_P Parameter: Organism Value: Zea mays
  misc_feature: MA Experiment 108535 PARAMETER Experiment Name: Zm_Meristem_P Parameter: Plant Line Value: 35A19
  misc_feature: MA Experiment 108535 PARAMETER Experiment Name: Zm_Meristem_P Parameter: Tissue Value: Root Meristem vs. Above Root Meristem
  misc_feature: MA Experiment ID: 108543 Result: Up-regulated in Transcription
  misc_feature: MA Experiment ID: 108544 Result: Down-regulated in Transcription
  misc_feature: MA Experiment ID: 108556 Result: Down-regulated in Transcription
  misc_feature: MA Experiment 108556 PARAMETER Experiment Name: Zm_Drought_P Parameter: Age (day) Value: 9
  misc_feature: MA Experiment 108556 PARAMETER Experiment Name: Zm_Drought_P Parameter: Organism Value: Zea mays
  misc_feature: MA Experiment 108556 PARAMETER Experiment Name: Zm_Drought_P Parameter: Plant Line Value: 35A19
  misc_feature: MA Experiment 108556 PARAMETER Experiment Name: Zm_Drought_P Parameter: Timepoint (hr) Value: 24
  misc_feature: MA Experiment 108556 PARAMETER Experiment Name: Zm_Drought_P Parameter: Tissue Value: Aerial
  misc_feature: MA Experiment 108556 PARAMETER Experiment Name: Zm_Drought_P Parameter: Treatment Value: Drought vs. No Drought
  misc_feature: MA Experiment ID: 108597 Result: Down-regulated in Transcription
  misc_feature: MA Experiment 108597 PARAMETER Experiment Name: Zm_100uM_ABA_P Parameter: Age (day) Value: 9
  misc_feature: MA Experiment 108597 PARAMETER Experiment Name: Zm_100uM_ABA_P Parameter: Organism Value: Zea mays
  misc_feature: MA Experiment 108597 PARAMETER Experiment Name: Zm_100uM_ABA_P Parameter: Plant Line Value: 35A19
  misc_feature: MA Experiment 108597 PARAMETER Experiment Name: Zm_100uM_ABA_P Parameter: Timepoint (hr) Value: 24
  misc_feature: MA Experiment 108597 PARAMETER Experiment Name: Zm_100uM_ABA_P Parameter: Tissue Value: Aerial
  misc_feature: MA Experiment 108597 PARAMETER Experiment Name: Zm_100uM_ABA_P Parameter: Treatment Value: 100uM ABA vs. No Treatment
  misc_feature: MA Experiment ID: 20000480 Result: Down-regulated in Transcription
  misc_feature: MA Experiment 20000480 PARAMETER Experiment Name: Zm_Drought_P Parameter: Age (day) Value: 11
  misc_feature: MA Experiment 20000480 PARAMETER Experiment Name: Zm_Drought_P Parameter: Organism Value: Zea mays
  misc_feature: MA Experiment 20000480 PARAMETER Experiment Name: Zm_Drought_P Parameter: Plant Line Value: 35A19
  misc_feature: MA Experiment 20000480 PARAMETER Experiment Name: Zm_Drought_P Parameter: Timepoint (hr) Value: 72
  misc_feature: MA Experiment 20000480 PARAMETER Experiment Name: Zm_Drought_P Parameter: Tissue Value: Aerial
  misc_feature: MA Experiment 20000480 PARAMETER Experiment Name: Zm_Drought_P Parameter: Treatment Value: Drought vs. No Drought
  misc_feature: MA Experiment ID: 20000487 Result: Down-regulated in Transcription
  misc_feature: MA Experiment 20000487 PARAMETER Experiment Name: Zm_50mM_NH4NO3_L_to_H_P Parameter: Organism Value: Zea mays
  misc_feature: MA Experiment 20000487 PARAMETER Experiment Name: Zm_50mM_NH4NO3_L_to_H_P Parameter: Timepoint (hr) Value: 4
  misc_feature: MA Experiment 20000487 PARAMETER Experiment Name: Zm_50mM_NH4NO3_L_to_H_P Parameter: Tissue Value: Leaves
  misc_feature: MA Experiment 20000487 PARAMETER Experiment Name: Zm_50mM_NH4NO3_L_to_H_P Parameter: Treatment Value: 50mM NH4NO3 vs. 100mM Mannitol
  misc_feature: MA Experiment ID: 20000535 Result: Up-regulated in Transcription
  misc_feature: MA Experiment 20000535 PARAMETER Experiment Name: Zm_Hybrid_Seed_Dev_P Parameter: DAP Value: 30 vs. 12
  misc_feature: MA Experiment 20000535 PARAMETER Experiment Name: Zm_Hybrid_Seed_Dev_P Parameter: Organism Value: Zea mays
  misc_feature: MA Experiment 20000535 PARAMETER Experiment Name: Zm_Hybrid_Seed_Dev_P Parameter: Plant Line Value: 35A19
  misc_feature: MA Experiment 20000535 PARAMETER Experiment Name: Zm_Hybrid_Seed_Dev_P Parameter: Tissue Value: Embryo vs. Unfert Floret
tccaagacccgcacgcgaacgccctccctgccgctccgccgtttcgcgtgggagtcgtttcgaaaaagtctgtttcgcgagcggtgaggactgaggagtgtggaggcctaaaaccatggcggcgagcatcgggatcatggacggcgcctacttcgtcggcaggggcgagatcctgcactggatcaatgcgaccctccagctctccctcgccaaggtcgaggaggcagcgtctggcgcagtgcagtgccagctcatggatatggttcaccctggagtgggtgcccatgcataaggtcaatttcgatgcgaagacagaatatgacatgatccagaactacaaggttcttcaggacgtgttcaacaagctgcggataggcaagaatattgaggtcaacaagcttgttaaaggacggccattggacaacttggagttccttcagtggttgaaaagatattgtgattctgtgaatggtggaattatgaacgaaaattacaaccctgtagaaaggaggtcaaagggatgcaaagaacgtgtctcaaagggttccaataagccatctaaatcattgcaagccaataggctttctggtgctgatccaacagatggaggccatggagttgggaaagtatgtaacactttttctgaagagcattacatagaacagattcagaagttgtctgaaaagattgcagacctgaaagtttctgtcgatagtactgaaaaagaaagagacttctacttctcgaagttgcgtgatattgagatactgtgtcaacggcctgagttagagcatctaccgatgactaaggcggtccggaagatactttatgcagctgatgcaaaggattcaccgctacctgaggcgaatgatataatcacaaagtcaccaagcttgttctcaaatgaaaccgagtgagatgtgcggctacatgagctaattttccatgattgatcgtcttagttctgagtctgtaaatgcgtaaaataacatttgacacaagtctttttgctgtcaaaaacagttttcctgtaagaacttgagtggggttaagtagttattacgcattc

SEQ ID NO: 6992 - protein, 304 aa, Zea mays subsp. mays
  peptide (1)..(304): Ceres Seq. ID no. 12408968
  misc_feature (240)..(285): Pfam Name: EB1-like C-terminal motif Pfam Description: EB1-like C-terminal motif
  misc_feature (93)..(302): Homolog of NCBI NO: 38344911 NR Description: OSJNBb0079B02.14 [Oryza sativa (japonica
  misc_feature (93)..(304): Homolog of NCBI NO: 32815913 NR Description: At3g47690 [Arabidopsis thaliana]
  misc_feature (93)..(304): Homolog of NCBI NO: 15241860 NR Description: microtubule-associated protein EB1-like protein; id: At5g62500.1, supported by cDNA: 112876. [Arabidopsis
  misc_feature (93)..(294): Homolog of NCBI NO: 37535740 NR Description: putative microtubule-associated protein [Oryza
  misc_feature (93)..(194): Homolog of NCBI NO: 26450360 NR Description: putative microtubule-associated protein EB1
  misc_feature (93)..(200): Homolog of NCBI NO: 15240262 NR Description: putative protein; protein id: At5g67270.1, by cDNA: 38358. [Arabidopsis thaliana]
  misc_feature (93)..(282): Homolog of NCBI NO: 29124955 NR Description: microtubule-associated protein EB1 [Chlamydomonas
  misc_feature (93)..(291): Homolog of NCBI NO: 12751131 NR Description: EBF3-S [Homo sapiens]
  misc_feature (228)..(304): Homolog of NCBI NO: 30692915 NR Description: expressed protein [Arabidopsis thaliana]
  misc_feature (93)..(279): Homolog of NCBI NO: 33946394 NR Description: EB1 [Coturnix coturnix]
QDPHANALPAAPPFRVGVVSKKSVSRAVRTEECGGLKPWRRASGSWTAPTSSAGARSCTGSMRPSSSPSPRSRRQRLAQCSASSWIWFTLEWVPMHKVNFDAKTEYDMIQNYKVLQDVFNKLRIGKNIEVNKLVKGRPLDNLEFLQWLKRYCDSVNGGIMNENYNPVERRSKGCKERVSKGSNKPSKSLQANRLSGADPTDGGHGVGKVCNTFSEEHYIEQIQKLSEKIADLKVSVDSTEKERDFYFSKLRDIEILCQRPELEHLPMTKAVRKILYAADAKDSPLPEANDIITKSPSLFSNETE

SEQ ID NO: 6993 - protein, 243 aa, Zea mays subsp. mays
  peptide (1)..(243): Ceres Seq. ID no. 12408969
  misc_feature (179)..(224): Pfam Name: EB1-like C-terminal motif Pfam Description: EB1-like C-terminal motif
  misc_feature (32)..(241): Homolog of NCBI NO: 38344911 NR Description: OSJNBb0079B02.14 [Oryza sativa (japonica
  misc_feature (32)..(243): Homolog of NCBI NO: 32815913 NR Description: At3g47690 [Arabidopsis thaliana]
  misc_feature (32)..(243): Homolog of NCBI NO: 15241860 NR Description: microtubule-associated protein EB1-like protein; id: At5g62500.1, supported by cDNA: 112876. [Arabidopsis
  misc_feature (32)..(233): Homolog of NCBI NO: 37535740 NR Description: putative microtubule-associated protein [Oryza
  misc_feature (32)..(133): Homolog of NCBI NO: 26450360 NR Description: putative microtubule-associated protein EB1
  misc_feature (32)..(139): Homolog of NCBI NO: 15240262 NR Description: putative protein; protein id: At5g67270.1, by cDNA: 38358. [Arabidopsis thaliana]
  misc_feature (32)..(221): Homolog of NCBI NO: 29124955 NR Description: microtubule-associated protein EB1 [Chlamydomonas
  misc_feature (32)..(230): Homolog of NCBI NO: 12751131 NR Description: EBF3-S [Homo sapiens]
  misc_feature (167)..(243): Homolog of NCBI NO: 30692915 NR Description: expressed protein [Arabidopsis thaliana]
  misc_feature (32)..(218): Homolog of NCBI NO: 33946394 NR Description: EB1 [Coturnix coturnix]
MRPSSSPSPRSRRQRLAQCSASSWIWFTLEWVPMHKVNFDAKTEYDMIQNYKVLQDVFNKLRIGKNIEVNKLVKGRPLDNLEFLQWLKRYCDSVNGGIMNENYNPVERRSKGCKERVSKGSNKPSKSLQANRLSGADPTDGGHGVGKVCNTFSEEHYIEQIQKLSEKIADLKVSVDSTEKERDFYFSKLRDIEILCQRPELEHLPMTKAVRKILYAADAKDSPLPEANDIITKSPSLFSNETE

SEQ ID NO: 6994 - protein, 210 aa, Zea mays subsp. mays
  peptide (1)..(210): Ceres Seq. ID no. 12408970
  misc_feature (146)..(191): Pfam Name: EB1-like C-terminal motif Pfam Description: EB1-like C-terminal motif
  misc_feature (1)..(208): Homolog of NCBI NO: 38344911 NR Description: OSJNBb0079B02.14 [Oryza sativa (japonica
  misc_feature (1)..(210): Homolog of NCBI NO: 32815913 NR Description: At3g47690 [Arabidopsis thaliana]
  misc_feature (1)..(210): Homolog of NCBI NO: 15241860 NR Description: microtubule-associated protein EB1-like protein; id: At5g62500.1, supported by cDNA: 112876. [Arabidopsis
  misc_feature (1)..(200): Homolog of NCBI NO: 37535740 NR Description: putative microtubule-associated protein [Oryza
  misc_feature (1)..(100): Homolog of NCBI NO: 26450360 NR Description: putative microtubule-associated protein EB1
  misc_feature (1)..(106): Homolog of NCBI NO: 15240262 NR Description: putative protein; protein id: At5g67270.1, by cDNA: 38358. [Arabidopsis thaliana]
  misc_feature (1)..(188): Homolog of NCBI NO: 29124955 NR Description: microtubule-associated protein EB1 [Chlamydomonas
  misc_feature (1)..(197): Homolog of NCBI NO: 12751131 NR Description: EBF3-S [Homo sapiens]
  misc_feature (134)..(210): Homolog of NCBI NO: 30692915 NR Description: expressed protein [Arabidopsis thaliana]
  misc_feature (1)..(185): Homolog of NCBI NO: 33946394 NR Description: EB1 [Coturnix coturnix]
MHKVNFDAKTEYDMIQNYKVLQDVFNKLRIGKNIEVNKLVKGRPLDNLEFLQWLKRYCDSVNGGIMNENYNPVERRSKGCKERVSKGSNKPSKSLQANRLSGADPTDGGHGVGKVCNTFSEEHYIEQIQKLSEKIADLKVSVDSTEKERDFYFSKLRDIEILCQRPELEHLPMTKAVRKILYAADAKDSPLPEANDIITKSPSLFSNETE

SEQ ID NO: 6995 - DNA, 1233 bp, Zea mays subsp. mays; identical to SEQ ID NO: 2545
  misc_feature (1)..(1233): Ceres Seq. ID no. 13564187
  misc_feature: MA Experiment ID: 108536 Result: Up-regulated in Transcription
  misc_feature: MA Experiment 108536 PARAMETER Experiment Name: Zm_Meristem_P Parameter: Age (day) Value: 8
  misc_feature: MA Experiment 108536 PARAMETER Experiment Name: Zm_Meristem_P Parameter: Organism Value: Zea mays
  misc_feature: MA Experiment 108536 PARAMETER Experiment Name: Zm_Meristem_P Parameter: Plant Line Value: 35A19
  misc_feature: MA Experiment 108536 PARAMETER Experiment Name: Zm_Meristem_P Parameter: Tissue Value: Shoot Meristem vs. Above Shoot Meristem

SEQ ID NO: 6996 - protein, 267 aa, Zea mays subsp. mays; identical to SEQ ID NO: 2546
  peptide (1)..(267): Ceres Seq. ID no. 13564188
  misc_feature (1)..(267): Homolog of NCBI NO: 11385533 NR Description: glutathione S-transferase GST 41 [Zea mays]
  misc_feature (1)..(267): Homolog of NCBI NO: 11385533 NR Description: glutathione S-transferase GST 41 [Zea mays]
  misc_feature (1)..(267): Homolog of NCBI NO: 11385533 NR Description: glutathione S-transferase GST 41 [Zea mays]

SEQ ID NO: 6997 - protein, 251 aa, Zea mays subsp. mays; identical to SEQ ID NO: 2547
  peptide (1)..(251): Ceres Seq. ID no. 13564189
  misc_feature (1)..(251): Homolog of NCBI NO: 11385533 NR Description: glutathione S-transferase GST 41 [Zea mays]
  misc_feature (1)..(251): Homolog of NCBI NO: 11385533 NR Description: glutathione S-transferase GST 41 [Zea mays]
  misc_feature (1)..(251): Homolog of NCBI NO: 11385533 NR Description: glutathione S-transferase GST 41 [Zea mays]

SEQ ID NO: 6998 - DNA, 1356 bp, Zea mays subsp. mays
  misc_feature (1)..(1356): Ceres Seq. ID no. 12344215
  misc_feature: MA Experiment ID: 108504 Result: Up-regulated in Transcription
  misc_feature: MA Experiment 108504 PARAMETER Experiment Name: Zm_Drought_P Parameter: Age (day) Value: 8
  misc_feature: MA Experiment 108504 PARAMETER Experiment Name: Zm_Drought_P Parameter: Organism Value: Zea mays
  misc_feature: MA Experiment 108504 PARAMETER Experiment Name: Zm_Drought_P Parameter: Plant Line Value: 35A19
  misc_feature: MA Experiment 108504 PARAMETER Experiment Name: Zm_Drought_P Parameter: Timepoint (hr) Value: 12
  misc_feature: MA Experiment 108504 PARAMETER Experiment Name: Zm_Drought_P Parameter: Tissue Value: Aerial
  misc_feature: MA Experiment 108504 PARAMETER Experiment Name: Zm_Drought_P Parameter: Treatment Value: Drought vs. No Drought
  misc_feature: MA Experiment ID: 108540 Result: Up-regulated in Transcription
  misc_feature: MA Experiment 108540 PARAMETER Experiment Name: Zm_20percent_PEG_P Parameter: Age (day) Value: 8
  misc_feature: MA Experiment 108540 PARAMETER Experiment Name: Zm_20percent_PEG_P Parameter: Organism Value: Zea mays
  misc_feature: MA Experiment 108540 PARAMETER Experiment Name: Zm_20percent_PEG_P Parameter: Plant Line Value: 35A19
  misc_feature: MA Experiment 108540 PARAMETER Experiment Name: Zm_20percent_PEG_P Parameter: Timepoint (hr) Value: 6
  misc_feature: MA Experiment 108540 PARAMETER Experiment Name: Zm_20percent_PEG_P Parameter: Tissue Value: Aerial
  misc_feature: MA Experiment 108540 PARAMETER Experiment Name: Zm_20percent_PEG_P Parameter: Treatment Value: 20percent PEG vs. No Treatment
  misc_feature: MA Experiment ID: 108556 Result: Up-regulated in Transcription
  misc_feature: MA Experiment 108556 PARAMETER Experiment Name: Zm_Drought_P Parameter: Age (day) Value: 9
  misc_feature: MA Experiment 108556 PARAMETER Experiment Name: Zm_Drought_P Parameter: Organism Value: Zea mays
  misc_feature: MA Experiment 108556 PARAMETER Experiment Name: Zm_Drought_P Parameter: Plant Line Value: 35A19
  misc_feature: MA Experiment 108556 PARAMETER Experiment Name: Zm_Drought_P Parameter: Timepoint (hr) Value: 24
  misc_feature: MA Experiment 108556 PARAMETER Experiment Name: Zm_Drought_P Parameter: Tissue Value: Aerial
  misc_feature: MA Experiment 108556 PARAMETER Experiment Name: Zm_Drought_P Parameter: Treatment Value: Drought vs. No Drought
  misc_feature: MA Experiment ID: 20000480 Result: Up-regulated in Transcription
  misc_feature: MA Experiment 20000480 PARAMETER Experiment Name: Zm_Drought_P Parameter: Age (day) Value: 11
  misc_feature: MA Experiment 20000480 PARAMETER Experiment Name: Zm_Drought_P Parameter: Organism Value: Zea mays
  misc_feature: MA Experiment 20000480 PARAMETER Experiment Name: Zm_Drought_P Parameter: Plant Line Value: 35A19
  misc_feature: MA Experiment 20000480 PARAMETER Experiment Name: Zm_Drought_P Parameter: Timepoint (hr) Value: 72
  misc_feature: MA Experiment 20000480 PARAMETER Experiment Name: Zm_Drought_P Parameter: Tissue Value: Aerial
  misc_feature: MA Experiment 20000480 PARAMETER Experiment Name: Zm_Drought_P Parameter: Treatment Value: Drought vs. No Drought
ctcagctcggtggaggccctcaagtccgacgcgctccgttcccctttccctttccgaagcttctcgaccccccatcccctccctgacatggccgacaacgcgaaggccgcggcggcgcatgcgaggccggagtcgtcgcaggaggaggaggaggactggaaggaggccgagggggacgtcgccgaagtcgaccgcgccgctaccaatggcgccggcgaggggggcgtgcccacagacaggccgatccgggtctacgccgacggcatctacgacctcttccacttcggccacgccaagtcgctggagcaggccaagaagtcgtttccaaacacatatcttcttgttggatgctgcaatgatgagttgacacataaattcaaaggaagaactgttatgactgaggatgagcgatatgagtcacttcgtcattgcaagtgggttgatgaagtcattccagatgctccatgggtggtgacagaagagttcttggataagcataacattgattttgttgctcatgattctctgccgtatgctgatgctagtggagctggtaacgatgtttatgaacatgtaaaaaagcttggtaagtttaaggagactcagcgcactgatgggatatcaacatcggacattataatgcggattgttaaagattataatgagtatgttatgcggaatctggccaggggctacactagaaaggatcttggtgttagttatgtcaaggaaaaacgactgcgagtgaacatgggacttaaaaacctgcgtgacagagtgaaacagcaccaagaaaaagtaggggagaagtggagcacggttgcaaaactccaggaagagtgggtggaaaatgcagaccgctgggtggctggtttcttagagaagtttgaggaagggtgccactcaatggggacagccatcaaggagaggatccaggagaggctcatcaaggcacaatccagcgactttggcagcctcctacagtacgacagctacgattctgatgaagccaaagaaaacgacgaggacgaagacgaagatgaactctttgaagacgtcaaggaatagcacctccgtacatatacaatggttttgtagctgcaaattgtgttgtgagtcagttgcctctctctggttggtgatctttatatatggtctcaaaggtaggtcaggttgcaatgtttgtagctgctcttggtgtttgttcaggcaacgcatggttgtaaaagctgtggaaagactcttgtgcagtcaaggatacagattccgatggttacctttgggttagaacatatacggctgtaaaattggaagtcgaggtggttaaaactctgatatcttgtctgttttctttcc

SEQ ID NO: 6999 - protein, 355 aa, Zea mays subsp. mays
  peptide (1)..(355): Ceres Seq. ID no. 12344216
  misc_feature (56)..(355): Homolog of NCBI NO: 7488484 NR Description: probable choline-phosphate cytidylyltransferase
  misc_feature (69)..(355): Homolog of NCBI NO: 7488483 NR Description: probable choline-phosphate cytidylyltransferase
  misc_feature (66)..(355): Homolog of NCBI NO: 15225218 NR Description: putative phospholipid cytidylyltransferase; id: At2g32260.1 [Arabidopsis thaliana] >gi|25288639|pir||H84730
  misc_feature (73)..(355): Homolog of NCBI NO: 7488446 NR Description: choline-phosphate cytidylyltransferase (EC
  misc_feature (79)..(352): Homolog of NCBI NO: 7488791 NR Description: choline-phosphate cytidylyltransferase (EC - garden pea >gi|1657382|emb|CAA70317.1| cholinephosphate
  misc_feature (73)..(355): Homolog of NCBI NO: 7488485 NR Description: probable choline-phosphate cytidylyltransferase
  misc_feature (58)..(355): Homolog of NCBI NO: 1236978 NR Description: CTP:phosphocholine cytidylyltransferase
  misc_feature (71)..(348): Homolog of NCBI NO: 21668498 NR Description: CTP:phosphorylcholine cytidylyltransferase thaliana] >gi|21668500|dbj|BAC01277.1| CTP:phosphorylcholine
  misc_feature (78)..(328): Homolog of NCBI NO: 37537166 NR Description: putative cholinephosphate cytidylyltransferase
  misc_feature (75)..(320): Homolog of NCBI NO: 3153239 NR Description: CTP:phosphocholine cytidylyltransferase b [Homo
LSSVEALKSDALRSPFPFRSFSTPHPLPDMADNAKAAAAHARPESSQEEEEDWKEAEGDVAEVDRAATNGAGEGGVPTDRPIRVYADGIYDLFHFGHAKSLEQAKKSFPNTYLLVGCCNDELTHKFKGRTVMTEDERYESLRHCKWVDEVIPDAPWVVTEEFLDKHNIDFVAHDSLPYADASGAGNDVYEHVKKLGKFKETQRTDGISTSDIIMRIVKDYNEYVMRNLARGYTRKDLGVSYVKEKRLRVNMGLKNLRDRVKQHQEKVGEKWSTVAKLQEEWVENADRWVAGFLEKFEEGCHSMGTAIKERIQERLIKAQSSDFGSLLQYDSYDSDEAKENDEDEDEDELFEDVKE

SEQ ID NO: 7000 - protein, 326 aa, Zea mays subsp. mays
  peptide (1)..(326): Ceres Seq. ID no. 12344217
  misc_feature (27)..(326): Homolog of NCBI NO: 7488484 NR Description: probable choline-phosphate cytidylyltransferase
  misc_feature (40)..(326): Homolog of NCBI NO: 7488483 NR Description: probable choline-phosphate cytidylyltransferase
  misc_feature (37)..(326): Homolog of NCBI NO: 15225218 NR Description: putative phospholipid cytidylyltransferase; id: At2g32260.1 [Arabidopsis thaliana] >gi|25288639|pir||H84730
  misc_feature (44)..(326): Homolog of NCBI NO: 7488446 NR Description: choline-phosphate cytidylyltransferase (EC
  misc_feature (50)..(323): Homolog of NCBI NO: 7488791 NR Description: choline-phosphate cytidylyltransferase (EC - garden pea >gi|1657382|emb|CAA70317.1| cholinephosphate
  misc_feature (44)..(326): Homolog of NCBI NO: 7488485 NR Description: probable choline-phosphate cytidylyltransferase
  misc_feature (29)..(326): Homolog of NCBI NO: 1236978 NR Description: CTP:phosphocholine cytidylyltransferase
  misc_feature (42)..(319): Homolog of NCBI NO: 21668498 NR Description: CTP:phosphorylcholine cytidylyltransferase thaliana] >gi|21668500|dbj|BAC01277.1| CTP:phosphorylcholine
  misc_feature (49)..(299): Homolog of NCBI NO: 37537166 NR Description: putative cholinephosphate cytidylyltransferase
  misc_feature (46)..(291): Homolog of NCBI NO: 3153239 NR Description: CTP:phosphocholine cytidylyltransferase b [Homo
MADNAKAAAAHARPESSQEEEEDWKEAEGDVAEVDRAATNGAGEGGVPTDRPIRVYADGIYDLFHFGHAKSLEQAKKSFPNTYLLVGCCNDELTHKFKGRTVMTEDERYESLRHCKWVDEVIPDAPWVVTEEFLDKHNIDFVAHDSLPYADASGAGNDVYEHVKKLGKFKETQRTDGISTSDIIMRIVKDYNEYVMRNLARGYTRKDLGVSYVKEKRLRVNMGLKNLRDRVKQHQEKVGEKWSTVAKLQEEWVENADRWVAGFLEKFEEGCHSMGTAIKERIQERLIKAQSSDFGSLLQYDSYDSDEAKENDEDEDEDELFEDVKE

SEQ ID NO: 7001 - protein, 224 aa, Zea mays subsp. mays
  peptide (1)..(224): Ceres Seq. ID no. 12344218
  misc_feature (1)..(224): Homolog of NCBI NO: 7488484 NR Description: probable choline-phosphate cytidylyltransferase
  misc_feature (1)..(224): Homolog of NCBI NO: 7488483 NR Description: probable choline-phosphate cytidylyltransferase
  misc_feature (1)..(224): Homolog of NCBI NO: 15225218 NR Description: putative phospholipid cytidylyltransferase; id: At2g32260.1 [Arabidopsis thaliana] >gi|25288639|pir||H84730
  misc_feature (1)..(224): Homolog of NCBI NO: 7488446 NR Description: choline-phosphate cytidylyltransferase (EC
  misc_feature (1)..(221): Homolog of NCBI NO: 7488791 NR Description: choline-phosphate cytidylyltransferase (EC - garden pea >gi|1657382|emb|CAA70317.1| cholinephosphate
  misc_feature (1)..(224): Homolog of NCBI NO: 7488485 NR Description: probable choline-phosphate cytidylyltransferase
  misc_feature (1)..(224): Homolog of NCBI NO: 1236978 NR Description: CTP:phosphocholine cytidylyltransferase
  misc_feature (1)..(217): Homolog of NCBI NO: 21668498 NR Description: CTP:phosphorylcholine cytidylyltransferase thaliana] >gi|21668500|dbj|BAC01277.1| CTP:phosphorylcholine
  misc_feature (1)..(197): Homolog of NCBI NO: 37537166 NR Description: putative cholinephosphate cytidylyltransferase
  misc_feature (1)..(189): Homolog of NCBI NO: 3153239 NR Description: CTP:phosphocholine cytidylyltransferase b [Homo
MTEDERYESLRHCKWVDEVIPDAPWVVTEEFLDKHNIDFVAHDSLPYADASGAGNDVYEHVKKLGKFKETQRTDGISTSDIIMRIVKDYNEYVMRNLARGYTRKDLGVSYVKEKRLRVNMGLKNLRDRVKQHQEKVGEKWSTVAKLQEEWVENADRWVAGFLEKFEEGCHSMGTAIKERIQERLIKAQSSDFGSLLQYDSYDSDEAKENDEDEDEDELFEDVKE

SEQ ID NO: 7002 - DNA, 1596 bp, Zea mays subsp. mays
  misc_feature (1)..(1596): Ceres Seq. ID no. 12405494
  misc_feature: MA Experiment ID: 108504 Result: Up-regulated in Transcription
  misc_feature: MA Experiment 108504 PARAMETER Experiment Name: Zm_Drought_P Parameter: Age (day) Value: 8
  misc_feature: MA Experiment 108504 PARAMETER Experiment Name: Zm_Drought_P Parameter: Organism Value: Zea mays
  misc_feature: MA Experiment 108504 PARAMETER Experiment Name: Zm_Drought_P Parameter: Plant Line Value: 35A19
  misc_feature: MA Experiment 108504 PARAMETER Experiment Name: Zm_Drought_P Parameter: Timepoint (hr) Value: 12
  misc_feature: MA Experiment 108504 PARAMETER Experiment Name: Zm_Drought_P Parameter: Tissue Value: Aerial
  misc_feature: MA Experiment 108504 PARAMETER Experiment Name: Zm_Drought_P Parameter: Treatment Value: Drought vs. No Drought
  misc_feature: MA Experiment ID: 108522 Result: Up-regulated in Transcription
  misc_feature: MA Experiment 108522 PARAMETER Experiment Name: Zm_42deg_Heat_P Parameter: Age (day) Value: 8
  misc_feature: MA Experiment 108522 PARAMETER Experiment Name: Zm_42deg_Heat_P Parameter: Organism Value: Zea mays
  misc_feature: MA Experiment 108522 PARAMETER Experiment Name: Zm_42deg_Heat_P Parameter: Plant Line Value: 35A19
  misc_feature: MA Experiment 108522 PARAMETER Experiment Name: Zm_42deg_Heat_P Parameter: Temperature (deg C) Value: 42 vs. 22
  misc_feature: MA Experiment 108522 PARAMETER Experiment Name: Zm_42deg_Heat_P Parameter: Timepoint (hr) Value: 1
  misc_feature: MA Experiment 108522 PARAMETER Experiment Name: Zm_42deg_Heat_P Parameter: Tissue Value: Aerial
  misc_feature: MA Experiment ID: 108523 Result: Up-regulated in Transcription
  misc_feature: MA Experiment 108523 PARAMETER Experiment Name: Zm_42deg_Heat_P Parameter: Age (day) Value: 8
  misc_feature: MA Experiment 108523 PARAMETER Experiment Name: Zm_42deg_Heat_P Parameter: Organism Value: Zea mays
  misc_feature: MA Experiment 108523 PARAMETER Experiment Name: Zm_42deg_Heat_P Parameter: Plant Line Value: 35A19
  misc_feature: MA Experiment 108523 PARAMETER Experiment Name: Zm_42deg_Heat_P Parameter: Temperature (deg C) Value: 42 vs. 22
  misc_feature: MA Experiment 108523 PARAMETER Experiment Name: Zm_42deg_Heat_P Parameter: Timepoint (hr) Value: 6
  misc_feature: MA Experiment 108523 PARAMETER Experiment Name: Zm_42deg_Heat_P Parameter: Tissue Value: Aerial
  misc_feature: MA Experiment ID: 108527 Result: Up-regulated in Transcription
  misc_feature: MA Experiment 108527 PARAMETER Experiment Name: Zm_5mM_NO_P Parameter: Age (day) Value: 8
  misc_feature: MA Experiment 108527 PARAMETER Experiment Name: Zm_5mM_NO_P Parameter: Organism Value: Zea mays
  misc_feature: MA Experiment 108527 PARAMETER Experiment Name: Zm_5mM_NO_P Parameter: Plant Line Value: 35A19
  misc_feature: MA Experiment 108527 PARAMETER Experiment Name: Zm_5mM_NO_P Parameter: Timepoint (hr) Value: 6
  misc_feature: MA Experiment 108527 PARAMETER Experiment Name: Zm_5mM_NO_P Parameter: Tissue Value: Aerial
  misc_feature: MA Experiment 108527 PARAMETER Experiment Name: Zm_5mM_NO_P Parameter: Treatment Value: 5mM NO vs. No Treatment
  misc_feature: MA Experiment ID: 108528 Result: Down-regulated in Transcription
  misc_feature: MA Experiment 108528 PARAMETER Experiment Name: Zm_Imbibed_Seeds_P Parameter: Age (day) Value: 5 vs. 2
  misc_feature: MA Experiment 108528 PARAMETER Experiment Name: Zm_Imbibed_Seeds_P Parameter: Organism Value: Zea mays
  misc_feature: MA Experiment 108528 PARAMETER Experiment Name: Zm_Imbibed_Seeds_P Parameter: Plant Line Value: 35A19
  misc_feature: MA Experiment 108528 PARAMETER Experiment Name: Zm_Imbibed_Seeds_P Parameter: Tissue Value: Aerial vs. Embryo
  misc_feature: MA Experiment ID: 108535 Result: Down-regulated in Transcription
  misc_feature: MA Experiment 108535 PARAMETER Experiment Name: Zm_Meristem_P Parameter: Age (day) Value: 8
  misc_feature: MA Experiment 108535 PARAMETER Experiment Name: Zm_Meristem_P Parameter: Organism Value: Zea mays
  misc_feature: MA Experiment 108535 PARAMETER Experiment Name: Zm_Meristem_P Parameter: Plant Line Value: 35A19
  misc_feature: MA Experiment 108535 PARAMETER Experiment Name: Zm_Meristem_P Parameter: Tissue Value: Root Meristem vs. Above Root Meristem
  misc_feature: MA Experiment ID: 108536 Result: Up-regulated in Transcription
  misc_feature: MA Experiment 108536 PARAMETER Experiment Name: Zm_Meristem_P Parameter: Age (day) Value: 8
  misc_feature: MA Experiment 108536 PARAMETER Experiment Name: Zm_Meristem_P Parameter: Organism Value: Zea mays
  misc_feature: MA Experiment 108536 PARAMETER Experiment Name: Zm_Meristem_P Parameter: Plant Line Value: 35A19
  misc_feature: MA Experiment 108536 PARAMETER Experiment Name: Zm_Meristem_P Parameter: Tissue Value: Shoot Meristem vs. Above Shoot Meristem
  misc_feature: MA Experiment ID: 108548 Result: Down-regulated in Transcription
  misc_feature: MA Experiment 108548 PARAMETER Experiment Name: Zm_20uM_KNO3_H-to-L_P Parameter: Age (day) Value: 11
  misc_feature: MA Experiment 108548 PARAMETER Experiment Name: Zm_20uM_KNO3_H-to-L_P Parameter: Organism Value: Zea mays
  misc_feature: MA Experiment 108548 PARAMETER Experiment Name: Zm_20uM_KNO3_H-to-L_P Parameter: Plant Line Value: 35A19
  misc_feature: MA Experiment 108548 PARAMETER Experiment Name: Zm_20uM_KNO3_H-to-L_P Parameter: Timepoint (hr) Value: 4
  misc_feature: MA Experiment 108548 PARAMETER Experiment Name: Zm_20uM_KNO3_H-to-L_P Parameter: Tissue Value: Roots
  misc_feature: MA Experiment 108548 PARAMETER Experiment Name: Zm_20uM_KNO3_H-to-L_P Parameter: Treatment Value: 20uM KNO3 vs. 60mM KNO3
  misc_feature: MA Experiment ID: 108556 Result: Up-regulated in Transcription
  misc_feature: MA Experiment 108556 PARAMETER Experiment Name: Zm_Drought_P Parameter: Age (day) Value: 9
  misc_feature: MA Experiment 108556 PARAMETER Experiment Name: Zm_Drought_P Parameter: Organism Value: Zea mays
  misc_feature: MA Experiment 108556 PARAMETER Experiment Name: Zm_Drought_P Parameter: Plant Line Value: 35A19
  misc_feature: MA Experiment 108556 PARAMETER Experiment Name: Zm_Drought_P Parameter: Timepoint (hr) Value: 24
  misc_feature: MA Experiment 108556 PARAMETER Experiment Name: Zm_Drought_P Parameter: Tissue Value: Aerial
  misc_feature: MA Experiment 108556 PARAMETER Experiment Name: Zm_Drought_P Parameter: Treatment Value: Drought vs. No Drought
  misc_feature: MA Experiment ID: 108597 Result: Up-regulated in Transcription
  misc_feature: MA Experiment 108597 PARAMETER Experiment Name: Zm_100uM_ABA_P Parameter: Age (day) Value: 9
  misc_feature: MA Experiment 108597 PARAMETER Experiment Name: Zm_100uM_ABA_P Parameter: Organism Value: Zea mays
  misc_feature: MA Experiment 108597 PARAMETER Experiment Name: Zm_100uM_ABA_P Parameter: Plant Line Value: 35A19
  misc_feature: MA Experiment 108597 PARAMETER Experiment Name: Zm_100uM_ABA_P Parameter: Timepoint (hr) Value: 24
  misc_feature: MA Experiment 108597 PARAMETER Experiment Name: Zm_100uM_ABA_P Parameter: Tissue Value: Aerial
  misc_feature: MA Experiment 108597 PARAMETER Experiment Name: Zm_100uM_ABA_P Parameter: Treatment Value: 100uM ABA vs. No Treatment
  misc_feature: MA Experiment ID: 108689 Result: Up-regulated in Transcription
  misc_feature: MA Experiment 108689 PARAMETER Experiment Name: Zm_Drought_Roots_P Parameter: Age (day) Value: 9
  misc_feature: MA Experiment 108689 PARAMETER Experiment Name: Zm_Drought_Roots_P Parameter: Organism Value: Zea mays
  misc_feature: MA Experiment 108689 PARAMETER Experiment Name: Zm_Drought_Roots_P Parameter: Plant Line Value: 35A19
  misc_feature: MA Experiment 108689 PARAMETER Experiment Name: Zm_Drought_Roots_P Parameter: Timepoint (hr) Value: 24
  misc_feature: MA Experiment 108689 PARAMETER Experiment Name: Zm_Drought_Roots_P Parameter: Tissue Value: Roots
  misc_feature: MA Experiment 108689 PARAMETER Experiment Name: Zm_Drought_Roots_P Parameter: Treatment Value: Drought vs. No Drought
  misc_feature: MA Experiment ID: 20000479 Result: Up-regulated in Transcription
  misc_feature: MA Experiment 20000479 PARAMETER Experiment Name: Zm_Drought_P Parameter: Age (day) Value: 10
  misc_feature: MA Experiment 20000479 PARAMETER Experiment Name: Zm_Drought_P Parameter: Organism Value: Zea mays
  misc_feature: MA Experiment 20000479 PARAMETER Experiment Name: Zm_Drought_P Parameter: Plant Line Value: 35A19
  misc_feature: MA Experiment 20000479 PARAMETER Experiment Name: Zm_Drought_P Parameter: Timepoint (hr) Value: 48
  misc_feature: MA Experiment 20000479 PARAMETER Experiment Name: Zm_Drought_P Parameter: Tissue Value: Aerial
  misc_feature: MA Experiment 20000479 PARAMETER Experiment Name: Zm_Drought_P Parameter: Treatment Value: Drought vs. No Drought
  misc_feature: MA Experiment ID: 20000480 Result: Up-regulated in Transcription
  misc_feature: MA Experiment 20000480 PARAMETER Experiment Name: Zm_Drought_P Parameter: Age (day) Value: 11
  misc_feature: MA Experiment 20000480 PARAMETER Experiment Name: Zm_Drought_P Parameter: Organism Value: Zea mays
  misc_feature: MA Experiment 20000480 PARAMETER Experiment Name: Zm_Drought_P Parameter: Plant Line Value: 35A19
  misc_feature: MA Experiment 20000480 PARAMETER Experiment Name: Zm_Drought_P Parameter: Timepoint (hr) Value: 72
  misc_feature: MA Experiment 20000480 PARAMETER Experiment Name: Zm_Drought_P Parameter: Tissue Value: Aerial
  misc_feature: MA Experiment 20000480 PARAMETER Experiment Name: Zm_Drought_P Parameter: Treatment Value: Drought vs. No Drought
  misc_feature: MA Experiment ID: 20000492 Result: Down-regulated in Transcription
  misc_feature: MA Experiment 20000492 PARAMETER Experiment Name: Zm_Hybrid_Seed_Dev_P Parameter: DAP Value: 12
  misc_feature: MA Experiment 20000492 PARAMETER Experiment Name: Zm_Hybrid_Seed_Dev_P Parameter: Organism Value: Zea mays
  misc_feature: MA Experiment 20000492 PARAMETER Experiment Name: Zm_Hybrid_Seed_Dev_P Parameter: Plant Line Value: 35A19
  misc_feature: MA Experiment 20000492 PARAMETER Experiment Name: Zm_Hybrid_Seed_Dev_P Parameter: Tissue Value: Fert Kernel vs. Unfert Floret
  misc_feature: MA Experiment ID: 20000626 Result: Down-regulated in Transcription
  misc_feature: MA Experiment 20000626 PARAMETER Experiment Name: Zm_Herbicide-Treatments_P Parameter: Timepoint (hr) Value: 12
  misc_feature: MA Experiment 20000626 PARAMETER Experiment Name: Zm_Herbicide-Treatments_P Parameter: Tissue Value: Aerial
  misc_feature: MA Experiment 20000626 PARAMETER Experiment Name: Zm_Herbicide-Treatments_P Parameter: Treatment Value: Roundup vs. No Treatment
  misc_feature: MA Experiment ID: 20000629 Result: Down-regulated in Transcription
  misc_feature: MA Experiment 20000629 PARAMETER Experiment Name: Zm_Herbicide-Treatments_P Parameter: Timepoint (hr) Value: 12
  misc_feature: MA Experiment 20000629 PARAMETER Experiment Name: Zm_Herbicide-Treatments_P Parameter: Tissue Value: Aerial
  misc_feature: MA Experiment 20000629 PARAMETER Experiment Name: Zm_Herbicide-Treatments_P Parameter: Treatment Value: Trimec vs. No Treatment
  misc_feature: MA Experiment ID: 20000630 Result: Up-regulated in Transcription
  misc_feature: MA Experiment 20000630 PARAMETER Experiment Name: Zm_Herbicide-Treatments_P Parameter: Timepoint (hr) Value: 4
  misc_feature: MA Experiment 20000630 PARAMETER Experiment Name: Zm_Herbicide-Treatments_P Parameter: Tissue Value: Aerial
  misc_feature: MA Experiment 20000630 PARAMETER Experiment Name: Zm_Herbicide-Treatments_P Parameter: Treatment Value: Roundup vs. No Treatment
gaccgtgctggaaacttctaaccaaaacccctaatgtctcgaggtggcgcaccccaacaaactggctccgcctccttcctcctcccctccggcctccgccgctgccttcttttccccgtgcgcatagtcgctcgcagaggcgccgacatcacttcgtccggaccggaaacacgcacgaagtgaggaccagcaccaaacaccgcgccgcttctcctatatttgttcctctcccggagccgcatcgtgtgtaagcgtgtggcggatccatggcagcggcggcggatacctcggaggcgtccgcggcaggaatcgcgctcgcagaggccaatatcaactgggagaggttggacaagacgaggtttcatgtgattggagctatcctgttcacggcccagcaaggtgctctgcacccaacagctgttgtgaagactaggatgcaggttgctgaaggtgggcttgcacatatgtctgggtttgctgtttttaggaggatattgagaagcgatggcatccctggcattttcagaggatttggcaccgctgctgttggagctctgcctgggcgagtgctagctctaacatcactggagatctctaaagaaatgacatttaagtattgtgaacattttgatctgtcagaggcgtcacaaattgctatagcaaatggcattgcaggtctaatgtcgagtatctgttcatgctcatactttgtgcctctagatgtgatttgccaaaggctcatggttcaaggattgccagggatggcaacatacaggggcccattcgatgtgataaataaggttgtcagaacagaagggatccgggggctttatcgaggttttggtatcactatgttgactcagtcgccagcttcagccctttggtggagtgcatatggtggtgctcaacatgctatttggaggagtttgggttatggaaatgactcacaaacaaaaccatctcaatcagaacttgttgttgtccaagtaacagcaggaacaattgctggtgcttgctcgtcgattatcaccactccagtagataccatcaagactcggcttcaggttatggacaactatggtaaaggcaggccttcagtcatgaaaactaccaggctgctgcttgatgaagatggctggaggggattctatagaggttttggaccgaggtttcttaacatgtctgtctggggcacatcaatgatcgtgacatatgagctcataaaaaggctatccgtgaagtctgaatgacacattttggtggattctcaactaaggtgatttactgttcaaaatcatctatacagatataggcaatcaagtcagtttgcctcgcgaagagtataggcgagtattatgatcgggtgggatgcagaattatggtttagttgcataggataacatgcttctgtatgacacttgcgatgtatatatttttgctaaagagccctcctttcaggatgtttgtagccagcttcttttggatgtaacagatggaggccaagacgcctgttctgtctaatgaggcacattatatgtagctgtactattcgtggtccaacaaaattttggcaaagaactctgcatccttttcgtt

SEQ ID NO: 7003 - protein, 327 aa, Zea mays subsp. mays
  peptide (1)..(327): Ceres Seq. ID no. 12405495
  misc_feature (74)..(327): Homolog of NCBI NO: 34894824 NR Description: P0554D10.15 [Oryza sativa (japonica
  misc_feature (6)..(322): Homolog of NCBI NO: 21553961 NR Description: putative mitochondrial carrier protein
  misc_feature (6)..(322): Homolog of NCBI NO: 18417739 NR Description: mitochondrial carrier protein family; protein id: supported by cDNA: 18738., supported by cDNA: gi_18252182, by cDNA: gi_20258916 [Arabidopsis thaliana]
  misc_feature (6)..(219): Homolog of NCBI NO: 11358653 NR Description: probable mitochondrial carrier protein - thaliana >gi|9755609|emb|CAC01763.1| putative mitochondrial
  misc_feature (219)..(322): Homolog of NCBI NO: 11358653 NR Description: probable mitochondrial carrier protein - thaliana >gi|9755609|emb|CAC01763.1| putative mitochondrial
  misc_feature (6)..(327): Homolog of NCBI NO: 21326111 NR Description: putative mitochondrial carrier protein [Sorghum
  misc_feature (19)..(327): Homolog of NCBI NO: 12061241 NR Description: 36I5.1 [Oryza sativa (japonica cultivar-group)]
  misc_feature (6)..(327): Homolog of NCBI NO: 18496651 NR Description: putative mitochondrial carrier protein [Triticum
  misc_feature (6)..(327): Homolog of NCBI NO: 12278522 NR Description: putative mitochondrial carrier protein [Hordeum
  misc_feature (7)..(327): Homolog of NCBI NO: 21594326 NR Description: mitochondrial carrier-like protein [Arabidopsis
MAAAADTSEASAAGIALAEANINWERLDKTRFHVIGAILFTAQQGALHPTAVVKTRMQVAEGGLAHMSGFAVFRRILRSDGIPGIFRGFGTAAVGALPGRVLALTSLEISKEMTFKYCEHFDLSEASQIAIANGIAGLMSSICSCSYFVPLDVICQRLMVQGLPGMATYRGPFDVINKVVRTEGIRGLYRGFGITMLTQSPASALWWSAYGGAQHAIWRSLGYGNDSQTKPSQSELVVVQVTAGTIAGACSSIITTPVDTIKTRLQVMDNYGKGRPSVMKTTRLLLDEDGWRGFYRGFGPRFLNMSVWGTSMIVTYELIKRLSVKSE

SEQ ID NO: 7004 - protein, 271 aa, Zea mays subsp. mays
  peptide (1)..(271): Ceres Seq. ID no. 12405496
  misc_feature (18)..(271): Homolog of NCBI NO: 34894824 NR Description: P0554D10.15 [Oryza sativa (japonica
  misc_feature (1)..(266): Homolog of NCBI NO: 21553961 NR Description: putative mitochondrial carrier protein
  misc_feature (1)..(266): Homolog of NCBI NO: 18417739 NR Description: mitochondrial carrier protein family; protein id: supported by cDNA: 18738., supported by cDNA: gi_18252182, by cDNA: gi_20258916 [Arabidopsis thaliana]
  misc_feature (1)..(163): Homolog of NCBI NO: 11358653 NR Description: probable mitochondrial carrier protein - thaliana >gi|9755609|emb|CAC01763.1| putative mitochondrial
  misc_feature (163)..(266): Homolog of NCBI NO: 11358653 NR Description: probable mitochondrial carrier protein - thaliana >gi|9755609|emb|CAC01763.1| putative mitochondrial
  misc_feature (1)..(271): Homolog of NCBI NO: 21326111 NR Description: putative mitochondrial carrier protein [Sorghum
  misc_feature (1)..(271): Homolog of NCBI NO: 12061241 NR Description: 36I5.1 [Oryza sativa (japonica cultivar-group)]
  misc_feature (1)..(271): Homolog of NCBI NO: 18496651 NR Description: putative mitochondrial carrier protein [Triticum
  misc_feature (1)..(271): Homolog of NCBI NO: 12278522 NR Description: putative mitochondrial carrier protein [Hordeum
  misc_feature (1)..(271): Homolog of NCBI NO: 21594326 NR Description: mitochondrial carrier-like protein [Arabidopsis
MQVAEGGLAHMSGFAVFRRILRSDGIPGIFRGFGTAAVGALPGRVLALTSLEISKEMTFKYCEHFDLSEASQIAIANGIAGLMSSICSCSYFVPLDVICQRLMVQGLPGMATYRGPFDVINKVVRTEGIRGLYRGFGITMLTQSPASALWWSAYGGAQHAIWRSLGYGNDSQTKPSQSELVVVQVTAGTIAGACSSIITTPVDTIKTRLQVMDNYGKGRPSVMKTTRLLLDEDGWRGFYRGFGPRFLNMSVWGTSMIVTYELIKRLSVKSE

SEQ ID NO: 7005 - protein, 261 aa, Zea mays subsp. mays
  peptide (1)..(261): Ceres Seq. ID no. 12405497
  misc_feature (8)..(261): Homolog of NCBI NO: 34894824 NR Description: P0554D10.15 [Oryza sativa (japonica
  misc_feature (1)..(256): Homolog of NCBI NO: 21553961 NR Description: putative mitochondrial carrier protein
  misc_feature (1)..(256): Homolog of NCBI NO: 18417739 NR Description: mitochondrial carrier protein family; protein id: supported by cDNA: 18738., supported by cDNA: gi_18252182, by cDNA: gi_20258916 [Arabidopsis thaliana]
  misc_feature (1)..(153): Homolog of NCBI NO: 11358653 NR Description: probable mitochondrial carrier protein - thaliana >gi|9755609|emb|CAC01763.1| putative mitochondrial
  misc_feature (153)..(256): Homolog of NCBI NO: 11358653 NR Description: probable mitochondrial carrier protein - thaliana >gi|9755609|emb|CAC01763.1| putative mitochondrial
  misc_feature (1)..(261): Homolog of NCBI NO: 21326111 NR Description: putative mitochondrial carrier protein [Sorghum
  misc_feature (1)..(261): Homolog of NCBI NO: 12061241 NR Description: 36I5.1 [Oryza sativa (japonica cultivar-group)]
  misc_feature (1)..(261): Homolog of NCBI NO: 18496651 NR Description: putative mitochondrial carrier protein [Triticum
  misc_feature (1)..(261): Homolog of NCBI NO: 12278522 NR Description: putative mitochondrial carrier protein [Hordeum
  misc_feature (1)..(261): Homolog of NCBI NO: 21594326 NR Description: mitochondrial carrier-like protein [Arabidopsis
MSGFAVFRRILRSDGIPGIFRGFGTAAVGALPGRVLALTSLEISKEMTFKYCEHFDLSEASQIAIANGIAGLMSSICSCSYFVPLDVICQRLMVQGLPGMATYRGPFDVINKVVRTEGIRGLYRGFGITMLTQSPASALWWSAYGGAQHAIWRSLGYGNDSQTKPSQSELVVVQVTAGTIAGACSSIITTPVDTIKTRLQVMDNYGKGRPSVMKTTRLLLDEDGWRGFYRGFGPRFLNMSVWGTSMIVTYELIKRLSVKSE

SEQ ID NO: 7006 - DNA, 1430 bp, Zea mays subsp. mays
  misc_feature (1)..(1430): Ceres Seq. ID no. 12405490
  misc_feature: MA Experiment ID: 108527 Result: Down-regulated in Transcription
  misc_feature: MA Experiment 108527 PARAMETER Experiment Name: Zm_5mM_NO_P Parameter: Age (day) Value: 8
  misc_feature: MA Experiment 108527 PARAMETER Experiment Name: Zm_5mM_NO_P Parameter: Organism Value: Zea mays
  misc_feature: MA Experiment 108527 PARAMETER Experiment Name: Zm_5mM_NO_P Parameter: Plant Line Value: 35A19
  misc_feature: MA Experiment 108527 PARAMETER Experiment Name: Zm_5mM_NO_P Parameter: Timepoint (hr) Value: 6
  misc_feature: MA Experiment 108527 PARAMETER Experiment Name: Zm_5mM_NO_P Parameter: Tissue Value: Aerial
  misc_feature: MA Experiment 108527 PARAMETER Experiment Name: Zm_5mM_NO_P Parameter: Treatment Value: 5mM NO vs. No Treatment
  misc_feature: MA Experiment ID: 108529 Result: Up-regulated in Transcription
  misc_feature: MA Experiment 108529 PARAMETER Experiment Name: Zm_Imbibed_Seeds_P Parameter: Age (day) Value: 5 vs. 2
  misc_feature: MA Experiment 108529 PARAMETER Experiment Name: Zm_Imbibed_Seeds_P Parameter: Organism Value: Zea mays
  misc_feature: MA Experiment 108529 PARAMETER Experiment Name: Zm_Imbibed_Seeds_P Parameter: Plant Line Value: 35A19
  misc_feature: MA Experiment 108529 PARAMETER Experiment Name: Zm_Imbibed_Seeds_P Parameter: Tissue Value: Roots vs. Embryo
  misc_feature: MA Experiment ID: 108530 Result: Up-regulated in Transcription
  misc_feature: MA Experiment 108530 PARAMETER Experiment Name: Zm_Imbibed_Seeds_P Parameter: Age (day) Value: 6 vs. 2
  misc_feature: MA Experiment 108530 PARAMETER Experiment Name: Zm_Imbibed_Seeds_P Parameter: Organism Value: Zea mays
  misc_feature: MA Experiment 108530 PARAMETER Experiment Name: Zm_Imbibed_Seeds_P Parameter: Plant Line Value: 35A19
  misc_feature: MA Experiment 108530 PARAMETER Experiment Name: Zm_Imbibed_Seeds_P Parameter: Tissue Value: Aerial vs. Embryo
  misc_feature: MA Experiment ID: 20000492 Result: Down-regulated in Transcription
  misc_feature: MA Experiment 20000492 PARAMETER Experiment Name: Zm_Hybrid_Seed_Dev_P Parameter: DAP Value: 12
  misc_feature: MA Experiment 20000492 PARAMETER Experiment Name: Zm_Hybrid_Seed_Dev_P Parameter: Organism Value: Zea mays
  misc_feature: MA Experiment 20000492 PARAMETER Experiment Name: Zm_Hybrid_Seed_Dev_P Parameter: Plant Line Value: 35A19
  misc_feature: MA Experiment 20000492 PARAMETER Experiment Name: Zm_Hybrid_Seed_Dev_P Parameter: Tissue Value: Fert Kernel vs. Unfert Floret
gatatttttttggttggatctagcgtgacggcaaagacggtgtatcgaagggtcgacaatggttacgacgatcggtagtccatagcagcggcgggcgcaacttcgacccggttttcttcccatatatctgtcaaatccttctccggttaccctccatcggcagcaatttccgccatagataccggcgatcgagggcctcggacaacccaatcgacggagcagcgcggcggcaggagagggcaaacccttttcttctcagtactctacttgtctgcgcctggatcccctccgcaggaagataagacatgggtcaagcactcggcttgattcaagtggatcaatcgacagtagccatcaaggaaacttttgggaagtttgacgaggtcctagagcctggatgccacttcttgccatggtgcatagggaagcaaattgctgggtatctgtcactgcgtgtgcagcagcttgatgtccgctgcgaaacaaagacaaaggataatgtcttcgtcaatgttgtggcatctgtgcaatatcgtgcccttgccgataaggcatctgatgcattttacaggcttagtaacaccagggagcaaatccagtcatatgtttttgatgtcatcagggcaagtgttccgaagatgaacttggatgatgcctttgagcagaagaatgaaatcgccaaagctgtagaaaatgaacttgaaaaggcaatgtctatgtatggatacgagattgtgcagactctgattgttgatattgagcctgatgagcatgtgaagagagctatgaatgagatcaatgcagctgctaggctgaggttggctgccagcgagaaagctgaggcagagaagatactgcagatcaagagagccgaaggtgatgcagaatccaagtacttggcgggtctgggtatcgcaagacagcgccaggctatagtggatgggctcagagacagtgttcttgctttctctgagaatgtgcctgggacctctgcaaaggatgtcatggacatggttctggttacccagtacttcgacaccatggaggagattggggccccgtccaagtccccgtcggttttcaccccccatggaccaggtgctgtcagagacatcgcagcgcagataagggatggtcagccccaggccagtctgctgtgagcacgttggaaaaggcatgcttttgacattcccatcagtaaagaagtacatatacatcatgaggagtaaaaaaaaacttactagcgataatgtgagtacagcttgttcgttctatctatatggtgcatgtgattattattatggagattaatgttaaataggttcgcatgtattgtgccagaacaaggctaaggaccagtttccgtaaaaaaatgtatgttcggaacttatctaagttttggagcctgaggaaacccctccatcctgtgc

SEQ ID NO: 7007 - protein, 284 aa, Zea mays subsp. mays
  peptide (1)..(284): Ceres Seq. ID no. 12405491
  misc_feature (1)..(282): Homolog of NCBI NO: 15241939 NR Description: putative protein; protein id: At5g62740.1, by cDNA: 2641., supported by cDNA: gi_17065547 [Arabidopsis
  misc_feature (1)..(282): Homolog of NCBI NO: 15222481 NR Description: unknown protein; protein id: At1g69840.1, by cDNA: gi_20466747 [Arabidopsis thaliana]
  misc_feature (1)..(282): Homolog of NCBI NO: 3928150 NR Description: hypothetical protein [Cicer arietinum]
  misc_feature (1)..(284): Homolog of NCBI NO: 9998903 NR Description: putative membrane protein [Zea mays]
  misc_feature (1)..(284): Homolog of NCBI NO: 7716466 NR Description: hypersensitive-induced response protein [Zea mays]
  misc_feature (1)..(284): Homolog of NCBI NO: 14150732 NR Description: hypersensitive-induced response protein [Oryza
  misc_feature (1)..(284): Homolog of NCBI NO: 23345042 NR Description: hypersensitive-induced reaction protein 1
  misc_feature (1)..(283): Homolog of NCBI NO: 7716468 NR Description: hypersensitive-induced response protein [Zea mays]
  misc_feature (1)..(284): Homolog of NCBI NO: 28476864 NR Description: hypersensitive-induced reaction protein 2
  misc_feature (1)..(282): Homolog of NCBI NO: 13194676 NR Description: hypersensitivity-induced response-like protein
MGQALGLIQVDQSTVAIKETFGKFDEVLEPGCHFLPWCIGKQIAGYLSLRVQQLDVRCETKTKDNVFVNVVASVQYRALADKASDAFYRLSNTREQIQSYVFDVIRASVPKMNLDDAFEQKNEIAKAVENELEKAMSMYGYEIVQTLIVDIEPDEHVKRAMNEINAAARLRLAASEKAEAEKILQIKRAEGDAESKYLAGLGIARQRQAIVDGLRDSVLAFSENVPGTSAKDVMDMVLVTQYFDTMEEIGAPSKSPSVFTPHGPGAVRDIAAQIRDGQPQASLL

SEQ ID NO: 7008 - protein, 173 aa, Zea mays subsp. mays
  peptide (1)..(173): Ceres Seq. ID no. 12405492
  misc_feature (1)..(173): Homolog of NCBI NO: 9998903 NR Description: putative membrane protein [Zea mays]
  misc_feature (1)..(173): Homolog of NCBI NO: 7716466 NR Description: hypersensitive-induced response protein [Zea mays]
  misc_feature (1)..(173): Homolog of NCBI NO: 14150732 NR Description: hypersensitive-induced response protein [Oryza
  misc_feature (1)..(173): Homolog of NCBI NO: 23345042 NR Description: hypersensitive-induced reaction protein 1
  misc_feature (1)..(172): Homolog of NCBI NO: 7716468 NR Description: hypersensitive-induced response protein [Zea mays]
  misc_feature (1)..(173): Homolog of NCBI NO: 28476864 NR Description: hypersensitive-induced reaction protein 2
  misc_feature (1)..(171): Homolog of NCBI NO: 13194676 NR Description: hypersensitivity-induced response-like protein
  misc_feature (1)..(171): Homolog of NCBI NO: 15241939 NR Description: putative protein; protein id: At5g62740.1, by cDNA: 2641., supported by cDNA: gi_17065547 [Arabidopsis
  misc_feature (1)..(171): Homolog of NCBI NO: 15222481 NR Description: unknown protein; protein id: At1g69840.1, by cDNA: gi_20466747 [Arabidopsis thaliana]
  misc_feature (1)..(171): Homolog of NCBI NO: 3928150 NR Description: hypothetical protein [Cicer arietinum]
MNLDDAFEQKNEIAKAVENELEKAMSMYGYEIVQTLIVDIEPDEHVKRAMNEINAAARLRLAASEKAEAEKILQIKRAEGDAESKYLAGLGIARQRQAIVDGLRDSVLAFSENVPGTSAKDVMDMVLVTQYFDTMEEIGAPSKSPSVFTPHGPGAVRDIAAQIRDGQPQASLL

SEQ ID NO: 7009 - protein, 149 aa, Zea mays subsp. mays
  peptide (1)..(149): Ceres Seq. ID no. 12405493
  misc_feature (1)..(149): Homolog of NCBI NO: 9998903 NR Description: putative membrane protein [Zea mays]
  misc_feature (1)..(149): Homolog of NCBI NO: 7716466 NR Description: hypersensitive-induced response protein [Zea mays]
  misc_feature (1)..(149): Homolog of NCBI NO: 14150732 NR Description: hypersensitive-induced response protein [Oryza
  misc_feature (1)..(149): Homolog of NCBI NO: 23345042 NR Description: hypersensitive-induced reaction protein 1
  misc_feature (1)..(148): Homolog of NCBI NO: 7716468 NR Description: hypersensitive-induced response protein [Zea mays]
  misc_feature (1)..(149): Homolog of NCBI NO: 28476864 NR Description: hypersensitive-induced reaction protein 2
  misc_feature (1)..(147): Homolog of NCBI NO: 13194676 NR Description: hypersensitivity-induced response-like protein
  misc_feature (1)..(147): Homolog of NCBI NO: 15241939 NR Description: putative protein; protein id: At5g62740.1, by cDNA: 2641., supported by cDNA: gi_17065547 [Arabidopsis
  misc_feature (1)..(147): Homolog of NCBI NO: 15222481 NR Description: unknown protein; protein id: At1g69840.1, by cDNA: gi_20466747 [Arabidopsis thaliana]
  misc_feature (1)..(147): Homolog of NCBI NO: 3928150 NR Description: hypothetical protein [Cicer arietinum]
MSMYGYEIVQTLIVDIEPDEHVKRAMNEINAAARLRLAASEKAEAEKILQIKRAEGDAESKYLAGLGIARQRQAIVDGLRDSVLAFSENVPGTSAKDVMDMVLVTQYFDTMEEIGAPSKSPSVFTPHGPGAVRDIAAQIRDGQPQASLL

SEQ ID NO: 7010 - DNA, 1959 bp, Zea mays subsp. mays; identical to SEQ ID NO: 1843
  misc_feature (1)..(1959): Ceres Seq. ID no. 12373566
  misc_feature: MA Experiment ID: 108530 Result: Up-regulated in Transcription
  misc_feature: MA Experiment 108530 PARAMETER Experiment Name: Zm_Imbibed_Seeds_P Parameter: Age (day) Value: 6 vs. 2
  misc_feature: MA Experiment 108530 PARAMETER Experiment Name: Zm_Imbibed_Seeds_P Parameter: Organism Value: Zea mays
  misc_feature: MA Experiment 108530 PARAMETER Experiment Name: Zm_Imbibed_Seeds_P Parameter: Plant Line Value: 35A19
  misc_feature: MA Experiment 108530 PARAMETER Experiment Name: Zm_Imbibed_Seeds_P Parameter: Tissue Value: Aerial vs. Embryo

SEQ ID NO: 7011 - protein, 466 aa, Zea mays subsp. mays; identical to SEQ ID NO: 1844
  peptide (1)..(466): Ceres Seq. ID no. 12373567
  misc_feature (227)..(428): Pfam Name: Protein phosphatase 2C Pfam Description: Protein phosphatase 2C
  misc_feature (205)..(463): Homolog of NCBI NO: 25366932 NR Description: hypothetical protein dl4315c [imported] - thaliana >gi|5302796|emb|CAB46038.1| hypothetical protein thaliana] >gi|7268408|emb|CAB78700.1| hypothetical protein
  misc_feature (205)..(463): Homolog of NCBI NO: 30683717 NR Description: expressed protein [Arabidopsis thaliana] unknown protein [Arabidopsis thaliana]
  misc_feature (178)..(463): Homolog of NCBI NO: 15240071 NR Description: putative protein; protein id: At5g66720.1 thaliana] >gi|8843730|dbj|BAA97278.1| contains similarity to protein~emb|CAB46038.1~gene_id:MSN2.11 [Arabidopsis thaliana]
  misc_feature (195)..(461): Homolog of NCBI NO: 18418226 NR Description: putative protein; protein id: At4g33500.1, by cDNA: gi_15293236 [Arabidopsis thaliana] unknown protein [Arabidopsis thaliana]
  misc_feature (195)..(459): Homolog of NCBI NO: 7485658 NR Description: hypothetical protein F17M5.260 - Arabidopsis >gi|4490317|emb|CAB38808.1| putative protein [Arabidopsis >gi|7270298|emb|CAB80067.1| putative protein [Arabidopsis
  misc_feature (232)..(463): Homolog of NCBI NO: 37533570 NR Description: putative protein phosphatase 2C [Oryza sativa
  misc_feature (211)..(463): Homolog of NCBI NO: 18402284 NR Description: expressed protein; protein id: At2g30170.1, by cDNA: gi_13878070, supported by cDNA: gi_17104662 [Arabidopsis >gi|13878071|gb|AAK44113.1|AF370298_1 unknown protein
  misc_feature (212)..(466): Homolog of NCBI NO: 34896100 NR Description: B1189A09.35 [Oryza sativa (japonica
  misc_feature (237)..(460): Homolog of NCBI NO: 24640366 NR Description: CG15035-PA [Drosophila melanogaster]
  misc_feature (227)..(460): Homolog of NCBI NO: 24655293 NR Description: CG12091-PA [Drosophila melanogaster]

SEQ ID NO: 7012 - protein, 383 aa, Zea mays subsp. mays; identical to SEQ ID NO: 1845
  peptide (1)..(383): Ceres Seq. ID no. 12373568
  misc_feature (144)..(345): Pfam Name: Protein phosphatase 2C Pfam Description: Protein phosphatase 2C
  misc_feature (122)..(380): Homolog of NCBI NO: 25366932 NR Description: hypothetical protein dl4315c [imported] - thaliana >gi|5302796|emb|CAB46038.1| hypothetical protein thaliana] >gi|7268408|emb|CAB78700.1| hypothetical protein
  misc_feature (122)..(380): Homolog of NCBI NO: 30683717 NR Description: expressed protein [Arabidopsis thaliana] unknown protein [Arabidopsis thaliana]
  misc_feature (95)..(380): Homolog of NCBI NO: 15240071 NR Description: putative protein; protein id: At5g66720.1 thaliana] >gi|8843730|dbj|BAA97278.1| contains similarity to protein~emb|CAB46038.1~gene_id:MSN2.11 [Arabidopsis thaliana]
  misc_feature (112)..(378): Homolog of NCBI NO: 18418226 NR Description: putative protein; protein id: At4g33500.1, by cDNA: gi_15293236 [Arabidopsis thaliana] unknown protein [Arabidopsis thaliana]
  misc_feature (112)..(376): Homolog of NCBI NO: 7485658 NR Description: hypothetical protein F17M5.260 - Arabidopsis >gi|4490317|emb|CAB38808.1| putative protein [Arabidopsis >gi|7270298|emb|CAB80067.1| putative protein [Arabidopsis
  misc_feature (149)..(380): Homolog of NCBI NO: 37533570 NR Description: putative protein phosphatase 2C [Oryza sativa
  misc_feature (128)..(380): Homolog of NCBI NO: 18402284 NR Description: expressed protein; protein id: At2g30170.1, by cDNA: gi_13878070, supported by cDNA: gi_17104662 [Arabidopsis >gi|13878071|gb|AAK44113.1|AF370298_1 unknown protein
  misc_feature (129)..(383): Homolog of NCBI NO: 34896100 NR Description: B1189A09.35 [Oryza sativa (japonica
  misc_feature (154)..(377): Homolog of NCBI NO: 24640366 NR Description: CG15035-PA [Drosophila melanogaster]
  misc_feature (144)..(377): Homolog of NCBI NO: 24655293 NR Description: CG12091-PA [Drosophila melanogaster]

SEQ ID NO: 7013 - protein, 347 aa, Zea mays subsp. mays; identical to SEQ ID NO: 1846
  peptide (1)..(347): Ceres Seq. ID no. 12373569
  misc_feature (108)..(309): Pfam Name: Protein phosphatase 2C Pfam Description: Protein phosphatase 2C
  misc_feature (86)..(344): Homolog of NCBI NO: 25366932 NR Description: hypothetical protein dl4315c [imported] - thaliana >gi|5302796|emb|CAB46038.1| hypothetical protein thaliana] >gi|7268408|emb|CAB78700.1| hypothetical protein
  misc_feature (86)..(344): Homolog of NCBI NO: 30683717 NR Description: expressed protein [Arabidopsis thaliana] unknown protein [Arabidopsis thaliana]
  misc_feature (59)..(344): Homolog of NCBI NO: 15240071 NR Description: putative protein; protein id: At5g66720.1 thaliana] >gi|8843730|dbj|BAA97278.1| contains similarity to protein~emb|CAB46038.1~gene_id:MSN2.11 [Arabidopsis thaliana]
  misc_feature (76)..(342): Homolog of NCBI NO: 18418226 NR Description: putative protein; protein id: At4g33500.1, by cDNA: gi_15293236 [Arabidopsis thaliana] unknown protein [Arabidopsis thaliana]
  misc_feature (76)..(340): Homolog of NCBI NO: 7485658 NR Description: hypothetical protein F17M5.260 - Arabidopsis >gi|4490317|emb|CAB38808.1| putative protein [Arabidopsis >gi|7270298|emb|CAB80067.1| putative protein [Arabidopsis
  misc_feature (113)..(344): Homolog of NCBI NO: 37533570 NR Description: putative protein phosphatase 2C [Oryza sativa
  misc_feature (92)..(344): Homolog of NCBI NO: 18402284 NR Description: expressed protein; protein id: At2g30170.1, by cDNA: gi_13878070, supported by cDNA: gi_17104662 [Arabidopsis >gi|13878071|gb|AAK44113.1|AF370298_1 unknown protein
  misc_feature (93)..(347): Homolog of NCBI NO: 34896100 NR Description: B1189A09.35 [Oryza sativa (japonica
  misc_feature (118)..(341): Homolog of NCBI NO: 24640366 NR Description: CG15035-PA [Drosophila melanogaster]
  misc_feature (108)..(341): Homolog of NCBI NO: 24655293 NR Description: CG12091-PA [Drosophila melanogaster]

SEQ ID NO: 7014 - DNA, 1442 bp, Zea mays subsp. mays
  misc_feature (1)..(1442): Ceres Seq. ID no. 12408959
  misc_feature: MA Experiment ID: 108527 Result: Up-regulated in Transcription
  misc_feature: MA Experiment 108527 PARAMETER Experiment Name: Zm_5mM_NO_P Parameter: Age (day) Value: 8
  misc_feature: MA Experiment 108527 PARAMETER Experiment Name: Zm_5mM_NO_P Parameter: Organism Value: Zea mays
  misc_feature: MA Experiment 108527 PARAMETER Experiment Name: Zm_5mM_NO_P Parameter: Plant Line Value: 35A19
  misc_feature: MA Experiment 108527 PARAMETER Experiment Name: Zm_5mM_NO_P Parameter: Timepoint (hr) Value: 6
  misc_feature: MA Experiment 108527 PARAMETER Experiment Name: Zm_5mM_NO_P Parameter: Tissue Value: Aerial
  misc_feature: MA Experiment 108527 PARAMETER Experiment Name: Zm_5mM_NO_P Parameter: Treatment Value: 5mM NO vs. No Treatment
  misc_feature: MA Experiment ID: 108528 Result: Down-regulated in Transcription
  misc_feature: MA Experiment 108528 PARAMETER Experiment Name: Zm_Imbibed_Seeds_P Parameter: Age (day) Value: 5 vs. 2
  misc_feature: MA Experiment 108528 PARAMETER Experiment Name: Zm_Imbibed_Seeds_P Parameter: Organism Value: Zea mays
  misc_feature: MA Experiment 108528 PARAMETER Experiment Name: Zm_Imbibed_Seeds_P Parameter: Plant Line Value: 35A19
  misc_feature: MA Experiment 108528 PARAMETER Experiment Name: Zm_Imbibed_Seeds_P Parameter: Tissue Value: Aerial vs. Embryo
  misc_feature: MA Experiment ID: 108530 Result: Down-regulated in Transcription
  misc_feature: MA Experiment 108530 PARAMETER Experiment Name: Zm_Imbibed_Seeds_P Parameter: Age (day) Value: 6 vs. 2
  misc_feature: MA Experiment 108530 PARAMETER Experiment Name: Zm_Imbibed_Seeds_P Parameter: Organism Value: Zea mays
  misc_feature: MA Experiment 108530 PARAMETER Experiment Name: Zm_Imbibed_Seeds_P Parameter: Plant Line Value: 35A19
  misc_feature: MA Experiment 108530 PARAMETER Experiment Name: Zm_Imbibed_Seeds_P Parameter: Tissue Value: Aerial vs. Embryo
  misc_feature: MA Experiment ID: 108534 Result: Up-regulated in Transcription
  misc_feature: MA Experiment 108534 PARAMETER Experiment Name: Zm_4deg_Cold_P Parameter: Age (hr) Value: 8
  misc_feature: MA Experiment 108534 PARAMETER Experiment Name: Zm_4deg_Cold_P Parameter: Organism Value: Zea mays
  misc_feature: MA Experiment 108534 PARAMETER Experiment Name: Zm_4deg_Cold_P Parameter: Plant Line Value: 35A19
  misc_feature: MA Experiment 108534 PARAMETER Experiment Name: Zm_4deg_Cold_P Parameter: Temperature (deg C) Value: 4 vs. 22
  misc_feature: MA Experiment 108534 PARAMETER Experiment Name: Zm_4deg_Cold_P Parameter: Timepoint (hr) Value: 6
  misc_feature: MA Experiment 108534 PARAMETER Experiment Name: Zm_4deg_Cold_P Parameter: Tissue Value: Aerial
  misc_feature: MA Experiment ID: 108544 Result: Down-regulated in Transcription
  misc_feature: MA Experiment ID: 108545 Result: Down-regulated in Transcription
  misc_feature: MA Experiment 108545 PARAMETER Experiment Name: Zm_Imbibed_Seeds_P Parameter: Age (day) Value: 3 vs. 2
  misc_feature: MA Experiment 108545 PARAMETER Experiment Name: Zm_Imbibed_Seeds_P Parameter: Organism Value: Zea mays
  misc_feature: MA Experiment 108545 PARAMETER Experiment Name: Zm_Imbibed_Seeds_P Parameter: Plant Line Value: 35A19
  misc_feature: MA Experiment 108545 PARAMETER Experiment Name: Zm_Imbibed_Seeds_P Parameter: Tissue Value: Aerial vs. Embryo
  misc_feature: MA Experiment ID: 108547 Result: Down-regulated in Transcription
  misc_feature: MA Experiment 108547 PARAMETER Experiment Name: Zm_Imbibed_Seeds_P Parameter: Age (day) Value: 4 vs. 2
  misc_feature: MA Experiment 108547 PARAMETER Experiment Name: Zm_Imbibed_Seeds_P Parameter: Organism Value: Zea mays
  misc_feature: MA Experiment 108547 PARAMETER Experiment Name: Zm_Imbibed_Seeds_P Parameter: Plant Line Value: 35A19
  misc_feature: MA Experiment 108547 PARAMETER Experiment Name: Zm_Imbibed_Seeds_P Parameter: Tissue Value: Aerial vs. Embryo
  misc_feature: MA Experiment ID: 108688 Result: Down-regulated in Transcription
  misc_feature: MA Experiment 108688 PARAMETER Experiment Name: Zm_Embryos-Flowers__P Parameter: Tissue Value: Immature Flowers vs. Aerial+
  misc_feature: MA Experiment ID: 20000532 Result: Up-regulated in Transcription
  misc_feature: MA Experiment 20000532 PARAMETER Experiment Name: Zm_0.001percent_MeJA_P Parameter: Age (day) Value: 10
  misc_feature: MA Experiment 20000532 PARAMETER Experiment Name: Zm_0.001percent_MeJA_P Parameter: Organism Value: Zea mays
  misc_feature: MA Experiment 20000532 PARAMETER Experiment Name: Zm_0.001percent_MeJA_P Parameter: Plant Line Value: 35A19
  misc_feature: MA Experiment 20000532 PARAMETER Experiment Name: Zm_0.001percent_MeJA_P Parameter: Timepoint (hr) Value: 48
  misc_feature: MA Experiment 20000532 PARAMETER Experiment Name: Zm_0.001percent_MeJA_P Parameter: Tissue Value: Aerial
  misc_feature: MA Experiment 20000532 PARAMETER Experiment Name: Zm_0.001percent_MeJA_P Parameter: Treatment Value: 0.001percent MeJA vs. No Treatment
  misc_feature: MA Experiment ID: 20000533 Result: Up-regulated in Transcription
  misc_feature: MA Experiment 20000533 PARAMETER Experiment Name: Zm_0.001percent_MeJA_P Parameter: Age (day) Value: 11
  misc_feature: MA Experiment 20000533 PARAMETER Experiment Name: Zm_0.001percent_MeJA_P Parameter: Organism Value: Zea mays
  misc_feature: MA Experiment 20000533 PARAMETER Experiment Name: Zm_0.001percent_MeJA_P Parameter: Plant Line Value: 35A19
  misc_feature: MA Experiment 20000533 PARAMETER Experiment Name: Zm_0.001percent_MeJA_P Parameter: Timepoint (hr) Value: 72
  misc_feature: MA Experiment 20000533 PARAMETER Experiment Name: Zm_0.001percent_MeJA_P Parameter: Tissue Value: Aerial
  misc_feature: MA Experiment 20000533 PARAMETER Experiment Name: Zm_0.001percent_MeJA_P Parameter: Treatment Value: 0.001percent MeJA vs. No Treatment
  misc_feature: MA Experiment ID: 20000629 Result: Down-regulated in Transcription
  misc_feature: MA Experiment 20000629 PARAMETER Experiment Name: Zm_Herbicide-Treatments_P Parameter: Timepoint (hr) Value: 12
  misc_feature: MA Experiment 20000629 PARAMETER Experiment Name: Zm_Herbicide-Treatments_P Parameter: Tissue Value: Aerial
  misc_feature: MA Experiment 20000629 PARAMETER Experiment Name: Zm_Herbicide-Treatments_P Parameter: Treatment Value: Trimec vs. No Treatment
  misc_feature: MA Experiment ID: 20001614 Result: Up-regulated in Transcription
  misc_feature: MA Experiment 20001614 PARAMETER Experiment Name: Zm_50ppm_KNO3_L-to-H_P Parameter: Age (day) Value: 21
  misc_feature: MA Experiment 20001614 PARAMETER Experiment Name: Zm_50ppm_KNO3_L-to-H_P Parameter: Organism Value: Zea mays
  misc_feature: MA Experiment 20001614 PARAMETER Experiment Name: Zm_50ppm_KNO3_L-to-H_P Parameter: Plant Line Value: 35A19
  misc_feature: MA Experiment 20001614 PARAMETER Experiment Name: Zm_50ppm_KNO3_L-to-H_P Parameter: Timepoint (hr) Value: 48
  misc_feature: MA Experiment 20001614 PARAMETER Experiment Name: Zm_50ppm_KNO3_L-to-H_P Parameter: Tissue Value: Roots
  misc_feature: MA Experiment 20001614 PARAMETER Experiment Name: Zm_50ppm_KNO3_L-to-H_P Parameter: Treatment Value: 50ppm KNO3 vs. 50ppm KCl
acgaactcagcgtgctcataggttcctgacgtacgtatctcagttgcgttcgagcgttgtggacttgtggtggtttccttcctgcgccggagaaggtagacgatgggaaggggaagcgaacagtgccggacgcccgtcgagctgcgctgctcttgatcgtctgcttggcggctcgagcggcttctgcaatccaggatggcctgttgccgaacggcaactntcgaggaggcgccgcccaagtcgcagctcaacggcacgagggtgatggggcgcaacgcgataccgcactgggagatctccgggtacgtggagtacatcgggtcgggccagaagcagggcgacatgctgctgccggtgccggagggcgcctacgccgtgcggctggggaacgaggcatccatccagcagcgcctcgccgtgacgccgggcgcgcgctactccatcaccttcagcgcggcgcggacctgcgcccaggccgagcagctcaacgtgacggtcgcccccgagtcggacgtactcccgatccagacggtctacaccagcagcggctgggactcctactcctgggccttccaggccgcgggcagcgtcgtgaccctgatcgtccacaaccccggcgtcgccgaggacgcagcctgcggccccctcatcgatctgtttgccattaagaccatgccgactcctcggagcagcaagaataatatgctgaagaacggggacttcgaggacggcccgtacatcttccccaacacgcagtggggggtgctggtgccgccgatggacgaggacgactactccccgctggccccgtggatggtcctgtcgtccaccaagtcggtgaagtacgttgacgcgccgcaccacgccgtgccgcacggcgcccgcgccgtggagctggtgtccggcatggagacggcgctggtgcagaacgtgaccaccgttcccggacagctctacaggctccagttctcggccggggacgccggcaacggctgcgtgggctccatgaccgtccaggcgtacgccgcgcggggcagcgtcaaggtnccgtaccagtcccagggcaagggcggccacacgcgcggcgtgctggacttcgcggcggtcgcggaccagaccagggtggtgttcgtcagcatgggctacatcatgaagcccgacggcacgctgtgcggancnccgtcgtcgacgacgtctcgcttgtctccacgcggaaccatcctgctcgccgcttgcttctgtgatgctaccgacaagattcgttcatgggttaatgtgaatggctgtgagtgtgctcgaactcgaatgctcgggcttcatttaaccagatctgggtagagtccacggccatcacatgtatttgcatcgttgttttgtctttcttggccaaatgtacttgcttcgttgtagttgtatagactatgtatgcttcgacgggtgcc

SEQ ID NO: 7015 - protein, 380 aa, Zea mays subsp. mays
  peptide (1)..(380): Ceres Seq. ID no. 12408960
  misc_feature (18)..(327): Pfam Name: Protein of unknown function, DUF642 Pfam Description: Protein of unknown function, DUF642
  misc_feature (10)..(327): Homolog of NCBI NO: 38345427 NR Description: OSJNBb0091E11.18 [Oryza sativa (japonica
  misc_feature (10)..(327): Homolog of NCBI NO: 38345426 NR Description: OSJNBb0091E11.17 [Oryza sativa (japonica
  misc_feature (10)..(339): Homolog of NCBI NO: 38345428 NR Description: OSJNBb0091E11.19 [Oryza sativa (japonica
  misc_feature (10)..(327): Homolog of NCBI NO: 38345423 NR Description: OSJNBb0091E11.14 [Oryza sativa (japonica
  misc_feature (10)..(327): Homolog of NCBI NO: 34912572 NR Description: P0410E03.24 [Oryza sativa (japonica
  misc_feature (1)..(339): Homolog of NCBI NO: 7488898 NR Description: hypothetical protein - castor bean
  misc_feature (10)..(339): Homolog of NCBI NO: 7488741 NR Description: hypothetical protein precursor - alfalfa
  misc_feature (10)..(339): Homolog of NCBI NO: 15239049 NR Description: putative protein; protein id: At5g11420.1, by cDNA: 25522., supported by cDNA: gi_15028264, supported by
  misc_feature (10)..(339): Homolog of NCBI NO: 21554402 NR Description: unknown [Arabidopsis thaliana]
  misc_feature (10)..(327): Homolog of NCBI NO: 30102997 NR Description: unknown protein [Oryza sativa (japonica
  misc_feature (9)..(9): Xaa is any aa, unknown or other
  misc_feature (284)..(284): Xaa is any aa, unknown or other
  misc_feature (328)..(328): Xaa is any aa, unknown or other
MACCRTATXEEAPPKSQLNGTRVMGRNAIPHWEISGYVEYIGSGQKQGDMLLPVPEGAYAVRLGNEASIQQRLAVTPGARYSITFSAARTCAQAEQLNVTVAPESDVLPIQTVYTSSGWDSYSWAFQAAGSVVTLIVHNPGVAEDAACGPLIDLFAIKTMPTPRSSKNNMLKNGDFEDGPYIFPNTQWGVLVPPMDEDDYSPLAPWMVLSSTKSVKYVDAPHHAVPHGARAVELVSGMETALVQNVTTVPGQLYRLQFSAGDAGNGCVGSMTVQAYAARGSVKXPYQSQGKGGHTRGVLDFAAVADQTRVVFVSMGYIMKPDGTLCGXPSSTTSRLSPRGTILLAACFCDATDKIRSWVNVNGCECARTRMLGLHLTRSG

SEQ ID NO: 7016 - protein, 357 aa, Zea mays subsp. mays
  peptide (1)..(357): Ceres Seq. ID no. 12408961
  misc_feature (1)..(304): Pfam Name: Protein of unknown function, DUF642 Pfam Description: Protein of unknown function, DUF642
  misc_feature (1)..(304): Homolog of NCBI NO: 38345427 NR Description: OSJNBb0091E11.18 [Oryza sativa (japonica
  misc_feature (1)..(304): Homolog of NCBI NO: 38345426 NR Description: OSJNBb0091E11.17 [Oryza sativa (japonica
  misc_feature (1)..(316): Homolog of NCBI NO: 38345428 NR Description: OSJNBb0091E11.19 [Oryza sativa (japonica
  misc_feature (1)..(304): Homolog of NCBI NO: 38345423 NR Description: OSJNBb0091E11.14 [Oryza sativa (japonica
  misc_feature (1)..(304): Homolog of NCBI NO: 34912572 NR Description: P0410E03.24 [Oryza sativa (japonica
  misc_feature (1)..(316): Homolog of NCBI NO: 7488898 NR Description: hypothetical protein - castor bean
  misc_feature (1)..(316): Homolog of NCBI NO: 7488741 NR Description: hypothetical protein precursor - alfalfa
  misc_feature (1)..(316): Homolog of NCBI NO: 15239049 NR Description: putative protein; protein id: At5g11420.1, by cDNA: 25522., supported by cDNA: gi_15028264, supported by
  misc_feature (1)..(316): Homolog of NCBI NO: 21554402 NR Description: unknown [Arabidopsis thaliana]
  misc_feature (1)..(304): Homolog of NCBI NO: 30102997 NR Description: unknown protein [Oryza sativa (japonica
  misc_feature (261)..(261): Xaa is any aa, unknown or other
  misc_feature (305)..(305): Xaa is any aa, unknown or other
MGRNAIPHWEISGYVEYIGSGQKQGDMLLPVPEGAYAVRLGNEASIQQRLAVTPGARYSITFSAARTCAQAEQLNVTVAPESDVLPIQTVYTSSGWDSYSWAFQAAGSVVTLIVHNPGVAEDAACGPLIDLFAIKTMPTPRSSKNNMLKNGDFEDGPYIFPNTQWGVLVPPMDEDDYSPLAPWMVLSSTKSVKYVDAPHHAVPHGARAVELVSGMETALVQNVTTVPGQLYRLQFSAGDAGNGCVGSMTVQAYAARGSVKXPYQSQGKGGHTRGVLDFAAVADQTRVVFVSMGYIMKPDGTLCGXPSSTTSRLSPRGTILLAACFCDATDKIRSWVNVNGCECARTRMLGLHLTRSG

SEQ ID NO: 7017 - protein, 331 aa, Zea mays subsp. mays
  peptide (1)..(331): Ceres Seq. ID no. 12408962
  misc_feature (1)..(278): Pfam Name: Protein of unknown function, DUF642 Pfam Description: Protein of unknown function, DUF642
  misc_feature (1)..(278): Homolog of NCBI NO: 38345427 NR Description: OSJNBb0091E11.18 [Oryza sativa (japonica
  misc_feature (1)..(278): Homolog of NCBI NO: 38345426 NR Description: OSJNBb0091E11.17 [Oryza sativa (japonica
  misc_feature (1)..(290): Homolog of NCBI NO: 38345428 NR Description: OSJNBb0091E11.19 [Oryza sativa (japonica
  misc_feature (1)..(278): Homolog of NCBI NO: 38345423 NR Description: OSJNBb0091E11.14 [Oryza sativa (japonica
  misc_feature (1)..(278): Homolog of NCBI NO: 34912572 NR Description: P0410E03.24 [Oryza sativa (japonica
  misc_feature (1)..(290): Homolog of NCBI NO: 7488898 NR Description: hypothetical protein - castor bean
  misc_feature (1)..(290): Homolog of NCBI NO: 7488741 NR Description: hypothetical protein precursor - alfalfa
  misc_feature (1)..(290): Homolog of NCBI NO: 15239049 NR Description: putative protein; protein id: At5g11420.1, by cDNA: 25522., supported by cDNA: gi_15028264, supported by
  misc_feature (1)..(290): Homolog of NCBI NO: 21554402 NR Description: unknown [Arabidopsis thaliana]
  misc_feature (1)..(278): Homolog of NCBI NO: 30102997 NR Description: unknown protein [Oryza sativa (japonica
  misc_feature (235)..(235): Xaa is any aa, unknown or other
  misc_feature (279)..(279): Xaa is any aa, unknown or other
MLLPVPEGAYAVRLGNEASIQQRLAVTPGARYSITFSAARTCAQAEQLNVTVAPESDVLPIQTVYTSSGWDSYSWAFQAAGSVVTLIVHNPGVAEDAACGPLIDLFAIKTMPTPRSSKNNMLKNGDFEDGPYIFPNTQWGVLVPPMDEDDYSPLAPWMVLSSTKSVKYVDAPHHAVPHGARAVELVSGMETALVQNVTTVPGQLYRLQFSAGDAGNGCVGSMTVQAYAARGSVKXPYQSQGKGGHTRGVLDFAAVADQTRVVFVSMGYIMKPDGTLCGXPSSTTSRLSPRGTILLAACFCDATDKIRSWVNVNGCECARTRMLGLHLTRSG

SEQ ID NO: 7018 - DNA, 1471 bp, Zea mays subsp. mays
  misc_feature (1)..(1471): Ceres Seq. ID no. 12373562
  misc_feature: MA Experiment ID: 108535 Result: Up-regulated in Transcription
  misc_feature: MA Experiment 108535 PARAMETER Experiment Name: Zm_Meristem_P Parameter: Age (day) Value: 8
  misc_feature: MA Experiment 108535 PARAMETER Experiment Name: Zm_Meristem_P Parameter: Organism Value: Zea mays
  misc_feature: MA Experiment 108535 PARAMETER Experiment Name: Zm_Meristem_P Parameter: Plant Line Value: 35A19
  misc_feature: MA Experiment 108535 PARAMETER Experiment Name: Zm_Meristem_P Parameter: Tissue Value: Root Meristem vs. Above Root Meristem
  misc_feature: MA Experiment ID: 108544 Result: Down-regulated in Transcription
  misc_feature: MA Experiment ID: 20000480 Result: Down-regulated in Transcription
  misc_feature: MA Experiment 20000480 PARAMETER Experiment Name: Zm_Drought_P Parameter: Age (day) Value: 11
  misc_feature: MA Experiment 20000480 PARAMETER Experiment Name: Zm_Drought_P Parameter: Organism Value: Zea mays
  misc_feature: MA Experiment 20000480 PARAMETER Experiment Name: Zm_Drought_P Parameter: Plant Line Value: 35A19
  misc_feature: MA Experiment 20000480 PARAMETER Experiment Name: Zm_Drought_P Parameter: Timepoint (hr) Value: 72
  misc_feature: MA Experiment 20000480 PARAMETER Experiment Name: Zm_Drought_P Parameter: Tissue Value: Aerial
  misc_feature: MA Experiment 20000480 PARAMETER Experiment Name: Zm_Drought_P Parameter: Treatment Value: Drought vs. No Drought
  misc_feature: MA Experiment ID: 20000535 Result: Up-regulated in Transcription
  misc_feature: MA Experiment 20000535 PARAMETER Experiment Name: Zm_Hybrid_Seed_Dev_P Parameter: DAP Value: 30 vs. 12
  misc_feature: MA Experiment 20000535 PARAMETER Experiment Name: Zm_Hybrid_Seed_Dev_P Parameter: Organism Value: Zea mays
  misc_feature: MA Experiment 20000535 PARAMETER Experiment Name: Zm_Hybrid_Seed_Dev_P Parameter: Plant Line Value: 35A19
  misc_feature: MA Experiment 20000535 PARAMETER Experiment Name: Zm_Hybrid_Seed_Dev_P Parameter: Tissue Value: Embryo vs. Unfert Floret
  misc_feature: MA Experiment ID: 20000626 Result: Up-regulated in Transcription
  misc_feature: MA Experiment 20000626 PARAMETER Experiment Name: Zm_Herbicide-Treatments_P Parameter: Timepoint (hr) Value: 12
  misc_feature: MA Experiment 20000626 PARAMETER Experiment Name: Zm_Herbicide-Treatments_P Parameter: Tissue Value: Aerial
  misc_feature: MA Experiment 20000626 PARAMETER Experiment Name: Zm_Herbicide-Treatments_P Parameter: Treatment Value: Roundup vs. No Treatment
acggacatgcgatgctttatggatggtctagatcacgcgcttctactgacccgactcactctctctgaaaagtgaaaactaggaaccccactccccctcccgaaactaccgccgccgccgctgccgctgccgccgcgatccaggtctcccgcttcgcctgagctctcgacctcttcactcctcgccgccgctgctcgccctcccgcgtatcctcgtctcagctctcaggttttcagcctgatcaaaccggtgtaaccagccgtgcatgactgcattggttcggctcgccggaagagcagcttcgcggagtagggtcggcatagcggcggcggcggcaccccctcctgtcggcttgtccgtgcagcgccggagggcgttccagggcgtgagaatggagacggggggaagcaagggcggccgtggcgctctggtggtcctggaaggcctggaccggagcgggaaaacttcgcagtgtgcccggctgctgtccttcctcaaaggcaaaggctacaatgccgaaggatggagtttccccgatagggccaccagtgtggggcagatgatctcttcctacctcgcgaacgattcgcagcttgatgacaggacgattcatctgctcttcagcgccaaccgctgggagaaaagagctttgatggagagcaagctacttagtggaactactctcattgtagaccgctactcctattcgggagtggccttttcagctgctaagggccttgacattgagtggtgcaaggctccagaaaatggacttattgctccagaccttgtaatatatcttgatgtacagccagagaaagcggctgaaagaggaggctatggggatgagcgatatgaaaagatagagttccaaaagaaagttgcagagcattaccattcactctgtgattcgacatggaaggtggttgatggtttccttcccatggagactgttgaagaaagactgagagatttagctacgagctgtattcaggactgccaagggaacccacttaccaatctggcctggtgaagtgccttatgcacaaagtaatggcggccacacatcgtcttgtgtgatcaaccatggtcgggatagaattaggcatccggaagcattggcctttccatttgctctatcagtattccttgtgcttatttataatttcaaagcgtgttttttctttcctaaagttaggccccggttaaaacctctagagctaattgttagctaactaataagttgttagttggttttagctgggttgagacagctacaactaatgactatttgagaggtatagctaacaattagtcagtctattatctgatctgatccgtttaaaacctttcagttaattttagatgccaactattagttttagaggtttggaacaggacctagtctgtctgccggtgtacggattttgtgtaacgtgaaacatgtgagagtgcaaaacacttaaattgc

SEQ ID NO: 7019 - protein, 255 aa, Zea mays subsp. mays
  peptide (1)..(255): Ceres Seq. ID no. 12373563
  misc_feature (58)..(234): Pfam Name: Thymidylate kinase Pfam Description: Thymidylate kinase
  misc_feature (43)..(255): Homolog of NCBI NO: 27261100 NR Description: putative thymidylate kinase [Oryza sativa
  misc_feature (40)..(255): Homolog of NCBI NO: 21553651 NR Description: thymidylate kinase-like protein [Arabidopsis
  misc_feature (40)..(255): Homolog of NCBI NO: 30697225 NR Description: thymidylate kinase - like protein [Arabidopsis
  misc_feature (40)..(255): Homolog of NCBI NO: 30697228 NR Description: thymidylate kinase - like protein [Arabidopsis
  misc_feature (40)..(255): Homolog of NCBI NO: 15912289 NR Description: AT5g59440/f2o15_100 [Arabidopsis thaliana]
  misc_feature (59)..(216): Homolog of NCBI NO: 25288285 NR Description: dTMP kinase (EC 2.7.4.9) [imported] - Arabidopsis (fragment) >gi|3493131|gb|AAC33288.1| thymidylate kinase
  misc_feature (48)..(239): Homolog of NCBI NO: 28573735 NR Description: CG5757-PA [Drosophila melanogaster]
  misc_feature (48)..(239): Homolog of NCBI NO: 40215537 NR Description: RE69454p [Drosophila melanogaster]
  misc_feature (52)..(255): Homolog of NCBI NO: 27686381 NR Description: similar to Thymidylate kinase (dTMP kinase)
  misc_feature (52)..(255): Homolog of NCBI NO: 291900 NR Description: thymidylate kinase
MTALVRLAGRAASRSRVGIAAAAAPPPVGLSVQRRRAFQGVRMETGGSKGGRGALVVLEGLDRSGKTSQCARLLSFLKGKGYNAEGWSFPDRATSVGQMISSYLANDSQLDDRTIHLLFSANRWEKRALMESKLLSGTTLIVDRYSYSGVAFSAAKGLDIEWCKAPENGLIAPDLVIYLDVQPEKAAERGGYGDERYEKIEFQKKVAEHYHSLCDSTWKVVDGFLPMETVEERLRDLATSCIQDCQGNPLTNLAW

SEQ ID NO: 7020 - protein, 213 aa, Zea mays subsp. mays
  peptide (1)..(213): Ceres Seq. ID no. 12373564
  misc_feature (16)..(192): Pfam Name: Thymidylate kinase Pfam Description: Thymidylate kinase
  misc_feature (1)..(213): Homolog of NCBI NO: 27261100 NR Description: putative thymidylate kinase [Oryza sativa
  misc_feature (1)..(213): Homolog of NCBI NO: 21553651 NR Description: thymidylate kinase-like protein [Arabidopsis
  misc_feature (1)..(213): Homolog of NCBI NO: 30697225 NR Description: thymidylate kinase - like protein [Arabidopsis
  misc_feature (1)..(213): Homolog of NCBI NO: 30697228 NR Description: thymidylate kinase - like protein [Arabidopsis
  misc_feature (1)..(213): Homolog of NCBI NO: 15912289 NR Description: AT5g59440/f2o15_100 [Arabidopsis thaliana]
  misc_feature (17)..(174): Homolog of NCBI NO: 25288285 NR Description: dTMP kinase (EC 2.7.4.9) [imported] - Arabidopsis (fragment) >gi|3493131|gb|AAC33288.1| thymidylate kinase
  misc_feature (6)..(197): Homolog of NCBI NO: 28573735 NR Description: CG5757-PA [Drosophila melanogaster]
  misc_feature (6)..(197): Homolog of NCBI NO: 40215537 NR Description: RE69454p [Drosophila melanogaster]
  misc_feature (10)..(213): Homolog of NCBI NO: 27686381 NR Description: similar to Thymidylate kinase (dTMP kinase)
  misc_feature (10)..(213): Homolog of NCBI NO: 291900 NR Description: thymidylate kinase
METGGSKGGRGALVVLEGLDRSGKTSQCARLLSFLKGKGYNAEGWSFPDRATSVGQMISSYLANDSQLDDRTIHLLFSANRWEKRALMESKLLSGTTLIVDRYSYSGVAFSAAKGLDIEWCKAPENGLIAPDLVIYLDVQPEKAAERGGYGDERYEKIEFQKKVAEHYHSLCDSTWKVVDGFLPMETVEERLRDLATSCIQDCQGNPLTNLAW

SEQ ID NO: 7021 - protein, 157 aa, Zea mays subsp. mays
  peptide (1)..(157): Ceres Seq. ID no. 12373565
  misc_feature (1)..(136): Pfam Name: Thymidylate kinase Pfam Description: Thymidylate kinase
  misc_feature (1)..(118): Homolog of NCBI NO: 25288285 NR Description: dTMP kinase (EC 2.7.4.9) [imported] - Arabidopsis (fragment) >gi|3493131|gb|AAC33288.1| thymidylate kinase
  misc_feature (1)..(141): Homolog of NCBI NO: 28573735 NR Description: CG5757-PA [Drosophila melanogaster]
  misc_feature (1)..(141): Homolog of NCBI NO: 40215537 NR Description: RE69454p [Drosophila melanogaster]
  misc_feature (1)..(157): Homolog of NCBI NO: 21553651 NR Description: thymidylate kinase-like protein [Arabidopsis
  misc_feature (1)..(157): Homolog of NCBI NO: 30697228 NR Description: thymidylate kinase - like protein [Arabidopsis
  misc_feature (1)..(157): Homolog of NCBI NO: 15912289 NR Description: AT5g59440/f2o15_100 [Arabidopsis thaliana]
  misc_feature (1)..(157): Homolog of NCBI NO: 30697225 NR Description: thymidylate kinase - like protein [Arabidopsis
  misc_feature (1)..(157): Homolog of NCBI NO: 27261100 NR Description: putative thymidylate kinase [Oryza sativa
  misc_feature (1)..(157): Homolog of NCBI NO: 27686381 NR Description: similar to Thymidylate kinase (dTMP kinase)
  misc_feature (1)..(157): Homolog of NCBI NO: 291900 NR Description: thymidylate kinase
MISSYLANDSQLDDRTIHLLFSANRWEKRALMESKLLSGTTLIVDRYSYSGVAFSAAKGLDIEWCKAPENGLIAPDLVIYLDVQPEKAAERGGYGDERYEKIEFQKKVAEHYHSLCDSTWKVVDGFLPMETVEERLRDLATSCIQDCQGNPLTNLAW

SEQ ID NO: 7022 - DNA, 1738 bp, Zea mays subsp. mays
  misc_feature (1)..(1738): Ceres Seq. ID no. 12381225
  misc_feature: MA Experiment ID: 108528 Result: Down-regulated in Transcription
  misc_feature: MA Experiment 108528 PARAMETER Experiment Name: Zm_Imbibed_Seeds_P Parameter: Age (day) Value: 5 vs. 2
  misc_feature: MA Experiment 108528 PARAMETER Experiment Name: Zm_Imbibed_Seeds_P Parameter: Organism Value: Zea mays
  misc_feature: MA Experiment 108528 PARAMETER Experiment Name: Zm_Imbibed_Seeds_P Parameter: Plant Line Value: 35A19
  misc_feature: MA Experiment 108528 PARAMETER Experiment Name: Zm_Imbibed_Seeds_P Parameter: Tissue Value: Aerial vs. Embryo
  misc_feature: MA Experiment ID: 108543 Result: Up-regulated in Transcription
  misc_feature: MA Experiment ID: 108546 Result: Up-regulated in Transcription
  misc_feature: MA Experiment 108546 PARAMETER Experiment Name: Zm_Imbibed_Seeds_P Parameter: Age (day) Value: 3 vs. 2
  misc_feature: MA Experiment 108546 PARAMETER Experiment Name: Zm_Imbibed_Seeds_P Parameter: Organism Value: Zea mays
  misc_feature: MA Experiment 108546 PARAMETER Experiment Name: Zm_Imbibed_Seeds_P Parameter: Plant Line Value: 35A19
  misc_feature: MA Experiment 108546 PARAMETER Experiment Name: Zm_Imbibed_Seeds_P Parameter: Tissue Value: Roots vs. Embryo
  misc_feature: MA Experiment ID: 108547 Result: Down-regulated in Transcription
  misc_feature: MA Experiment 108547 PARAMETER Experiment Name: Zm_Imbibed_Seeds_P Parameter: Age (day) Value: 4 vs. 2
  misc_feature: MA Experiment 108547 PARAMETER Experiment Name: Zm_Imbibed_Seeds_P Parameter: Organism Value: Zea mays
  misc_feature: MA Experiment 108547 PARAMETER Experiment Name: Zm_Imbibed_Seeds_P Parameter: Plant Line Value: 35A19
  misc_feature: MA Experiment 108547 PARAMETER Experiment Name: Zm_Imbibed_Seeds_P Parameter: Tissue Value: Aerial vs. Embryo
  misc_feature: MA Experiment ID: 20000492 Result: Down-regulated in Transcription
  misc_feature: MA Experiment 20000492 PARAMETER Experiment Name: Zm_Hybrid_Seed_Dev_P Parameter: DAP Value: 12
  misc_feature: MA Experiment 20000492 PARAMETER Experiment Name: Zm_Hybrid_Seed_Dev_P Parameter: Organism Value: Zea mays
  misc_feature: MA Experiment 20000492 PARAMETER Experiment Name: Zm_Hybrid_Seed_Dev_P Parameter: Plant Line Value: 35A19
  misc_feature: MA Experiment 20000492 PARAMETER Experiment Name: Zm_Hybrid_Seed_Dev_P Parameter: Tissue Value: Fert Kernel vs. Unfert Floret
  misc_feature: MA Experiment ID: 20000535 Result: Down-regulated in Transcription
  misc_feature: MA Experiment 20000535 PARAMETER Experiment Name: Zm_Hybrid_Seed_Dev_P Parameter: DAP Value: 30 vs. 12
  misc_feature: MA Experiment 20000535 PARAMETER Experiment Name: Zm_Hybrid_Seed_Dev_P Parameter: Organism Value: Zea mays
  misc_feature: MA Experiment 20000535 PARAMETER Experiment Name: Zm_Hybrid_Seed_Dev_P Parameter: Plant Line Value: 35A19
  misc_feature: MA Experiment 20000535 PARAMETER Experiment Name: Zm_Hybrid_Seed_Dev_P Parameter: Tissue Value: Embryo vs. Unfert Floret
ccattacctagaacatcctaatcgaaaaattataagcaagcaaagcgcagacttgcataagcaaaccccagccgtcgcagacttgcataagcaagcaaagcgcaggcctcgctcggcctctcgccagttcttcctctcttcttcccgcgacgtacgtcacactgcagcctgcttgctactcttgatttatcatccctcttggtgccgagcaggcagacgtagctgctgcatctcctagctgcctgcctccgttgattatccgatcgacctgttcgacaacaacaagtgaggacgaaccaggcgatccaggtggggcccggccggcaatcaggtgaaaagttgagctgtgttgtcaagacagactgacagagacatcagtttctcgctcgcatcacatgcgtgcattctacgcgggcaagaagggcgatgagagcagtccgtcagctgatgtattagcaaccacaagagagagagggaagagaagagaacaatgagtatttattatccagcaaagagtccaaagggcccagtagcagcgttccctctacggtctgctctcgtcttcttcgtcacatcgttcggcttctacgtctgctacttctcctcacgtcagataatagccctggaaaccgaagcagaaacgacggccagcggaggcggagcagaacccacagagacccgttgcacaaataggcccgcgatcattccacatgggccacagacgcggtacgtgcacttcccgaggcccgccacctacgacaggggcgaatgcgtttgtaacccggtgcgcttcttcgtgatcgtgtcgacgcagaggtcggggagcgggtgggtggaggccttgctcaacagccaccccaacgtcagctccaacggcgaggtgttctccatgagggagaggagacagaacctctcctctgttctggggactcttgacaggctgtacggcatggactggctcaccagcgcggccaagaacgagtgcacggcggcgttcgggttcaagtggatgctcaaccagggactgatggaaaaccatcgcgacatcgtgaactatttgaacaggaagggtgcgatggtggtgttcctcttcaggaggaacacgctgcggaggctcatctctgtggtggccaacaactacgacaggagagcgaggcagctcaacggcgtccacaaatcacacgttcattccaaagaggaggctgaggtcctcgcaaggttcaggccggagctggacgcgccggctctgattccgagcatcagaaccgcccagcgcgccgtgagagcctgcctgcgccgcttcggcagcacgcgccacatggtcctctactacgaggacgtggtccgggacagcaggaaggcgttgtcccgggtgcaggagttcctcggggttccggcgagggagctgtccagcaagcatgtcaagatccacaccaggcccctcccggacctcgtcggcaactgggaggaggtgaggcggacgctcgcgggacagagtacagccgattcctagatgatgatgcagagtaggtcaagtgtcgagtttctatggaggtaatacaagacaaacagtcaagcggagagatggagaaagcgatgggagttttatctccgcctttacattcctgtgtaggtatactggtttaaactcatcattgctgcttgggtagtggggtgccgcgtgggatagcaaaaggtaatgtattggttcaagtgcattacataaaccaaagtcttg

SEQ ID NO: 7023 - protein, 340 aa, Zea mays subsp. mays
  peptide (1)..(340): Ceres Seq. ID no. 12381226
  misc_feature (102)..(334): Pfam Name: Sulfotransferase domain Pfam Description: Sulfotransferase domain
  misc_feature (5)..(338): Homolog of NCBI NO: 33146729 NR Description: unknown protein [Oryza sativa (japonica
  misc_feature (8)..(334): Homolog of NCBI NO: 40823013 NR Description: At2g15730 [Arabidopsis thaliana]
  misc_feature (9)..(334): Homolog of NCBI NO: 29824462 NR Description: unknown protein [Oryza sativa (japonica
  misc_feature (8)..(334): Homolog of NCBI NO: 22329158 NR Description: hypothetical protein; protein id: At4g34420.1
  misc_feature (93)..(313): Homolog of NCBI NO: 15229813 NR Description: hypothetical protein; protein id: At3g50620.1
  misc_feature (9)..(237): Homolog of NCBI NO: 14029013 NR Description: Unknown protein [Oryza sativa]
  misc_feature (285)..(334): Homolog of NCBI NO: 14029013 NR Description: Unknown protein [Oryza sativa]
  misc_feature (110)..(338): Homolog of NCBI NO: 34904786 NR Description: contains ESTs to Arabidopsis thaliana chromosome3,At3g50620~unknown protein
  misc_feature (5)..(180): Homolog of NCBI NO: 34904786 NR Description: contains ESTs to Arabidopsis thaliana chromosome3,At3g50620~unknown protein
  misc_feature (237)..(334): Homolog of NCBI NO: 25411661 NR Description: hypothetical protein At2g15730 [imported] - thaliana >gi|4335739|gb|AAD17417.1| hypothetical protein
MSIYYPAKSPKGPVAAFPLRSALVFFVTSFGFYVCYFSSRQIIALETEAETTASGGGAEPTETRCTNRPAIIPHGPQTRYVHFPRPATYDRGECVCNPVRFFVIVSTQRSGSGWVEALLNSHPNVSSNGEVFSMRERRQNLSSVLGTLDRLYGMDWLTSAAKNECTAAFGFKWMLNQGLMENHRDIVNYLNRKGAMVVFLFRRNTLRRLISVVANNYDRRARQLNGVHKSHVHSKEEAEVLARFRPELDAPALIPSIRTAQRAVRACLRRFGSTRHMVLYYEDVVRDSRKALSRVQEFLGVPARELSSKHVKIHTRPLPDLVGNWEEVRRTLAGQSTADS

SEQ ID NO: 7024 - protein, 207 aa, Zea mays subsp. mays
  peptide (1)..(207): Ceres Seq. ID no. 12381227
  misc_feature (1)..(201): Pfam Name: Sulfotransferase domain Pfam Description: Sulfotransferase domain
  misc_feature (1)..(205): Homolog of NCBI NO: 33146729 NR Description: unknown protein [Oryza sativa (japonica
  misc_feature (1)..(201): Homolog of NCBI NO: 40823013 NR Description: At2g15730 [Arabidopsis thaliana]
  misc_feature (1)..(201): Homolog of NCBI NO: 29824462 NR Description: unknown protein [Oryza sativa (japonica
  misc_feature (1)..(201): Homolog of NCBI NO: 22329158 NR Description: hypothetical protein; protein id: At4g34420.1
  misc_feature (1)..(180): Homolog of NCBI NO: 15229813 NR Description: hypothetical protein; protein id: At3g50620.1
  misc_feature (1)..(104): Homolog of NCBI NO: 14029013 NR Description: Unknown protein [Oryza sativa]
  misc_feature (152)..(201): Homolog of NCBI NO: 14029013 NR Description: Unknown protein [Oryza sativa]
  misc_feature (1)..(205): Homolog of NCBI NO: 34904786 NR Description: contains ESTs to Arabidopsis thaliana chromosome3,At3g50620~unknown protein
  misc_feature (1)..(47): Homolog of NCBI NO: 34904786 NR Description: contains ESTs to Arabidopsis thaliana chromosome3,At3g50620~unknown protein
  misc_feature (104)..(201): Homolog of NCBI NO: 25411661 NR Description: hypothetical protein At2g15730 [imported] - thaliana >gi|4335739|gb|AAD17417.1| hypothetical protein
MRERRQNLSSVLGTLDRLYGMDWLTSAAKNECTAAFGFKWMLNQGLMENHRDIVNYLNRKGAMVVFLFRRNTLRRLISVVANNYDRRARQLNGVHKSHVHSKEEAEVLARFRPELDAPALIPSIRTAQRAVRACLRRFGSTRHMVLYYEDVVRDSRKALSRVQEFLGVPARELSSKHVKIHTRPLPDLVGNWEEVRRTLAGQSTADS

SEQ ID NO: 7025 - protein, 187 aa, Zea mays subsp. mays
  peptide (1)..(187): Ceres Seq. ID no. 12381228
  misc_feature (1)..(181): Pfam Name: Sulfotransferase domain Pfam Description: Sulfotransferase domain
  misc_feature (1)..(185): Homolog of NCBI NO: 33146729 NR Description: unknown protein [Oryza sativa (japonica
  misc_feature (1)..(181): Homolog of NCBI NO: 40823013 NR Description: At2g15730 [Arabidopsis thaliana]
  misc_feature (1)..(181): Homolog of NCBI NO: 29824462 NR Description: unknown protein [Oryza sativa (japonica
  misc_feature (1)..(181): Homolog of NCBI NO: 22329158 NR Description: hypothetical protein; protein id: At4g34420.1
  misc_feature (1)..(160): Homolog of NCBI NO: 15229813 NR Description: hypothetical protein; protein id: At3g50620.1
  misc_feature (1)..(84): Homolog of NCBI NO: 14029013 NR Description: Unknown protein [Oryza sativa]
  misc_feature (132)..(181): Homolog of NCBI NO: 14029013 NR Description: Unknown protein [Oryza sativa]
  misc_feature (1)..(185): Homolog of NCBI NO: 34904786 NR Description: contains ESTs to Arabidopsis thaliana chromosome3,At3g50620~unknown protein
  misc_feature (1)..(27): Homolog of NCBI NO: 34904786 NR Description: contains ESTs to Arabidopsis thaliana chromosome3,At3g50620~unknown protein
  misc_feature (84)..(181): Homolog of NCBI NO: 25411661 NR Description: hypothetical protein At2g15730 [imported] - thaliana >gi|4335739|gb|AAD17417.1| hypothetical protein
MDWLTSAAKNECTAAFGFKWMLNQGLMENHRDIVNYLNRKGAMVVFLFRRNTLRRLISVVANNYDRRARQLNGVHKSHVHSKEEAEVLARFRPELDAPALIPSIRTAQRAVRACLRRFGSTRHMVLYYEDVVRDSRKALSRVQEFLGVPARELSSKHVKIHTRPLPDLVGNWEEVRRTLAGQSTADS

SEQ ID NO: 7026 - DNA, 1150 bp, Zea mays subsp. mays
  misc_feature (1)..(1150): Ceres Seq. ID no. 12353887
  misc_feature: MA Experiment ID: 108544 Result: Down-regulated in Transcription
ctcgcccaaacagcagagcaagctatggcgcgcgcgcgtgacgccgccctccacctcctcctcctggcagcgggcgcactcctacttctagccgtggtgtctcaggccaccgtggtgccgccgagcgttccggcgggcgcccccgaggacccgcggtgccgcgcgctggcgccgcggcgtggcgcgctggcggtgtacccgagcgacatggagcaactgcagttccttctcaacgccaagttcgtggaggcggagtggttcctgcacgcggcgctgggacgtggcgtggacttcctggaccgcaacctgtccggcggcgggcctcggccgtccggggccaggaaggcggacctggacttccgcacaaccgaggtcgccgccgagctcgggtaccaggaggtgggccacatccgcgccatcaggcaggccgtgggcgggttcccgcggccgcccatcgacctcggcgccgaccgcttcgccatggtcatggacgacgccatgggcgtccgtctggacccgccgttcgacccgtacgccgggcccgtcaacttcctgctcgcctcctacgtgttcccgcacgtcaccgccgccgccgccatgggcatcggccccagcctcatgggctacgcctccaagcgcctccaggcgagcatcctggcggtggaggccgggcaggacgcggtgatccggctgctgctgtaccagcgcgccgacgatgccgtcccaccgtaccagggccacaccgtggccgacttcacgcgccggatctccgactggcgcaaccggatgtccgggtgcggcgccaaggacgaaggggtcaaggtgctggaccggcggcagggcgccgagcgccgcaccataagcaacatcctcggcgccggcgaggactcgctcgggttccaacgcacgcctgcggaggtgctccgcatcctctacggctcgcgcaacgagcagatccccggtgggttcctccccaggggtgccaatggaaccatcgctagaggtttcttccagctcgcgtagatcaaaagatactaacaacatcctagtctatcttgagacatcacaagctgatcgatggtagtaccaatcaacttgaaattaaaggtccaagaaatgtgataaaaaaacagaaaccattattattttg

SEQ ID NO: 7027 - protein, 340 aa, Zea mays subsp. mays
  peptide (1)..(340): Ceres Seq. ID no. 12353888
  misc_feature (38)..(200): Homolog of NCBI NO: 12083528 NR Description: similar to Arabidopsis thaliana hypothetical
  misc_feature (192)..(340): Homolog of NCBI NO: 12083528 NR Description: similar to Arabidopsis thaliana hypothetical
  misc_feature (69)..(336): Homolog of NCBI NO: 18401988 NR Description: dessication-related protein, putative; protein
  misc_feature (69)..(336): Homolog of NCBI NO: 25357137 NR Description: hypothetical protein T2J15.11 [imported] -
  misc_feature (69)..(336): Homolog of NCBI NO: 21593191 NR Description: dessication-related protein, putative
  misc_feature (68)..(336): Homolog of NCBI NO: 15228845 NR Description: putative protein; protein id: At3g62730.1, by cDNA: gi_15294283, supported by cDNA: gi_20147274 [Arabidopsis
  misc_feature (68)..(336): Homolog of NCBI NO: 38346151 NR Description: OSJNBb0118P14.11 [Oryza sativa (japonica
  misc_feature (68)..(330): Homolog of NCBI NO: 118926 NR Description: Desiccation-related protein PCC13-62 precursor
  misc_feature (82)..(275): Homolog of NCBI NO: 16263242 NR Description: Conserved hypothetical protein [Sinorhizobium
  misc_feature (256)..(332): Homolog of NCBI NO: 16263242 NR Description: Conserved hypothetical protein [Sinorhizobium
LAQTAEQAMARARDAALHLLLLAAGALLLLAVVSQATVVPPSVPAGAPEDPRCRALAPRRGALAVYPSDMEQLQFLLNAKFVEAEWFLHAALGRGVDFLDRNLSGGGPRPSGARKADLDFRTTEVAAELGYQEVGHIRAIRQAVGGFPRPPIDLGADRFAMVMDDAMGVRLDPPFDPYAGPVNFLLASYVFPHVTAAAAMGIGPSLMGYASKRLQASILAVEAGQDAVIRLLLYQRADDAVPPYQGHTVADFTRRISDWRNRMSGCGAKDEGVKVLDRRQGAERRTISNILGAGEDSLGFQRTPAEVLRILYGSRNEQIPGGFLPRGANGTIARGFFQLA

SEQ ID NO: 7028 - protein, 332 aa, Zea mays subsp. mays
  peptide (1)..(332): Ceres Seq. ID no. 12353889
  misc_feature (30)..(192): Homolog of NCBI NO: 12083528 NR Description: similar to Arabidopsis thaliana hypothetical
  misc_feature (184)..(332): Homolog of NCBI NO: 12083528 NR Description: similar to Arabidopsis thaliana hypothetical
  misc_feature (61)..(328): Homolog of NCBI NO: 18401988 NR Description: dessication-related protein, putative; protein
  misc_feature (61)..(328): Homolog of NCBI NO: 25357137 NR Description: hypothetical protein T2J15.11 [imported] -
  misc_feature (61)..(328): Homolog of NCBI NO: 21593191 NR Description: dessication-related protein, putative
  misc_feature (60)..(328): Homolog of NCBI NO: 15228845 NR Description: putative protein; protein id: At3g62730.1, by cDNA: gi_15294283, supported by cDNA: gi_20147274 [Arabidopsis
  misc_feature (60)..(328): Homolog of NCBI NO: 38346151 NR Description: OSJNBb0118P14.11 [Oryza sativa (japonica
  misc_feature (60)..(322): Homolog of NCBI NO: 118926 NR Description: Desiccation-related protein PCC13-62 precursor
  misc_feature (74)..(267): Homolog of NCBI NO: 16263242 NR Description: Conserved hypothetical protein [Sinorhizobium
  misc_feature (248)..(324): Homolog of NCBI NO: 16263242 NR Description: Conserved hypothetical protein [Sinorhizobium
MARARDAALHLLLLAAGALLLLAVVSQATVVPPSVPAGAPEDPRCRALAPRRGALAVYPSDMEQLQFLLNAKFVEAEWFLHAALGRGVDFLDRNLSGGGPRPSGARKADLDFRTTEVAAELGYQEVGHIRAIRQAVGGFPRPPIDLGADRFAMVMDDAMGVRLDPPFDPYAGPVNFLLASYVFPHVTAAAAMGIGPSLMGYASKRLQASILAVEAGQDAVIRLLLYQRADDAVPPYQGHTVADFTRRISDWRNRMSGCGAKDEGVKVLDRRQGAERRTISNILGAGEDSLGFQRTPAEVLRILYGSRNEQIPGGFLPRGANGTIARGFFQLA

SEQ ID NO: 7029 - protein, 271 aa, Zea mays subsp. mays
  peptide (1)..(271): Ceres Seq. ID no. 12353890
  misc_feature (1)..(131): Homolog of NCBI NO: 12083528 NR Description: similar to Arabidopsis thaliana hypothetical
  misc_feature (123)..(271): Homolog of NCBI NO: 12083528 NR Description: similar to Arabidopsis thaliana hypothetical
  misc_feature (1)..(267): Homolog of NCBI NO: 18401988 NR Description: dessication-related protein, putative; protein
  misc_feature (1)..(267): Homolog of NCBI NO: 25357137 NR Description: hypothetical protein T2J15.11 [imported] -
  misc_feature (1)..(267): Homolog of NCBI NO: 21593191 NR Description: dessication-related protein, putative
  misc_feature (1)..(267): Homolog of NCBI NO: 15228845 NR Description: putative protein; protein id: At3g62730.1, by cDNA: gi_15294283, supported by cDNA: gi_20147274 [Arabidopsis
  misc_feature (1)..(267): Homolog of NCBI NO: 38346151 NR Description: OSJNBb0118P14.11 [Oryza sativa (japonica
  misc_feature (1)..(261): Homolog of NCBI NO: 118926 NR Description: Desiccation-related protein PCC13-62 precursor
  misc_feature (13)..(206): Homolog of NCBI NO: 16263242 NR Description: Conserved hypothetical protein [Sinorhizobium
  misc_feature (187)..(263): Homolog of NCBI NO: 16263242 NR Description: Conserved hypothetical protein [Sinorhizobium
MEQLQFLLNAKFVEAEWFLHAALGRGVDFLDRNLSGGGPRPSGARKADLDFRTTEVAAELGYQEVGHIRAIRQAVGGFPRPPIDLGADRFAMVMDDAMGVRLDPPFDPYAGPVNFLLASYVFPHVTAAAAMGIGPSLMGYASKRLQASILAVEAGQDAVIRLLLYQRADDAVPPYQGHTVADFTRRISDWRNRMSGCGAKDEGVKVLDRRQGAERRTISNILGAGEDSLGFQRTPAEVLRILYGSRNEQIPGGFLPRGANGTIARGFFQLA

SEQ ID NO: 7030 - DNA, 790 bp, Zea mays subsp. mays
  misc_feature (1)..(790): Ceres Seq. ID no. 12403482
  misc_feature: MA Experiment ID: 20000534 Result: Down-regulated in Transcription
  misc_feature: MA Experiment 20000534 PARAMETER Experiment Name: Zm_Hybrid_Pollen_P Parameter: Age (day) Value: 8
  misc_feature: MA Experiment 20000534 PARAMETER Experiment Name: Zm_Hybrid_Pollen_P Parameter: Organism Value: Zea mays
  misc_feature: MA Experiment 20000534 PARAMETER Experiment Name: Zm_Hybrid_Pollen_P Parameter: Plant Line Value: 35A19
  misc_feature: MA Experiment 20000534 PARAMETER Experiment Name: Zm_Hybrid_Pollen_P Parameter: Tissue Value: Pollen vs. Aerial
aagagccaacagagcaacgcccaggcacacacgacacgaaccaggcagccagccgcggagggaggaaccctagcggaacaggtgacggcggcgcgctaccggtgacgggggatacggcggcatcgtcccctcctccatccccggcgcggcggcgccagcagccggcctgcaggctgtttgaagagctcgccatttaatctcaatggaagccaagtttttccgtttcctgaagctcgttggggtcggcttcaaagcgaggtcagagagccaaggccgtgagttgttccttaaactgggcttcagccatgaggtgcagttcaccgctcctccagctgtccgtgtcttctgcttcaaacccaacataatctgctgcaccggcatcgataaggacagggtgcaccagttcgccggcgccatccggagctctaaggctccagaggtgtacaaggggaaggggatcctgtacattgacgaggttatcaagctgaagcccggaaagaagcgaaaaaataagtgacgatccgaaggcgttacaactttttctgtcttttaaccccattcttcgcatttgtagtgatctggatctggggtctgctgtgttgtgttgtgtacttgcgttgtgctacacagatcaccattatcttacctttacctcagctgcatgtaggaccatgagtgggaataagttaccagtttgttgatatgagctggaacgttgctttgcgaattggattggattaccgagtgggatgttttgtttcaaacttgaagtctttcaatagattgttgc

SEQ ID NO: 7031 - protein, 104 aa, Zea mays subsp. mays
  peptide (1)..(104): Ceres Seq. ID no. 12403483
  misc_feature (12)..(88): Pfam Name: Ribosomal protein L6 Pfam Description: Ribosomal protein L6
  misc_feature (1)..(102): Homolog of NCBI NO: 18398731 NR Description: putative ribosomal protein L6; protein id: supported by cDNA: 692., supported by cDNA: gi_14994246 thaliana] >gi|14994247|gb|AAK73258.1| putative ribosomal protein
  misc_feature (1)..(102): Homolog of NCBI NO: 25411865 NR Description: probable ribosomal protein L6 [imported] -
  misc_feature (1)..(101): Homolog of NCBI NO: 11467124 NR Description: rpl6 [Marchantia polymorpha] MITOCHONDRIAL 60S RIBOSOMAL PROTEIN L6 >gi|282800|pir||S25981
  misc_feature (1)..(101): Homolog of NCBI NO: 38638291 NR Description: ribosomal protein L6 [Chara vulgaris]
  misc_feature (1)..(101): Homolog of NCBI NO: 22550351 NR Description: ribosomal protein L6 [Chaetosphaeridium globosum]
  misc_feature (1)..(101): Homolog of NCBI NO: 11466518 NR Description: ribosomal protein L6 [Reclinomonas americana]
  misc_feature (1)..(101): Homolog of NCBI NO: 22966107 NR Description: hypothetical protein [Rhodospirillum rubrum]
  misc_feature (1)..(99): Homolog of NCBI NO: 23022259 NR Description: hypothetical protein [Clostridium thermocellum
  misc_feature (1)..(104): Homolog of NCBI NO: 28144880 NR Description: putative chloroplast 50S ribosomal protein L6
  misc_feature (6)..(101): Homolog of NCBI NO: 6066163 NR Description: ribosomal protein L6 [Nephroselmis olivacea]
MEAKFFRFLKLVGVGFKARSESQGRELFLKLGFSHEVQFTAPPAVRVFCFKPNIICCTGIDKDRVHQFAGAIRSSKAPEVYKGKGILYIDEVIKLKPGKKRKNK

SEQ ID NO: 7032 - protein, 64 aa, Zea mays subsp. mays
  peptide (1)..(64): Ceres Seq. ID no. 12403484
EPTEQRPGTHDTNQAASRGGRNPSGTGDGGALPVTGDTAASSPPPSPARRRQQPACRLFEELAI

SEQ ID NO: 7033 - DNA, 838 bp, Zea mays subsp. mays
  misc_feature (1)..(838): Ceres Seq. ID no. 12336716
  misc_feature: MA Experiment ID: 20000535 Result: Up-regulated in Transcription
  misc_feature: MA Experiment 20000535 PARAMETER Experiment Name: Zm_Hybrid_Seed_Dev_P Parameter: DAP Value: 30 vs. 12
  misc_feature: MA Experiment 20000535 PARAMETER Experiment Name: Zm_Hybrid_Seed_Dev_P Parameter: Organism Value: Zea mays
  misc_feature: MA Experiment 20000535 PARAMETER Experiment Name: Zm_Hybrid_Seed_Dev_P Parameter: Plant Line Value: 35A19
  misc_feature: MA Experiment 20000535 PARAMETER Experiment Name: Zm_Hybrid_Seed_Dev_P Parameter: Tissue Value: Embryo vs. Unfert Floret
cgtggccgtagtggactacttcaatcgaagaggagtctctgcaatatttctcttcagaaggaatctgctccgccagttggtatcacagctagcgaataaccacgacagattcctgaagcagttaaacggaacacacaaggcgcatgtccacacagagcatgaggcccatatactcgcgagatacaagcccaggctgaacacgtcgtcgctaatacggaaactgaaacaggctgatgagtacacacgcgacgcccttgagaacctaaataacacccgccacatcactgtctactacgaggacatcgtccgcaacagaacaaggcttctcgacgccctggatttcctcggagtgccgaggagggagctggcgagtcggcacgtgaagatacacacgaagcccctgtcggagcagatcgagaactgggacgaagtntacagcgccctcaacggtacccagtacgagggcttcctgaatgccgctgactatacgtaatatgacgtcacggtctccacgtntcttgatgtagatgtaggtgtgtaggtatagcccccagctgtgactccttttgttcttgttttcgagtanccggccggccttctgcgtgcctgcctggcaggagttttgatgcgggggatggaggcgctttgccatggttgcgttcgagctcctggctagcccacccactagctttcctcatgtccatgtaacgaccctcgagcttctctcatctttggccgtccgcttgtaatgcttgtcgtcagtgatctcacccatgtcatgccatgccatgccttcgagggacaaagctgtgcacttgaacttgaggcttgtcttttc

SEQ ID NO: 7034 - protein, 163 aa, Zea mays subsp. mays
  peptide (1)..(163): Ceres Seq. ID no. 12336717
  misc_feature (3)..(162): Homolog of NCBI NO: 29824462 NR Description: unknown protein [Oryza sativa (japonica
  misc_feature (3)..(162): Homolog of NCBI NO: 33146729 NR Description: unknown protein [Oryza sativa (japonica
  misc_feature (3)..(162): Homolog of NCBI NO: 34904786 NR Description: contains ESTs to Arabidopsis thaliana chromosome3,At3g50620~unknown protein
  misc_feature (3)..(162): Homolog of NCBI NO: 40823013 NR Description: At2g15730 [Arabidopsis thaliana]
  misc_feature (3)..(158): Homolog of NCBI NO: 22329158 NR Description: hypothetical protein; protein id: At4g34420.1
  misc_feature (3)..(129): Homolog of NCBI NO: 15229813 NR Description: hypothetical protein; protein id: At3g50620.1
  misc_feature (53)..(162): Homolog of NCBI NO: 25411661 NR Description: hypothetical protein At2g15730 [imported] - thaliana >gi|4335739|gb|AAD17417.1| hypothetical protein
  misc_feature (53)..(162): Homolog of NCBI NO: 30679514 NR Description: expressed protein [Arabidopsis thaliana]
  misc_feature (19)..(119): Homolog of NCBI NO: 7485320 NR Description: hypothetical protein F10M10.190 - Arabidopsis >gi|4455187|emb|CAB36719.1| hypothetical protein [Arabidopsis >gi|7270392|emb|CAB80159.1| hypothetical protein [Arabidopsis
  misc_feature (69)..(162): Homolog of NCBI NO: 14029013 NR Description: Unknown protein [Oryza sativa]
  misc_feature (144)..(144): Xaa is any aa, unknown or other
VAVVDYFNRRGVSAIFLFRRNLLRQLVSQLANNHDRFLKQLNGTHKAHVHTEHEAHILARYKPRLNTSSLIRKLKQADEYTRDALENLNNTRHITVYYEDIVRNRTRLLDALDFLGVPRRELASRHVKIHTKPLSEQIENWDEXYSALNGTQYEGFLNAADYT

SEQ ID NO: 7035 - DNA, 1791 bp, Zea mays subsp. mays
  misc_feature (1)..(1791): Ceres Seq. ID no. 12407706
  misc_feature: MA Experiment ID: 108544 Result: Up-regulated in Transcription
  misc_feature: MA Experiment ID: 20000535 Result: Up-regulated in Transcription
  misc_feature: MA Experiment 20000535 PARAMETER Experiment Name: Zm_Hybrid_Seed_Dev_P Parameter: DAP Value: 30 vs. 12
  misc_feature: MA Experiment 20000535 PARAMETER Experiment Name: Zm_Hybrid_Seed_Dev_P Parameter: Organism Value: Zea mays
  misc_feature: MA Experiment 20000535 PARAMETER Experiment Name: Zm_Hybrid_Seed_Dev_P Parameter: Plant Line Value: 35A19
  misc_feature: MA Experiment 20000535 PARAMETER Experiment Name: Zm_Hybrid_Seed_Dev_P Parameter: Tissue Value: Embryo vs. Unfert Floret
aggcctcccactgcgtgtggggccgagccagcttgctccatcaagccgagagcccactcttctttctcacctcgcatcgcactccctcaatctctcgtctctatcgccgcatcgcttctctgccggagctccaacaacctcgcctcgcgcagcactccgctgaccctccctgactccctccctgccgctgggatggccgggaaacgagttacgggccgcgatgggcaagacgagggcggcgccaaggtcgggctcccggcgatggacctctccctcgcgttcccgcaggccacacctgcctccattttcccgccgtccgcttcggattattacccgtctgatgatttgctgaccagtgaagagcgctctatcaggatgaaggtcaggggtattatggaaaaagaaattgctcccattatgtcagcgtactgggaaaaggcagagtttccatttaatgccattcctaaacttgcaagccttggtgttgctggtggtacaataaagggttatgggtgcccaggactttccattacagccagtgctgttactatgtcagaaattgcacgggtatatgcaagctgttccacatttatactggtgcactcctctcttgcgatggtgacaatagctctttgcggatccgaggctcagaagcagaagtacttgccatcccttgctcaacttactactgttggctgttgggcattgacagagccaaattatggaagtgatgcgagctctttgagaaccctagcgaccaaggcacctggtgggtggcacatagatggtcaaaaacgctggatcggtaacagtactttcgccgatgtcctcgtcgtgttagccaggaatgcagacacgcaacagctaaatgggttcattgtgcggaaaggagctcctggcctgaaagctacaaagatcgagaacaaaattggcctcaggatggttcagaacggtgacatagttttgaacaaggtgttcgtccctgacgaagaccggttgccaggcatcaactcgtttcaggacatcagcaaggtgctcgccatttcacgcattatggtggcatggcaaccggttggcatatcaatgggggtctttgacatgtgccaccggtatctgaaagaaaggaagcagttcggagtccctctggcggcgtttcagctgaaccaagagaagctcgcccggatgctcggtaacgtccagtcgatggtcctcgtcggctggcgtctctgcaagctctacgagtcggggaaaatgacgccgggccacgctagcctagggaaggcttggaactccaggacggcccgcgaggtggtctcccttggccgagagctgctgggtgggaacgggattttggccgacttccttgtagccaaggcgttctgcgacctggagcccatctactcgtacgagggcacgtacgacattaacagcctggtgaccggcagggaggtcaccgggatcgcgagcttcaggcccgccgcgccagcgaaagcccggctgtgacgtgataacctgtgtccccgtgttgcagggaactggaggcgaataaatcatgatcaggtcgtcgtcgtcgtcgccatcgaacaaactgagcacgttcctggaacccgcccggtcaacgttggctgctcacatggtgtaccgtagccgagtgcggatgggaacggattcctagatatatgtagtactatacgaagatatctgttgcgggtggattactgtaaaccgggtctaatctctgttgcggtgtttgccgtctttggtcagaaggtaaggggggaacgccaggcg

SEQ ID NO: 7036 - protein, 500 aa, Zea mays subsp. mays
  peptide (1)..(500): Ceres Seq. ID no. 12407707
  misc_feature (235)..(333): Pfam Name: Acyl-CoA dehydrogenase, middle domain Pfam Description: Acyl-CoA dehydrogenase, middle domain
  misc_feature (65)..(500): Homolog of NCBI NO: 34896018 NR Description: ESTs AU056822(S20908),C26441(C12328), correspond to a region of the predicted gene.~Similar to
  misc_feature (85)..(497): Homolog of NCBI NO: 15231059 NR Description: acyl-coA dehydrogenase; protein id: At3g51840.1, by cDNA: 3844., supported by cDNA: gi_1657620, supported by cDNA:
  misc_feature (90)..(490): Homolog of NCBI NO: 29827888 NR Description: putative glutaryl-CoA dehydrogenase [Streptomyces
  misc_feature (105)..(499): Homolog of NCBI NO: 28829336 NR Description: similar to Arabidopsis thaliana (Mouse-ear
  misc_feature (108)..(490): Homolog of NCBI NO: 25026880 NR Description: putative acyl-CoA dehydrogenase [Corynebacterium
  misc_feature (92)..(490): Homolog of NCBI NO: 25027279 NR Description: putative glutaryl-CoA dehydrogenase precursor
  misc_feature (108)..(490): Homolog of NCBI NO: 29827260 NR Description: putative glutaryl-CoA dehydrogenase [Streptomyces
  misc_feature (102)..(490): Homolog of NCBI NO: 15805578 NR Description: glutaryl-CoA dehydrogenase, putative [Deinococcus
  misc_feature (109)..(491): Homolog of NCBI NO: 11498596 NR Description: glutaryl-CoA dehydrogenase (gcdH) [Archaeoglobus
  misc_feature (109)..(491): Homolog of NCBI NO: 23135439 NR Description: hypothetical protein [Cytophaga hutchinsonii]
RPPTACGAEPACSIKPRAHSSFSPRIALPQSLVSIAASLLCRSSNNLASRSTPLTLPDSLPAAGMAGKRVTGRDGQDEGGAKVGLPAMDLSLAFPQATPASIFPPSASDYYPSDDLLTSEERSIRMKVRGIMEKEIAPIMSAYWEKAEFPFNAIPKLASLGVAGGTIKGYGCPGLSITASAVTMSEIARVYASCSTFILVHSSLAMVTIALCGSEAQKQKYLPSLAQLTTVGCWALTEPNYGSDASSLRTLATKAPGGWHIDGQKRWIGNSTFADVLVVLARNADTQQLNGFIVRKGAPGLKATKIENKIGLRMVQNGDIVLNKVFVPDEDRLPGINSFQDISKVLAISRIMVAWQPVGISMGVFDMCHRYLKERKQFGVPLAAFQLNQEKLARMLGNVQSMVLVGWRLCKLYESGKMTPGHASLGKAWNSRTAREVVSLGRELLGGNGILADFLVAKAFCDLEPIYSYEGTYDINSLVTGREVTGIASFRPAAPAKARL

SEQ ID NO: 7037 - protein, 436 aa, Zea mays subsp. mays
  peptide (1)..(436): Ceres Seq. ID no. 12407708
  misc_feature (171)..(269): Pfam Name: Acyl-CoA dehydrogenase, middle domain Pfam Description: Acyl-CoA dehydrogenase, middle domain
  misc_feature (1)..(436): Homolog of NCBI NO: 34896018 NR Description: ESTs AU056822(S20908),C26441(C12328), correspond to a region of the predicted gene.~Similar to
  misc_feature (21)..(433): Homolog of NCBI NO: 15231059 NR Description: acyl-coA dehydrogenase; protein id: At3g51840.1, by cDNA: 3844., supported by cDNA: gi_1657620, supported by cDNA:
  misc_feature (26)..(426): Homolog of NCBI NO: 29827888 NR Description: putative glutaryl-CoA dehydrogenase [Streptomyces
  misc_feature (41)..(435): Homolog of NCBI NO: 28829336 NR Description: similar to Arabidopsis thaliana (Mouse-ear
  misc_feature (44)..(426): Homolog of NCBI NO: 25026880 NR Description: putative acyl-CoA dehydrogenase [Corynebacterium
  misc_feature (28)..(426): Homolog of NCBI NO: 25027279 NR Description: putative glutaryl-CoA dehydrogenase precursor
  misc_feature (44)..(426): Homolog of NCBI NO: 29827260 NR Description: putative glutaryl-CoA dehydrogenase [Streptomyces
  misc_feature (38)..(426): Homolog of NCBI NO: 15805578 NR Description: glutaryl-CoA dehydrogenase, putative [Deinococcus
  misc_feature (45)..(427): Homolog of NCBI NO: 11498596 NR Description: glutaryl-CoA dehydrogenase (gcdH) [Archaeoglobus
  misc_feature (45)..(427): Homolog of NCBI NO: 23135439 NR Description: hypothetical protein [Cytophaga hutchinsonii]
MAGKRVTGRDGQDEGGAKVGLPAMDLSLAFPQATPASIFPPSASDYYPSDDLLTSEERSIRMKVRGIMEKEIAPIMSAYWEKAEFPFNAIPKLASLGVAGGTIKGYGCPGLSITASAVTMSEIARVYASCSTFILVHSSLAMVTIALCGSEAQKQKYLPSLAQLTTVGCWALTEPNYGSDASSLRTLATKAPGGWHIDGQKRWIGNSTFADVLVVLARNADTQQLNGFIVRKGAPGLKATKIENKIGLRMVQNGDIVLNKVFVPDEDRLPGINSFQDISKVLAISRIMVAWQPVGISMGVFDMCHRYLKERKQFGVPLAAFQLNQEKLARMLGNVQSMVLVGWRLCKLYESGKMTPGHASLGKAWNSRTAREVVSLGRELLGGNGILADFLVAKAFCDLEPIYSYEGTYDINSLVTGREVTGIASFRPAAPAKARL

SEQ ID NO: 7038 - protein, 413 aa, Zea mays subsp. mays
  peptide (1)..(413): Ceres Seq. ID no. 12407709
  misc_feature (148)..(246): Pfam Name: Acyl-CoA dehydrogenase, middle domain Pfam Description: Acyl-CoA dehydrogenase, middle domain
  misc_feature (1)..(413): Homolog of NCBI NO: 34896018 NR Description: ESTs AU056822(S20908),C26441(C12328), correspond to a region of the predicted gene.~Similar to
  misc_feature (1)..(410): Homolog of NCBI NO: 15231059 NR Description: acyl-coA dehydrogenase; protein id: At3g51840.1, by cDNA: 3844., supported by cDNA: gi_1657620, supported by cDNA:
  misc_feature (3)..(403): Homolog of NCBI NO: 29827888 NR Description: putative glutaryl-CoA dehydrogenase [Streptomyces
  misc_feature (18)..(412): Homolog of NCBI NO: 28829336 NR Description: similar to Arabidopsis thaliana (Mouse-ear
  misc_feature (21)..(403): Homolog of NCBI NO: 25026880 NR Description: putative acyl-CoA dehydrogenase [Corynebacterium
  misc_feature (5)..(403): Homolog of NCBI NO: 25027279 NR Description: putative glutaryl-CoA dehydrogenase precursor
  misc_feature (21)..(403): Homolog of NCBI NO: 29827260 NR Description: putative glutaryl-CoA dehydrogenase [Streptomyces
  misc_feature (15)..(403): Homolog of NCBI NO: 15805578 NR Description: glutaryl-CoA dehydrogenase, putative [Deinococcus
  misc_feature (22)..(404): Homolog of NCBI NO: 11498596 NR Description: glutaryl-CoA dehydrogenase (gcdH) [Archaeoglobus
  misc_feature (22)..(404): Homolog of NCBI NO: 23135439 NR Description: hypothetical protein [Cytophaga hutchinsonii]
MDLSLAFPQATPASIFPPSASDYYPSDDLLTSEERSIRMKVRGIMEKEIAPIMSAYWEKAEFPFNAIPKLASLGVAGGTIKGYGCPGLSITASAVTMSEIARVYASCSTFILVHSSLAMVTIALCGSEAQKQKYLPSLAQLTTVGCWALTEPNYGSDASSLRTLATKAPGGWHIDGQKRWIGNSTFADVLVVLARNADTQQLNGFIVRKGAPGLKATKIENKIGLRMVQNGDIVLNKVFVPDEDRLPGINSFQDISKVLAISRIMVAWQPVGISMGVFDMCHRYLKERKQFGVPLAAFQLNQEKLARMLGNVQSMVLVGWRLCKLYESGKMTPGHASLGKAWNSRTAREVVSLGRELLGGNGILADFLVAKAFCDLEPIYSYEGTYDINSLVTGREVTGIASFRPAAPAKARL

SEQ ID NO: 7039 - DNA, 1391 bp, Zea mays subsp. mays
  misc_feature (1)..(1391): Ceres Seq. ID no. 12406330
  misc_feature: MA Experiment ID: 108522 Result: Up-regulated in Transcription
  misc_feature: MA Experiment 108522 PARAMETER Experiment Name: Zm_42deg_Heat_P Parameter: Age (day) Value: 8
  misc_feature: MA Experiment 108522 PARAMETER Experiment Name: Zm_42deg_Heat_P Parameter: Organism Value: Zea mays
  misc_feature: MA Experiment 108522 PARAMETER Experiment Name: Zm_42deg_Heat_P Parameter: Plant Line Value: 35A19
  misc_feature: MA Experiment 108522 PARAMETER Experiment Name: Zm_42deg_Heat_P Parameter: Temperature (deg C) Value: 42 vs. 22
  misc_feature: MA Experiment 108522 PARAMETER Experiment Name: Zm_42deg_Heat_P Parameter: Timepoint (hr) Value: 1
  misc_feature: MA Experiment 108522 PARAMETER Experiment Name: Zm_42deg_Heat_P Parameter: Tissue Value: Aerial
  misc_feature: MA Experiment ID: 20000535 Result: Up-regulated in Transcription
  misc_feature: MA Experiment 20000535 PARAMETER Experiment Name: Zm_Hybrid_Seed_Dev_P Parameter: DAP Value: 30 vs. 12
  misc_feature: MA Experiment 20000535 PARAMETER Experiment Name: Zm_Hybrid_Seed_Dev_P Parameter: Organism Value: Zea mays
  misc_feature: MA Experiment 20000535 PARAMETER Experiment Name: Zm_Hybrid_Seed_Dev_P Parameter: Plant Line Value: 35A19
  misc_feature: MA Experiment 20000535 PARAMETER Experiment Name: Zm_Hybrid_Seed_Dev_P Parameter: Tissue Value: Embryo vs. Unfert Floret
gcacgagaccattacctagaacatcctaatcgaaaaaagcagtcatgactcatgacactagaatggaatgggatggtgttcgtgcatcacgcgtcggcgagcttgggcgtgggtatgtggctgtcgacgaaggccttcatatcctgcagcaccttggtagcctcggggagctccgggaagccgtagaagccgtggaacatgcctgggtactcggccaccagcacctccttccccttccggcgcagcacgtcggcgtagcgtcgctgccagtccatgagcgggtcgaagccgccgatgatgaccatggcgggcgggaagtcgtcggcgaggtcggcgttgtcgtcggtgacgtgcgcggccgggtggtcgcgggtggcaccgtcgggcaggaacgcggtccacgagaagtcggagcgcctgaggttgaccacgggcgccacgccctctagctccagctccgacggcgtgcgctccacgccgccgaagtagggctgcacggggaagacgcccgcgacgcggagggcccgcgcggacggctgccacgccgccgcccagcggttggcgacgtggtgcacgatgtttccgcccgcgctctccccggccaggaagcagctgccgaggtcgacgggcacgccgtcgtccaggcccgggacgccgccgcgggcgtcgaggaagcgcagcgcgtcgacgccgtcgtcgtaggcggcgggccagcggtgctccggggccaggcggtagttgacggacaccacgacggcgccgagcgcggcgcagaggcggcggcacacgccgttgaagggcccgatggccggggagaagagcgcgaagccgccgccgtggaagtacacgaccacggggagcgggcggtccgccgcggccggcgcgaagacgcgcgcccagatgccgcgggacgcgtccatggtcacgtcgtaggagcgcaccccggaggcgtccgggcgcgggctggcgcgcgcgctcaggagccggtcgatcacgccgtacaggcagcggttcaccgtcccgtcgcggcgctccacggcgtcgatggccgccgtcagcccggccagctggaggcgcaccgacagcggcagcggtggtggcttcggcttcggcttatctgctgctccttggttgctgtcgctggccatggactccattccttcgctctggcctgctcgtcggtatctttgatcagtgtttccctggggttggacgtgcgatggagtatatagctgacagctcgtgtgccgtgtgggcagcggagcaggtagagagtttgagacggaactgtcggtatggcggcgcgtgcgtgccctgtctgtatttgtcaagacgggcgtggcgacgtgtcgcctggccttccacaaacggcaacggagagaccctgtctg

SEQ ID NO: 7040 - protein, 134 aa, Zea mays subsp. mays
  peptide (1)..(134): Ceres Seq. ID no. 12406331
MTHDTRMEWDGVRASRVGELGRGYVAVDEGLHILQHLGSLGELREAVEAVEHAWVLGHQHLLPLPAQHVGVASLPVHERVEAADDDHGGREVVGEVGVVVGDVRGRVVAGGTVGQERGPREVGAPEVDHGRHAL

SEQ ID NO: 7041 - protein, 128 aa, Zea mays subsp. mays
  peptide (1)..(128): Ceres Seq. ID no. 12406332
MEWDGVRASRVGELGRGYVAVDEGLHILQHLGSLGELREAVEAVEHAWVLGHQHLLPLPAQHVGVASLPVHERVEAADDDHGGREVVGEVGVVVGDVRGRVVAGGTVGQERGPREVGAPEVDHGRHAL

SEQ ID NO: 7042 - protein, 71 aa, Zea mays subsp. mays
  peptide (1)..(71): Ceres Seq. ID no. 12406333
  misc_feature (1)..(71): Homolog of NCBI NO: 13592175 NR Description: ppg3 [Leishmania major]
  misc_feature (1)..(71): Homolog of NCBI NO: 13592175 NR Description: ppg3 [Leishmania major]
  misc_feature (1)..(71): Homolog of NCBI NO: 13592175 NR Description: ppg3 [Leishmania major]
  misc_feature (1)..(71): Homolog of NCBI NO: 13592175 NR Description: ppg3 [Leishmania major]
MSGSKPPMMTMAGGKSSARSALSSVTCAAGWSRVAPSGRNAVHEKSERLRLTTGATPSSSSSDGVRSTPPK

SEQ ID NO: 7043 - DNA, 1793 bp, Zea mays subsp. mays
  misc_feature (1)..(1793): Ceres Seq. ID no. 12408952
  misc_feature: MA Experiment ID: 108536 Result: Down-regulated in Transcription
  misc_feature: MA Experiment 108536 PARAMETER Experiment Name: Zm_Meristem_P Parameter: Age (day) Value: 8
  misc_feature: MA Experiment 108536 PARAMETER Experiment Name: Zm_Meristem_P Parameter: Organism Value: Zea mays
  misc_feature: MA Experiment 108536 PARAMETER Experiment Name: Zm_Meristem_P Parameter: Plant Line Value: 35A19
  misc_feature: MA Experiment 108536 PARAMETER Experiment Name: Zm_Meristem_P Parameter: Tissue Value: Shoot Meristem vs. Above Shoot Meristem
  misc_feature: MA Experiment ID: 108543 Result: Up-regulated in Transcription
aatcacgcacggacgataaatccaagtaaggaaatccccgatgatctcctgcgcgtcgcagcgccagccactcgattagtggagtccaccaaccaagcacgcgtccctccccgtcccagatcccatcccgcggcagccggtcagtccgatccatctccagtacccagcccgtcacccgccttccccgttcgctctcgtcggcgcgcgatggagggtctcatcaaggggttggtccacgtggccatcgacgccgtggaggacgccgtgagggagagggaccacggccgcgccgacgacgacgaggtgccgaggaggagggcggcccaaagctccgatccagatgacgacggggaggaggaacgcgacgaacgatcgcggtcgacgtgggccgaggtcgtctccgagcagaagtgcagcgatccggacgagcgccgggaccatcgaagctcggggcgggacaatcgccatgagaggagggatgacgagggttggaaaagggccgatggtcggaaccagcagcagcaccacgcaggccggcagaaccagtgcgagggggaggaaaggtgggatggcagtggcagccggcggcgtcagcaacagcagcaggcacaaggatacgggaatcagcatcaggaagaagaaaggataaacgatggaggctggcagaccgtcggtgagaaaaagcgccatggaagaccacagcagtctgaagcatggaatggatacagaaagccaccatcagaacaaaagtactctgaggatgtcggtcatatccaccaaggactcaatttcgagcccaccagggaggagctgaatagcttatcgaaagcgtgtagccgactttgggagctcgatatgaaccgtattgttcctggtaaggactacataatcgactgtggcaaggggaagaaagtttatcagaagggtgatatggcatctgaaagcttgttcagctggctaggcgacgatgtgctaagaaaacccacctactcacgtttctgcgcacttctggataactacaacccccaccaggggtacaaagaagttgttacccagcaggataagcacgaagaaatagctttcgttgaagagatcgctagaacagcgccaattaagtacttgcaccggtacttagtgcagaagggggctgtgcctcaggactacgaggacttcaagagaatgctgacatccctatggtttgatttgtatggaagaggtggcaactctagctgctcttctgcctttgagcatgtgtttgttggtgagatcaaaggacggggacaaggggagagtgaggtatcaggcttccataactggattcagttttacctggaagaagccaagggaaatgtggattaccaaggttatatatttccaaggcgccgtggtgaatcgcctgattcagagatacagctgctgactgttcagtttgagtggcatggcgtgctgaaatcggtatccagcacgttgattggcgtcagtcctgagtttgaggttgcactctacacgttgtgcttttttgttggaggggaagacaaccgcgtcgatattggcccgtatagtgtgaacgtcaagtgctaccgattggggaacaacaaaattggatcagcctttcccattgtagagaactgattatctggtgctatgcttctgcaggtttccaaatattcactttcttcgtttcataatcaattacgtgaagttaacaatgtactattttacttgtgcatgaaaaggtaccatactgttcaatttgttgctgccatctgcaatagtattgctacttgcactgc

SEQ ID NO: 7044 - protein, 543 aa, Zea mays subsp. mays
  peptide (1)..(543): Ceres Seq. ID no. 12408953
  misc_feature (256)..(536): Homolog of NCBI NO: 6679429 NR Description: placental protein 11 related [Mus musculus]
  misc_feature (276)..(539): Homolog of NCBI NO: 6561907 NR Description: pancreatic protein with two somatomedin B domains
  misc_feature (70)..(543): Homolog of NCBI NO: 38345945 NR Description: OSJNBb0103I08.16 [Oryza sativa (japonica
  misc_feature (242)..(543): Homolog of NCBI NO: 29367523 NR Description: putative serine protease-like protein [Oryza
  misc_feature (114)..(543): Homolog of NCBI NO: 20260612 NR Description: putative serine protease-like protein
  misc_feature (204)..(543): Homolog of NCBI NO: 25407557 NR Description: probable serine proteinase-like protein
  misc_feature (204)..(436): Homolog of NCBI NO: 30683929 NR Description: serine protease protein -related [Arabidopsis
  misc_feature (293)..(436): Homolog of NCBI NO: 7488185 NR Description: probable serine proteinase - Arabidopsis thaliana
  misc_feature (268)..(541): Homolog of NCBI NO: 22797893 NR Description: endoU protein [Xenopus laevis]
  misc_feature (267)..(536): Homolog of NCBI NO: 5174623 NR Description: placental protein 11 precursor [Homo sapiens]
NHARTINPSKEIPDDLLRVAAPATRLVESTNQARVPPRPRSHPAAAGQSDPSPVPSPSPAFPVRSRRRAMEGLIKGLVHVAIDAVEDAVRERDHGRADDDEVPRRRAAQSSDPDDDGEEERDERSRSTWAEVVSEQKCSDPDERRDHRSSGRDNRHERRDDEGWKRADGRNQQQHHAGRQNQCEGEERWDGSGSRRRQQQQQAQGYGNQHQEEERINDGGWQTVGEKKRHGRPQQSEAWNGYRKPPSEQKYSEDVGHIHQGLNFEPTREELNSLSKACSRLWELDMNRIVPGKDYIIDCGKGKKVYQKGDMASESLFSWLGDDVLRKPTYSRFCALLDNYNPHQGYKEVVTQQDKHEEIAFVEEIARTAPIKYLHRYLVQKGAVPQDYEDFKRMLTSLWFDLYGRGGNSSCSSAFEHVFVGEIKGRGQGESEVSGFHNWIQFYLEEAKGNVDYQGYIFPRRRGESPDSEIQLLTVQFEWHGVLKSVSSTLIGVSPEFEVALYTLCFFVGGEDNRVDIGPYSVNVKCYRLGNNKIGSAFPIVEN

SEQ ID NO: 7045 - protein, 474 aa, Zea mays subsp. mays
  peptide (1)..(474): Ceres Seq. ID no. 12408954
  misc_feature (1)..(474): Homolog of NCBI NO: 38345945 NR Description: OSJNBb0103I08.16 [Oryza sativa (japonica
  misc_feature (173)..(474): Homolog of NCBI NO: 29367523 NR Description: putative serine protease-like protein [Oryza
  misc_feature (45)..(474): Homolog of NCBI NO: 20260612 NR Description: putative serine protease-like protein
  misc_feature (135)..(474): Homolog of NCBI NO: 25407557 NR Description: probable serine proteinase-like protein
  misc_feature (135)..(367): Homolog of NCBI NO: 30683929 NR Description: serine protease protein -related [Arabidopsis
  misc_feature (224)..(367): Homolog of NCBI NO: 7488185 NR Description: probable serine proteinase - Arabidopsis thaliana
  misc_feature (199)..(472): Homolog of NCBI NO: 22797893 NR Description: endoU protein [Xenopus laevis]
  misc_feature (198)..(467): Homolog of NCBI NO: 5174623 NR Description: placental protein 11 precursor [Homo sapiens]
  misc_feature (187)..(467): Homolog of NCBI NO: 6679429 NR Description: placental protein 11 related [Mus musculus]
  misc_feature (207)..(470): Homolog of NCBI NO: 6561907 NR Description: pancreatic protein with two somatomedin B domains
MEGLIKGLVHVAIDAVEDAVRERDHGRADDDEVPRRRAAQSSDPDDDGEEERDERSRSTWAEVVSEQKCSDPDERRDHRSSGRDNRHERRDDEGWKRADGRNQQQHHAGRQNQCEGEERWDGSGSRRRQQQQQAQGYGNQHQEEERINDGGWQTVGEKKRHGRPQQSEAWNGYRKPPSEQKYSEDVGHIHQGLNFEPTREELNSLSKACSRLWELDMNRIVPGKDYIIDCGKGKKVYQKGDMASESLFSWLGDDVLRKPTYSRFCALLDNYNPHQGYKEVVTQQDKHEEIAFVEEIARTAPIKYLHRYLVQKGAVPQDYEDFKRMLTSLWFDLYGRGGNSSCSSAFEHVFVGEIKGRGQGESEVSGFHNWIQFYLEEAKGNVDYQGYIFPRRRGESPDSEIQLLTVQFEWHGVLKSVSSTLIGVSPEFEVALYTLCFFVGGEDNRVDIGPYSVNVKCYRLGNNKIGSAFPIVEN

SEQ ID NO: 7046 - DNA, 1527 bp, Zea mays subsp. mays
  misc_feature (1)..(1527): Ceres Seq. ID no. 12425149
  misc_feature: MA Experiment ID: 108527 Result: Down-regulated in Transcription
  misc_feature: MA Experiment 108527 PARAMETER Experiment Name: Zm_5mM_NO_P Parameter: Age (day) Value: 8
  misc_feature: MA Experiment 108527 PARAMETER Experiment Name: Zm_5mM_NO_P Parameter: Organism Value: Zea mays
  misc_feature: MA Experiment 108527 PARAMETER Experiment Name: Zm_5mM_NO_P Parameter: Plant Line Value: 35A19
  misc_feature: MA Experiment 108527 PARAMETER Experiment Name: Zm_5mM_NO_P Parameter: Timepoint (hr) Value: 6
  misc_feature: MA Experiment 108527 PARAMETER Experiment Name: Zm_5mM_NO_P Parameter: Tissue Value: Aerial
  misc_feature: MA Experiment 108527 PARAMETER Experiment Name: Zm_5mM_NO_P Parameter: Treatment Value: 5mM NO vs. No Treatment
  misc_feature: MA Experiment ID: 108535 Result: Down-regulated in Transcription
  misc_feature: MA Experiment 108535 PARAMETER Experiment Name: Zm_Meristem_P Parameter: Age (day) Value: 8
  misc_feature: MA Experiment 108535 PARAMETER Experiment Name: Zm_Meristem_P Parameter: Organism Value: Zea mays
  misc_feature: MA Experiment 108535 PARAMETER Experiment Name: Zm_Meristem_P Parameter: Plant Line Value: 35A19
  misc_feature: MA Experiment 108535 PARAMETER Experiment Name: Zm_Meristem_P Parameter: Tissue Value: Root Meristem vs. Above Root Meristem
  misc_feature: MA Experiment ID: 108543 Result: Up-regulated in Transcription
  misc_feature: MA Experiment ID: 20000108 Result: Down-regulated in Transcription
  misc_feature: MA Experiment 20000108 PARAMETER Experiment Name: Zm_Root-Tips_P Parameter: Age (day) Value: 12
  misc_feature: MA Experiment 20000108 PARAMETER Experiment Name: Zm_Root-Tips_P Parameter: Organism Value: Zea mays
  misc_feature: MA Experiment 20000108 PARAMETER Experiment Name: Zm_Root-Tips_P Parameter: Tissue Value: Root tips vs. Root mid region    35
  misc_feature: MA Experiment 20000108 PARAMETER Experiment Name: Zm_Root-Tips_P Parameter: Tissue Value: Root tips vs. Root mid region   Sequence Listing-Misc Features (4)
gcacgagaccattacctagaacatcctaatcgaaaaaactttagccacaaatttcacccaaaaccaaaaaaataataatcccaaattaaagaaaaggagcagaagaaaaacaactttcatcgccgtccgccaccggagctcacttcgtcggccttccctcagtgtcaacccccttctcaaaacttgtatttgcacctcagtccctgccggtctgcccggtcgccgcctcgccggaggaagcccctcgtctccttgccctgcggcgggttcatggggttctcgctgtaccccatgaagacgtccacgcggatgctctggagcactagcttcttccgccataagctcagctcctcctcctgcttcctctgaggacgccccacccgcctcgatcgcttcggcggcgggccgctgctgctgcgctgtcctagcatccgttcaagtgtgtgtttgcgttcttaggtttcaagattggcttttgttgcgttcttggcgagacgaagggactagggcgcggacaaagaatcagcatgcatccgagcgcggtcagtttcgactccggcgacgggcggcggcgcggtggcgcgcagatgctgctcttcggcggcggaggcagcgccaacagcaacggcttcttccgaggtgttccgatggcggtcctggccatggacgacgcgacgcgcgtgggcaagcggcccttcttcacgacacacgaggagctcctggaggaggagtactacgacgagcaggcgccggagaagaagcgccgtctgacggcggagcaggtgcagctgctggagcggagcttcgaggaagagaacaagctggagcctgagcgcaagaccgagctggctcgccgcctggggatggcgccccgccaggtggccgtgtggttccagaaccgccgcgcgcgttggaagacaaagcagctcgagaccgactatgaccgcctcaaggctgcctacaacgcgctcgccgctgaccaccagggcctcctggccgacaacgatagcctccgggcacaggtgatctgcctaacagagaagctgcaaggcaaggagacatccctgtcggcaaccatcgctgcccaagaggtcgaccagccaaacgaacacaccacaggcactgagaaattgctggcgcagcagctcaaggacgacctgcacagcagctgcggttgcactggacatggtgccctgtcttcggaggaagaggatggtggcgtggtcagcgatgagggctgcaactttgatctccccgacgccatgtttgctgttggggtcaccaaccatggtgctgaggaggcgcagctggccaactggacatcttggttctggaactgatcggttgatggatggatgcatcaagtgcaaagagcaaatcctctcctggtttcgactcttttctgcaacatataattactgtgttgattatgtgccgtcagatgttttcaagtaatgaaacagaactgatgttgtaagtttatgtttctgaagatttgtatgttcatatatataataatatgcttgg

SEQ ID NO: 7047 - protein, 270 aa, Zea mays subsp. mays
  peptide (1)..(270): Ceres Seq. ID no. 12425150
  misc_feature (77)..(131): Pfam Name: Homeobox domain Pfam Description: Homeobox domain
  misc_feature (1)..(196): Homolog of NCBI NO: 5006855 NR Description: homeodomain leucine zipper protein [Oryza sativa]
  misc_feature (217)..(270): Homolog of NCBI NO: 5006855 NR Description: homeodomain leucine zipper protein [Oryza sativa]
  misc_feature (1)..(196): Homolog of NCBI NO: 37573050 NR Description: homeodomain leucine zipper protein [Oryza sativa
  misc_feature (217)..(270): Homolog of NCBI NO: 37573050 NR Description: homeodomain leucine zipper protein [Oryza sativa
  misc_feature (38)..(226): Homolog of NCBI NO: 15232122 NR Description: homeobox-leucine zipper protein HAT5 (HD-ZIP
  misc_feature (21)..(258): Homolog of NCBI NO: 18034441 NR Description: homeodomain leucine zipper protein CPHB-5
  misc_feature (43)..(236): Homolog of NCBI NO: 7446244 NR Description: homeotic protein - carrot
  misc_feature (72)..(219): Homolog of NCBI NO: 15148920 NR Description: homeodomain leucine zipper protein HDZ3
  misc_feature (73)..(172): Homolog of NCBI NO: 166754 NR Description: homeobox protein
  misc_feature (51)..(194): Homolog of NCBI NO: 15148918 NR Description: homeodomain leucine zipper protein HDZ2
MHPSAVSFDSGDGRRRGGAQMLLFGGGGSANSNGFFRGVPMAVLAMDDATRVGKRPFFTTHEELLEEEYYDEQAPEKKRRLTAEQVQLLERSFEEENKLEPERKTELARRLGMAPRQVAVWFQNRRARWKTKQLETDYDRLKAAYNALAADHQGLLADNDSLRAQVICLTEKLQGKETSLSATIAAQEVDQPNEHTTGTEKLLAQQLKDDLHSSCGCTGHGALSSEEEDGGVVSDEGCNFDLPDAMFAVGVTNHGAEEAQLANWTSWFWN

SEQ ID NO: 7048 - protein, 250 aa, Zea mays subsp. mays
  peptide (1)..(250): Ceres Seq. ID no. 12425151
  misc_feature (57)..(111): Pfam Name: Homeobox domain Pfam Description: Homeobox domain
  misc_feature (1)..(176): Homolog of NCBI NO: 5006855 NR Description: homeodomain leucine zipper protein [Oryza sativa]
  misc_feature (197)..(250): Homolog of NCBI NO: 5006855 NR Description: homeodomain leucine zipper protein [Oryza sativa]
  misc_feature (1)..(176): Homolog of NCBI NO: 37573050 NR Description: homeodomain leucine zipper protein [Oryza sativa
  misc_feature (197)..(250): Homolog of NCBI NO: 37573050 NR Description: homeodomain leucine zipper protein [Oryza sativa
  misc_feature (18)..(206): Homolog of NCBI NO: 15232122 NR Description: homeobox-leucine zipper protein HAT5 (HD-ZIP
  misc_feature (1)..(238): Homolog of NCBI NO: 18034441 NR Description: homeodomain leucine zipper protein CPHB-5
  misc_feature (23)..(216): Homolog of NCBI NO: 7446244 NR Description: homeotic protein - carrot
  misc_feature (52)..(199): Homolog of NCBI NO: 15148920 NR Description: homeodomain leucine zipper protein HDZ3
  misc_feature (53)..(152): Homolog of NCBI NO: 166754 NR Description: homeobox protein
  misc_feature (31)..(174): Homolog of NCBI NO: 15148918 NR Description: homeodomain leucine zipper protein HDZ2
MLLFGGGGSANSNGFFRGVPMAVLAMDDATRVGKRPFFTTHEELLEEEYYDEQAPEKKRRLTAEQVQLLERSFEEENKLEPERKTELARRLGMAPRQVAVWFQNRRARWKTKQLETDYDRLKAAYNALAADHQGLLADNDSLRAQVICLTEKLQGKETSLSATIAAQEVDQPNEHTTGTEKLLAQQLKDDLHSSCGCTGHGALSSEEEDGGVVSDEGCNFDLPDAMFAVGVTNHGAEEAQLANWTSWFWN

SEQ ID NO: 7049 - protein, 230 aa, Zea mays subsp. mays
  peptide (1)..(230): Ceres Seq. ID no. 12425152
  misc_feature (37)..(91): Pfam Name: Homeobox domain Pfam Description: Homeobox domain
  misc_feature (1)..(156): Homolog of NCBI NO: 5006855 NR Description: homeodomain leucine zipper protein [Oryza sativa]
  misc_feature (177)..(230): Homolog of NCBI NO: 5006855 NR Description: homeodomain leucine zipper protein [Oryza sativa]
  misc_feature (1)..(156): Homolog of NCBI NO: 37573050 NR Description: homeodomain leucine zipper protein [Oryza sativa
  misc_feature (177)..(230): Homolog of NCBI NO: 37573050 NR Description: homeodomain leucine zipper protein [Oryza sativa
  misc_feature (1)..(186): Homolog of NCBI NO: 15232122 NR Description: homeobox-leucine zipper protein HAT5 (HD-ZIP
  misc_feature (1)..(218): Homolog of NCBI NO: 18034441 NR Description: homeodomain leucine zipper protein CPHB-5
  misc_feature (3)..(196): Homolog of NCBI NO: 7446244 NR Description: homeotic protein - carrot
  misc_feature (32)..(179): Homolog of NCBI NO: 15148920 NR Description: homeodomain leucine zipper protein HDZ3
  misc_feature (33)..(132): Homolog of NCBI NO: 166754 NR Description: homeobox protein
  misc_feature (11)..(154): Homolog of NCBI NO: 15148918 NR Description: homeodomain leucine zipper protein HDZ2
MAVLAMDDATRVGKRPFFTTHEELLEEEYYDEQAPEKKRRLTAEQVQLLERSFEEENKLEPERKTELARRLGMAPRQVAVWFQNRRARWKTKQLETDYDRLKAAYNALAADHQGLLADNDSLRAQVICLTEKLQGKETSLSATIAAQEVDQPNEHTTGTEKLLAQQLKDDLHSSCGCTGHGALSSEEEDGGVVSDEGCNFDLPDAMFAVGVTNHGAEEAQLANWTSWFWN

SEQ ID NO: 7050 - DNA, 1265 bp, Zea mays subsp. mays
  misc_feature (1)..(1265): Ceres Seq. ID no. 12344227
  misc_feature: MA Experiment ID: 108534 Result: Up-regulated in Transcription
  misc_feature: MA Experiment 108534 PARAMETER Experiment Name: Zm_4deg_Cold_P Parameter: Age (hr) Value: 8
  misc_feature: MA Experiment 108534 PARAMETER Experiment Name: Zm_4deg_Cold_P Parameter: Organism Value: Zea mays
  misc_feature: MA Experiment 108534 PARAMETER Experiment Name: Zm_4deg_Cold_P Parameter: Plant Line Value: 35A19
  misc_feature: MA Experiment 108534 PARAMETER Experiment Name: Zm_4deg_Cold_P Parameter: Temperature (deg C) Value: 4 vs. 22
  misc_feature: MA Experiment 108534 PARAMETER Experiment Name: Zm_4deg_Cold_P Parameter: Timepoint (hr) Value: 6
  misc_feature: MA Experiment 108534 PARAMETER Experiment Name: Zm_4deg_Cold_P Parameter: Tissue Value: Aerial
  misc_feature: MA Experiment ID: 108535 Result: Down-regulated in Transcription
  misc_feature: MA Experiment 108535 PARAMETER Experiment Name: Zm_Meristem_P Parameter: Age (day) Value: 8
  misc_feature: MA Experiment 108535 PARAMETER Experiment Name: Zm_Meristem_P Parameter: Organism Value: Zea mays
  misc_feature: MA Experiment 108535 PARAMETER Experiment Name: Zm_Meristem_P Parameter: Plant Line Value: 35A19
  misc_feature: MA Experiment 108535 PARAMETER Experiment Name: Zm_Meristem_P Parameter: Tissue Value: Root Meristem vs. Above Root Meristem
  misc_feature: MA Experiment ID: 108536 Result: Up-regulated in Transcription
  misc_feature: MA Experiment 108536 PARAMETER Experiment Name: Zm_Meristem_P Parameter: Age (day) Value: 8
  misc_feature: MA Experiment 108536 PARAMETER Experiment Name: Zm_Meristem_P Parameter: Organism Value: Zea mays
  misc_feature: MA Experiment 108536 PARAMETER Experiment Name: Zm_Meristem_P Parameter: Plant Line Value: 35A19
  misc_feature: MA Experiment 108536 PARAMETER Experiment Name: Zm_Meristem_P Parameter: Tissue Value: Shoot Meristem vs. Above Shoot Meristem
  misc_feature: MA Experiment ID: 108687 Result: Up-regulated in Transcription
  misc_feature: MA Experiment 108687 PARAMETER Experiment Name: Zm_Embryos-Flowers__P Parameter: Tissue Value: Embryo vs. Aerial+
aacgctcctcctttcaaacccacgccgacaccgatgccgagagccggggtgtccagcagcgagagtagccgccgtggcgccggtgcgttcagaaccctctccgaagatcgccgcatcaccgtattctgctccgacggtcgcctctaccaagtcgattacgcgtggaacgctacgaagctggcgggcgtcacctccgtcggggtgcgtgggaccgactccgtatgcgtcgtcggccagcggagggcgaacacgcacgcgcccaaggacaaattgctggacatgaccagcgtttcgcgcctgttcccgatcaccgaccggctggggttgctcgccacggggatcgcaggtgaggggagagcattggcacatgaggcaaggaatcaaactgcagaatttcgtttcaattggggatatgaaatgcctcctgatgttttggcacaatggattgcagacagagcacagatctggacccagtatgtttccaagagaccttctggagttgttgccatgattctgggcattgatgatgagaaaggaactccacaactctttacatgtgatcctgctgggtattttttcggtcacaaggcagcaagtgctggccaaagagatacggaggctgtcaactttcttgagaagaaaatgaagaacaatccttcactaccatttcaggaaaccattcagatggcaatatcagcattgcagttcgccctgaaggctgacctcaaagcctcggaagtcgaggttggggttgtcaggacggatgatccaactttcagagtgctgacagaagctgaaatcgatgagcatctggaagccatcaacccagagccgcggccactctgaaatgctccccggtttattccgggataaactgacattggagaactgaaaccatggcgacctcagctgcattttgggcaccggaaagtcaaagctttcatgtggttctttacgacggctctatggacattggattagcggtttttgggcggttttttcgttccagtgactagcggttttcagtggaaaaacggtttggtaaacctactgggcacacacgaccggccatccgccaagtcaggcgagccccgcgcggtcagtgcttgacgacgtggtatcacagccgccgtctaccgtccctcagcggacggccgggccaattcatgcatcaccgagcaataccgagcaatactgacatctaaaatgttctttagccgtaccatatccaagcaatgaccatagcactagctatgaacgtggtc

SEQ ID NO: 7051 - protein, 281 aa, Zea mays subsp. mays
  peptide (1)..(281): Ceres Seq. ID no. 12344228
  misc_feature (59)..(252): Pfam Name: Proteasome A-type and B-type Pfam Description: Proteasome A-type and B-type
  misc_feature (25)..(275): Homolog of NCBI NO: 12229948 NR Description: Proteasome subunit alpha type 6 (20S proteasome
  misc_feature (25)..(275): Homolog of NCBI NO: 11967891 NR Description: maize 20S proteasome alpha subunit [Zea mays]
  misc_feature (25)..(275): Homolog of NCBI NO: 12229922 NR Description: Proteasome subunit alpha type 6 (20S proteasome
NAPPFKPTPTPMPRAGVSSSESSRRGAGAFRTLSEDRRITVFCSDGRLYQVDYAWNATKLAGVTSVGVRGTDSVCVVGQRRANTHAPKDKLLDMTSVSRLFPITDRLGLLATGIAGEGRALAHEARNQTAEFRFNWGYEMPPDVLAQWIADRAQIWTQYVSKRPSGVVAMILGIDDEKGTPQLFTCDPAGYFFGHKAASAGQRDTEAVNFLEKKMKNNPSLPFQETIQMAISALQFALKADLKASEVEVGVVRTDDPTFRVLTEAEIDEHLEAINPEPRPL

SEQ ID NO: 7052 - protein, 270 aa, Zea mays subsp. mays
  peptide (1)..(270): Ceres Seq. ID no. 12344229
  misc_feature (48)..(241): Pfam Name: Proteasome A-type and B-type Pfam Description: Proteasome A-type and B-type
  misc_feature (14)..(264): Homolog of NCBI NO: 12229948 NR Description: Proteasome subunit alpha type 6 (20S proteasome
  misc_feature (14)..(264): Homolog of NCBI NO: 11967891 NR Description: maize 20S proteasome alpha subunit [Zea mays]
  misc_feature (14)..(264): Homolog of NCBI NO: 12229922 NR Description: Proteasome subunit alpha type 6 (20S proteasome
MPRAGVSSSESSRRGAGAFRTLSEDRRITVFCSDGRLYQVDYAWNATKLAGVTSVGVRGTDSVCVVGQRRANTHAPKDKLLDMTSVSRLFPITDRLGLLATGIAGEGRALAHEARNQTAEFRFNWGYEMPPDVLAQWIADRAQIWTQYVSKRPSGVVAMILGIDDEKGTPQLFTCDPAGYFFGHKAASAGQRDTEAVNFLEKKMKNNPSLPFQETIQMAISALQFALKADLKASEVEVGVVRTDDPTFRVLTEAEIDEHLEAINPEPRPL

SEQ ID NO: 7053 - protein, 188 aa, Zea mays subsp. mays
  peptide (1)..(188): Ceres Seq. ID no. 12344230
  misc_feature (1)..(159): Pfam Name: Proteasome A-type and B-type Pfam Description: Proteasome A-type and B-type
  misc_feature (1)..(182): Homolog of NCBI NO: 12229948 NR Description: Proteasome subunit alpha type 6 (20S proteasome
  misc_feature (1)..(182): Homolog of NCBI NO: 11967891 NR Description: maize 20S proteasome alpha subunit [Zea mays]
  misc_feature (1)..(182): Homolog of NCBI NO: 12229922 NR Description: Proteasome subunit alpha type 6 (20S proteasome
MTSVSRLFPITDRLGLLATGIAGEGRALAHEARNQTAEFRFNWGYEMPPDVLAQWIADRAQIWTQYVSKRPSGVVAMILGIDDEKGTPQLFTCDPAGYFFGHKAASAGQRDTEAVNFLEKKMKNNPSLPFQETIQMAISALQFALKADLKASEVEVGVVRTDDPTFRVLTEAEIDEHLEAINPEPRPL

SEQ ID NO: 7054 - DNA, 1498 bp, Zea mays subsp. mays
  misc_feature (1)..(1498): Ceres Seq. ID no. 12381221
  misc_feature: MA Experiment ID: 108527 Result: Up-regulated in Transcription
  misc_feature: MA Experiment 108527 PARAMETER Experiment Name: Zm_5mM_NO_P Parameter: Age (day) Value: 8
  misc_feature: MA Experiment 108527 PARAMETER Experiment Name: Zm_5mM_NO_P Parameter: Organism Value: Zea mays
  misc_feature: MA Experiment 108527 PARAMETER Experiment Name: Zm_5mM_NO_P Parameter: Plant Line Value: 35A19
  misc_feature: MA Experiment 108527 PARAMETER Experiment Name: Zm_5mM_NO_P Parameter: Timepoint (hr) Value: 6
  misc_feature: MA Experiment 108527 PARAMETER Experiment Name: Zm_5mM_NO_P Parameter: Tissue Value: Aerial
  misc_feature: MA Experiment 108527 PARAMETER Experiment Name: Zm_5mM_NO_P Parameter: Treatment Value: 5mM NO vs. No Treatment
  misc_feature: MA Experiment ID: 20000480 Result: Down-regulated in Transcription
  misc_feature: MA Experiment 20000480 PARAMETER Experiment Name: Zm_Drought_P Parameter: Age (day) Value: 11
  misc_feature: MA Experiment 20000480 PARAMETER Experiment Name: Zm_Drought_P Parameter: Organism Value: Zea mays
  misc_feature: MA Experiment 20000480 PARAMETER Experiment Name: Zm_Drought_P Parameter: Plant Line Value: 35A19
  misc_feature: MA Experiment 20000480 PARAMETER Experiment Name: Zm_Drought_P Parameter: Timepoint (hr) Value: 72
  misc_feature: MA Experiment 20000480 PARAMETER Experiment Name: Zm_Drought_P Parameter: Tissue Value: Aerial
  misc_feature: MA Experiment 20000480 PARAMETER Experiment Name: Zm_Drought_P Parameter: Treatment Value: Drought vs. No Drought
gcacgagaccattacctagaacatcctaatcgaaaaaaaaaccaaagcaaagcaaacccagggcggccagcggacggaacccaaggcgaaaaggaagccagcggaagcagcgaaaagcccacgccaccttccaatcccccccaaattcccttgcattccattcccttcttcccttcccacacacctcctcctcctcctcctccgcgtctcttccccggcccccacatccgtccccccctctctctctcttcgccggccgccattgcgctcccgcattgcgccgggtcctaccagtccagcgcgggtccgtgccggcggcgggcatgatgccgcggcgcgtggcgtcggtgccggtgcccgactggctggaggcgctgctggccacgcgcttcttcctcgcctgcgccgcgcacccggcgtccccgcgcaacgagtgcaacatgttctgcctcgactgcacgggcgcgccgccgccgccgccgccggccttctgctactactgccgcgcgcaccgacactcgtcgcaccgcgtcatccagataaggcggtcctcctaccacgacgtcgtccgcgtgtcggaggtggaggacgtgctcgacatctccggcgtgcagacctacgtcatcaacagcgcccgggtgctcttcctcaacgagaggccccagccgcgcggcgccggcgcggccgcgggcaaggccgccgcgtccccctacaactgcgagatctgcggccgcgcgctgctcgaccccntccgcttctgctcgctcggatgcaagctggtggacaccaagaggagcaacggccacgcggctagttccgcggacggaggcggcggcggcggcggcgcagccagtggcaatgacgagacgacggaggccggcgggagcaagaacggcccgggggcgcggccgcacggacggcggcggaaggggaccccacaccgcgcgcccttctggtcctgacccaccaccggcaatggcgatcggtcgagttactccactagcgagcatcgaggcaatcaagagatcgataggggaataatggagggaggggacgatcgccgtctctcctccgcgccgccccgcgcttcttcggttcggttcggtttggttgtccttatatatacgtaattagaaacagaaaagcaaaggagagagaaaaagatactgcccgcccaactagagaaaggaaggaaggttatagataaacagatagaaaagcgagctgaggtcggcaccctcgcgcgcatcccccctcaaccaccggagggagggagagagggagccggcccggggccgcgcgctcgctggactgcagtaagcaacttgtctgtccccatccctctctcaccataccatggcgccatttggtacggtaggtgtgcatgatggcatgcctgatcatctcctcctcctcctcctcctagtcatcatattcatagatgatgctggtgaacttgagctagcaggaaatggatttaattctttctttttttttg

SEQ ID NO: 7055 - protein, 212 aa, Zea mays subsp. mays
  peptide (1)..(212): Ceres Seq. ID no. 12381222
  misc_feature (11)..(191): Pfam Name: Protein of unknown function, DUF597 Pfam Description: Protein of unknown function, DUF597
  misc_feature (11)..(191): Homolog of NCBI NO: 20805059 NR Description: B1108H10.20 [Oryza sativa (japonica
  misc_feature (12)..(212): Homolog of NCBI NO: 37537092 NR Description: unknown protein [Oryza sativa (japonica
  misc_feature (12)..(210): Homolog of NCBI NO: 6714272 NR Description: F6N18.8 [Arabidopsis thaliana]
  misc_feature (12)..(210): Homolog of NCBI NO: 18398555 NR Description: expressed protein; protein id: At1g32700.1,
  misc_feature (12)..(188): Homolog of NCBI NO: 38346725 NR Description: OSJNBa0086O06.23 [Oryza sativa (japonica
  misc_feature (12)..(210): Homolog of NCBI NO: 21554139 NR Description: unknown [Arabidopsis thaliana]
  misc_feature (12)..(157): Homolog of NCBI NO: 18411153 NR Description: expressed protein; protein id: At1g76590.1,
  misc_feature (12)..(157): Homolog of NCBI NO: 21536890 NR Description: unknown [Arabidopsis thaliana]
  misc_feature (12)..(157): Homolog of NCBI NO: 25337904 NR Description: unknown protein F14G6.19 [imported] - Arabidopsis
  misc_feature (12)..(183): Homolog of NCBI NO: 18394936 NR Description: expressed protein; protein id: At1g21000.1, by cDNA: 119384., supported by cDNA: gi_14030626, supported by gi_16226406 [Arabidopsis thaliana]
  misc_feature (143)..(143): Xaa is any aa, unknown or other
MMPRRVASVPVPDWLEALLATRFFLACAAHPASPRNECNMFCLDCTGAPPPPPPAFCYYCRAHRHSSHRVIQIRRSSYHDVVRVSEVEDVLDISGVQTYVINSARVLFLNERPQPRGAGAAAGKAAASPYNCEICGRALLDPXRFCSLGCKLVDTKRSNGHAASSADGGGGGGGAASGNDETTEAGGSKNGPGARPHGRRRKGTPHRAPFWS

SEQ ID NO: 7056 - protein, 211 aa, Zea mays subsp. mays
  peptide (1)..(211): Ceres Seq. ID no. 12381223
  misc_feature (10)..(190): Pfam Name: Protein of unknown function, DUF597 Pfam Description: Protein of unknown function, DUF597
  misc_feature (10)..(190): Homolog of NCBI NO: 20805059 NR Description: B1108H10.20 [Oryza sativa (japonica
  misc_feature (11)..(211): Homolog of NCBI NO: 37537092 NR Description: unknown protein [Oryza sativa (japonica
  misc_feature (11)..(209): Homolog of NCBI NO: 6714272 NR Description: F6N18.8 [Arabidopsis thaliana]
  misc_feature (11)..(209): Homolog of NCBI NO: 18398555 NR Description: expressed protein; protein id: At1g32700.1,
  misc_feature (11)..(187): Homolog of NCBI NO: 38346725 NR Description: OSJNBa0086O06.23 [Oryza sativa (japonica
  misc_feature (11)..(209): Homolog of NCBI NO: 21554139 NR Description: unknown [Arabidopsis thaliana]
  misc_feature (11)..(156): Homolog of NCBI NO: 18411153 NR Description: expressed protein; protein id: At1g76590.1,
  misc_feature (11)..(156): Homolog of NCBI NO: 21536890 NR Description: unknown [Arabidopsis thaliana]
  misc_feature (11)..(156): Homolog of NCBI NO: 25337904 NR Description: unknown protein F14G6.19 [imported] - Arabidopsis
  misc_feature (11)..(182): Homolog of NCBI NO: 18394936 NR Description: expressed protein; protein id: At1g21000.1, by cDNA: 119384., supported by cDNA: gi_14030626, supported by gi_16226406 [Arabidopsis thaliana]
  misc_feature (142)..(142): Xaa is any aa, unknown or other
MPRRVASVPVPDWLEALLATRFFLACAAHPASPRNECNMFCLDCTGAPPPPPPAFCYYCRAHRHSSHRVIQIRRSSYHDVVRVSEVEDVLDISGVQTYVINSARVLFLNERPQPRGAGAAAGKAAASPYNCEICGRALLDPXRFCSLGCKLVDTKRSNGHAASSADGGGGGGGAASGNDETTEAGGSKNGPGARPHGRRRKGTPHRAPFWS

SEQ ID NO: 7057 - protein, 173 aa, Zea mays subsp. mays
  peptide (1)..(173): Ceres Seq. ID no. 12381224
  misc_feature (1)..(152): Pfam Name: Protein of unknown function, DUF597 Pfam Description: Protein of unknown function, DUF597
  misc_feature (1)..(152): Homolog of NCBI NO: 20805059 NR Description: B1108H10.20 [Oryza sativa (japonica
  misc_feature (1)..(173): Homolog of NCBI NO: 37537092 NR Description: unknown protein [Oryza sativa (japonica
  misc_feature (1)..(171): Homolog of NCBI NO: 6714272 NR Description: F6N18.8 [Arabidopsis thaliana]
  misc_feature (1)..(171): Homolog of NCBI NO: 18398555 NR Description: expressed protein; protein id: At1g32700.1,
  misc_feature (1)..(149): Homolog of NCBI NO: 38346725 NR Description: OSJNBa0086O06.23 [Oryza sativa (japonica
  misc_feature (1)..(171): Homolog of NCBI NO: 21554139 NR Description: unknown [Arabidopsis thaliana]
  misc_feature (1)..(118): Homolog of NCBI NO: 18411153 NR Description: expressed protein; protein id: At1g76590.1,
  misc_feature (1)..(118): Homolog of NCBI NO: 25337904 NR Description: unknown protein F14G6.19 [imported] - Arabidopsis
  misc_feature (1)..(118): Homolog of NCBI NO: 21536890 NR Description: unknown [Arabidopsis thaliana]
  misc_feature (1)..(144): Homolog of NCBI NO: 18394936 NR Description: expressed protein; protein id: At1g21000.1, by cDNA: 119384., supported by cDNA: gi_14030626, supported by gi_16226406 [Arabidopsis thaliana]
  misc_feature (104)..(104): Xaa is any aa, unknown or other
MFCLDCTGAPPPPPPAFCYYCRAHRHSSHRVIQIRRSSYHDVVRVSEVEDVLDISGVQTYVINSARVLFLNERPQPRGAGAAAGKAAASPYNCEICGRALLDPXRFCSLGCKLVDTKRSNGHAASSADGGGGGGGAASGNDETTEAGGSKNGPGARPHGRRRKGTPHRAPFWS

SEQ ID NO: 7058 - DNA, 1580 bp, Zea mays subsp. mays
  misc_feature (1)..(1580): Ceres Seq. ID no. 13493331
  misc_feature: MA Experiment ID: 108515 Result: Up-regulated in Transcription
  misc_feature: MA Experiment 108515 PARAMETER Experiment Name: Zm_2mM_SA_P Parameter: Age (day) Value: 8
  misc_feature: MA Experiment 108515 PARAMETER Experiment Name: Zm_2mM_SA_P Parameter: Organism Value: Zea mays
  misc_feature: MA Experiment 108515 PARAMETER Experiment Name: Zm_2mM_SA_P Parameter: Plant Line Value: 35A19
  misc_feature: MA Experiment 108515 PARAMETER Experiment Name: Zm_2mM_SA_P Parameter: Timepoint (hr) Value: 12
  misc_feature: MA Experiment 108515 PARAMETER Experiment Name: Zm_2mM_SA_P Parameter: Tissue Value: Aerial
  misc_feature: MA Experiment 108515 PARAMETER Experiment Name: Zm_2mM_SA_P Parameter: Treatment Value: 2mM SA vs. No Treatment
  misc_feature: MA Experiment ID: 108527 Result: Up-regulated in Transcription
  misc_feature: MA Experiment 108527 PARAMETER Experiment Name: Zm_5mM_NO_P Parameter: Age (day) Value: 8
  misc_feature: MA Experiment 108527 PARAMETER Experiment Name: Zm_5mM_NO_P Parameter: Organism Value: Zea mays
  misc_feature: MA Experiment 108527 PARAMETER Experiment Name: Zm_5mM_NO_P Parameter: Plant Line Value: 35A19
  misc_feature: MA Experiment 108527 PARAMETER Experiment Name: Zm_5mM_NO_P Parameter: Timepoint (hr) Value: 6
  misc_feature: MA Experiment 108527 PARAMETER Experiment Name: Zm_5mM_NO_P Parameter: Tissue Value: Aerial
  misc_feature: MA Experiment 108527 PARAMETER Experiment Name: Zm_5mM_NO_P Parameter: Treatment Value: 5mM NO vs. No Treatment
  misc_feature: MA Experiment ID: 108536 Result: Up-regulated in Transcription
  misc_feature: MA Experiment 108536 PARAMETER Experiment Name: Zm_Meristem_P Parameter: Age (day) Value: 8
  misc_feature: MA Experiment 108536 PARAMETER Experiment Name: Zm_Meristem_P Parameter: Organism Value: Zea mays
  misc_feature: MA Experiment 108536 PARAMETER Experiment Name: Zm_Meristem_P Parameter: Plant Line Value: 35A19
  misc_feature: MA Experiment 108536 PARAMETER Experiment Name: Zm_Meristem_P Parameter: Tissue Value: Shoot Meristem vs. Above Shoot Meristem
  misc_feature: MA Experiment ID: 108543 Result: Down-regulated in Transcription
  misc_feature: MA Experiment ID: 108559 Result: Up-regulated in Transcription
  misc_feature: MA Experiment 108559 PARAMETER Experiment Name: Zm_5mM_NO_P Parameter: Age (day) Value: 8
  misc_feature: MA Experiment 108559 PARAMETER Experiment Name: Zm_5mM_NO_P Parameter: Organism Value: Zea mays
  misc_feature: MA Experiment 108559 PARAMETER Experiment Name: Zm_5mM_NO_P Parameter: Plant Line Value: 35A19
  misc_feature: MA Experiment 108559 PARAMETER Experiment Name: Zm_5mM_NO_P Parameter: Timepoint (hr) Value: 12
  misc_feature: MA Experiment 108559 PARAMETER Experiment Name: Zm_5mM_NO_P Parameter: Tissue Value: Aerial
  misc_feature: MA Experiment 108559 PARAMETER Experiment Name: Zm_5mM_NO_P Parameter: Treatment Value: 5mM NO vs. No Treatment
  misc_feature: MA Experiment ID: 20000477 Result: Up-regulated in Transcription
  misc_feature: MA Experiment 20000477 PARAMETER Experiment Name: Zm_5mM_SA_P Parameter: Age (day) Value: 10
  misc_feature: MA Experiment 20000477 PARAMETER Experiment Name: Zm_5mM_SA_P Parameter: Organism Value: Zea mays
  misc_feature: MA Experiment 20000477 PARAMETER Experiment Name: Zm_5mM_SA_P Parameter: Plant Line Value: 35A19
  misc_feature: MA Experiment 20000477 PARAMETER Experiment Name: Zm_5mM_SA_P Parameter: Timepoint (hr) Value: 48
  misc_feature: MA Experiment 20000477 PARAMETER Experiment Name: Zm_5mM_SA_P Parameter: Tissue Value: Aerial
  misc_feature: MA Experiment 20000477 PARAMETER Experiment Name: Zm_5mM_SA_P Parameter: Treatment Value: 5mM SA vs. No Treatment
  misc_feature: MA Experiment ID: 20000478 Result: Up-regulated in Transcription
  misc_feature: MA Experiment 20000478 PARAMETER Experiment Name: Zm_5mM_SA_P Parameter: Age (day) Value: 11
  misc_feature: MA Experiment 20000478 PARAMETER Experiment Name: Zm_5mM_SA_P Parameter: Organism Value: Zea mays
  misc_feature: MA Experiment 20000478 PARAMETER Experiment Name: Zm_5mM_SA_P Parameter: Plant Line Value: 35A19
  misc_feature: MA Experiment 20000478 PARAMETER Experiment Name: Zm_5mM_SA_P Parameter: Timepoint (hr) Value: 72
  misc_feature: MA Experiment 20000478 PARAMETER Experiment Name: Zm_5mM_SA_P Parameter: Tissue Value: Aerial
  misc_feature: MA Experiment 20000478 PARAMETER Experiment Name: Zm_5mM_SA_P Parameter: Treatment Value: 5mM SA vs. No Treatment
  misc_feature: MA Experiment ID: 20000479 Result: Up-regulated in Transcription
  misc_feature: MA Experiment 20000479 PARAMETER Experiment Name: Zm_Drought_P Parameter: Age (day) Value: 10
  misc_feature: MA Experiment 20000479 PARAMETER Experiment Name: Zm_Drought_P Parameter: Organism Value: Zea mays
  misc_feature: MA Experiment 20000479 PARAMETER Experiment Name: Zm_Drought_P Parameter: Plant Line Value: 35A19
  misc_feature: MA Experiment 20000479 PARAMETER Experiment Name: Zm_Drought_P Parameter: Timepoint (hr) Value: 48
  misc_feature: MA Experiment 20000479 PARAMETER Experiment Name: Zm_Drought_P Parameter: Tissue Value: Aerial
  misc_feature: MA Experiment 20000479 PARAMETER Experiment Name: Zm_Drought_P Parameter: Treatment Value: Drought vs. No Drought
  misc_feature: MA Experiment ID: 20000480 Result: Up-regulated in Transcription
  misc_feature: MA Experiment 20000480 PARAMETER Experiment Name: Zm_Drought_P Parameter: Age (day) Value: 11
  misc_feature: MA Experiment 20000480 PARAMETER Experiment Name: Zm_Drought_P Parameter: Organism Value: Zea mays
  misc_feature: MA Experiment 20000480 PARAMETER Experiment Name: Zm_Drought_P Parameter: Plant Line Value: 35A19
  misc_feature: MA Experiment 20000480 PARAMETER Experiment Name: Zm_Drought_P Parameter: Timepoint (hr) Value: 72
  misc_feature: MA Experiment 20000480 PARAMETER Experiment Name: Zm_Drought_P Parameter: Tissue Value: Aerial
  misc_feature: MA Experiment 20000480 PARAMETER Experiment Name: Zm_Drought_P Parameter: Treatment Value: Drought vs. No Drought
  misc_feature: MA Experiment ID: 20000492 Result: Down-regulated in Transcription
  misc_feature: MA Experiment 20000492 PARAMETER Experiment Name: Zm_Hybrid_Seed_Dev_P Parameter: DAP Value: 12
  misc_feature: MA Experiment 20000492 PARAMETER Experiment Name: Zm_Hybrid_Seed_Dev_P Parameter: Organism Value: Zea mays
  misc_feature: MA Experiment 20000492 PARAMETER Experiment Name: Zm_Hybrid_Seed_Dev_P Parameter: Plant Line Value: 35A19
  misc_feature: MA Experiment 20000492 PARAMETER Experiment Name: Zm_Hybrid_Seed_Dev_P Parameter: Tissue Value: Fert Kernel vs. Unfert Floret
  misc_feature: MA Experiment ID: 20000532 Result: Up-regulated in Transcription
  misc_feature: MA Experiment 20000532 PARAMETER Experiment Name: Zm_0.001percent_MeJA_P Parameter: Age (day) Value: 10
  misc_feature: MA Experiment 20000532 PARAMETER Experiment Name: Zm_0.001percent_MeJA_P Parameter: Organism Value: Zea mays
  misc_feature: MA Experiment 20000532 PARAMETER Experiment Name: Zm_0.001percent_MeJA_P Parameter: Plant Line Value: 35A19
  misc_feature: MA Experiment 20000532 PARAMETER Experiment Name: Zm_0.001percent_MeJA_P Parameter: Timepoint (hr) Value: 48
  misc_feature: MA Experiment 20000532 PARAMETER Experiment Name: Zm_0.001percent_MeJA_P Parameter: Tissue Value: Aerial
  misc_feature: MA Experiment 20000532 PARAMETER Experiment Name: Zm_0.001percent_MeJA_P Parameter: Treatment Value: 0.001percent MeJA vs. No Treatment
  misc_feature: MA Experiment ID: 20000533 Result: Up-regulated in Transcription
  misc_feature: MA Experiment 20000533 PARAMETER Experiment Name: Zm_0.001percent_MeJA_P Parameter: Age (day) Value: 11
  misc_feature: MA Experiment 20000533 PARAMETER Experiment Name: Zm_0.001percent_MeJA_P Parameter: Organism Value: Zea mays
  misc_feature: MA Experiment 20000533 PARAMETER Experiment Name: Zm_0.001percent_MeJA_P Parameter: Plant Line Value: 35A19
  misc_feature: MA Experiment 20000533 PARAMETER Experiment Name: Zm_0.001percent_MeJA_P Parameter: Timepoint (hr) Value: 72
  misc_feature: MA Experiment 20000533 PARAMETER Experiment Name: Zm_0.001percent_MeJA_P Parameter: Tissue Value: Aerial
  misc_feature: MA Experiment 20000533 PARAMETER Experiment Name: Zm_0.001percent_MeJA_P Parameter: Treatment Value: 0.001percent MeJA vs. No Treatment
  misc_feature: MA Experiment ID: 20000626 Result: Up-regulated in Transcription
  misc_feature: MA Experiment 20000626 PARAMETER Experiment Name: Zm_Herbicide-Treatments_P Parameter: Timepoint (hr) Value: 12
  misc_feature: MA Experiment 20000626 PARAMETER Experiment Name: Zm_Herbicide-Treatments_P Parameter: Tissue Value: Aerial
  misc_feature: MA Experiment 20000626 PARAMETER Experiment Name: Zm_Herbicide-Treatments_P Parameter: Treatment Value: Roundup vs. No Treatment
  misc_feature: MA Experiment ID: 20000630 Result: Up-regulated in Transcription
  misc_feature: MA Experiment 20000630 PARAMETER Experiment Name: Zm_Herbicide-Treatments_P Parameter: Timepoint (hr) Value: 4
  misc_feature: MA Experiment 20000630 PARAMETER Experiment Name: Zm_Herbicide-Treatments_P Parameter: Tissue Value: Aerial
  misc_feature: MA Experiment 20000630 PARAMETER Experiment Name: Zm_Herbicide-Treatments_P Parameter: Treatment Value: Roundup vs. No Treatment
agctccccactctctctccgctgctgcctccgcggacggattccatccccggccctataagtgtggcttcgggacggcgcttcccatccgacaccggcgccttcgcggactgggtcgcctcctncgncgccgcggcgcgcggggacgacctctccctcggcttcaatgccagcgcggcggccgccgnngccgcggcnncctcnngcgcctcgctgggcgcgggcctctggggcccggcgtcctccgcctccgccgccatgcgccaggcggccgccatgaactacgggatggccgacgtggggatggtcgtcgtcgcgcccgccgcctccttccaccacacgcaccancaccaccaccaccacgaggccgccgccgccgccgccgccgcggctgcggcggcctccggcgaccccatcttcccgctgctctccggcggcccctgcgtgcttgatccggacaagtcggcctccgccagcgccatccagttctggcagcagcagcctccgccgccgtcgtcgccggctgctgcagcgggcgctaaccctaaccctagcgccagccccttcgcctacctcaagaagcccctcccgatgctggacgccggcgccggctcctcaggctccggcgccaccacgtgccaggactgcggcaaccaagcgaagaaggactgcggccacaaccggtgccgcacctgctgcaagagccgcggcttcgactgctccacgcacgtcaagagcacctgggtccccgccgcccgccgccgcgagcgccagcagctcgccgcctccggctccgcctcctcctcccccgccaccgcatccgcggcggccgtcgccgcgtccgcgtccaagaagccccgcctcctctcgtcgcagaccaccacctcgcacacgtccacctccaacgccaccacgccccgaagcttcgacaccacgtccagccaccaagacgcgtcgttcagggacagcctcccgaggcaggtgcgcgcgccggcggtgttcaagtgcgtgcgcgtgacgtccatcgaggacggcgaggacgagtacgcgtaccaggcgacggtcaccatcaacggccacctgttcaaggggttcctgtacgaccagggccccgacgacgggcgccacgcggcccaccagcaacgacgactgcacggcccggcgggtgcccaacatctccgagctccatctcggagcggcgtctggttccggcgccggcaccggcacctcgatgtcgatggctcctcccacggggctgtacggtgggggtggcggaggacatcatccgcacattctcggcgggtcgtcgagctacggtaacaccatgaactgatggagtacgttcctcccttctacaccggaagagtcccggcccgttaatttccattccttgttgctcttcattttccacgctatagtagcagagttcaattttctcagccttgtcacccggcgccatagatagcggggcatcaatgcatggcgttattctgttctacctccttcattccatcgtcctactgtgttatttagccattcgttggtgtataataacatcgatgagttgttttttcttcttcc

SEQ ID NO: 7059 - protein, 438 aa, Zea mays subsp. mays
  peptide (1)..(438): Ceres Seq. ID no. 13493332
  misc_feature (203)..(373): Pfam Name: Domain of unknown function (DUF702) Pfam Description: Domain of unknown function (DUF702)
  misc_feature (96)..(377): Homolog of NCBI NO: 34906658 NR Description: putative LRP(lateral root primordia) 1 [Oryza
  misc_feature (95)..(373): Homolog of NCBI NO: 882341 NR Description: LRP1
  misc_feature (199)..(373): Homolog of NCBI NO: 18416839 NR Description: lateral root primordia (LRP1) [Arabidopsis >gi|14586363|emb|CAC42894.1| lateral root primordia (LRP1)
  misc_feature (157)..(391): Homolog of NCBI NO: 15234365 NR Description: expressed protein [Arabidopsis thaliana]
  misc_feature (193)..(391): Homolog of NCBI NO: 15223669 NR Description: hypothetical protein [Arabidopsis thaliana]
  misc_feature (164)..(375): Homolog of NCBI NO: 15222285 NR Description: hypothetical protein [Arabidopsis thaliana]
  misc_feature (269)..(374): Homolog of NCBI NO: 15232522 NR Description: expressed protein [Arabidopsis thaliana]
  misc_feature (184)..(254): Homolog of NCBI NO: 15232522 NR Description: expressed protein [Arabidopsis thaliana]
  misc_feature (197)..(262): Homolog of NCBI NO: 15230389 NR Description: expressed protein [Arabidopsis thaliana]
  misc_feature (164)..(263): Homolog of NCBI NO: 15239350 NR Description: zinc finger protein SHI-related [Arabidopsis >gi|4929803|gb|AAD34162.1|AF152555_1 putative zinc finger protein
  misc_feature (41)..(41): Xaa is any aa, unknown or other
  misc_feature (42)..(42): Xaa is any aa, unknown or other
  misc_feature (62)..(62): Xaa is any aa, unknown or other
  misc_feature (65)..(65): Xaa is any aa, unknown or other
  misc_feature (66)..(66): Xaa is any aa, unknown or other
  misc_feature (67)..(67): Xaa is any aa, unknown or other
  misc_feature (68)..(68): Xaa is any aa, unknown or other
  misc_feature (115)..(115): Xaa is any aa, unknown or other
LPTLSPLLPPRTDSIPGPISVASGRRFPSDTGAFADWVASXXAAARGDDLSLGFNASAAAAXAAXXXXASLGAGLWGPASSASAAMRQAAAMNYGMADVGMVVVAPAASFHHTHXHHHHHEAAAAAAAAAAAASGDPIFPLLSGGPCVLDPDKSASASAIQFWQQQPPPPSSPAAAAGANPNPSASPFAYLKKPLPMLDAGAGSSGSGATTCQDCGNQAKKDCGHNRCRTCCKSRGFDCSTHVKSTWVPAARRRERQQLAASGSASSSPATASAAAVAASASKKPRLLSSQTTTSHTSTSNATTPRSFDTTSSHQDASFRDSLPRQVRAPAVFKCVRVTSIEDGEDEYAYQATVTINGHLFKGFLYDQGPDDGRHAAHQQRRLHGPAGAQHLRAPSRSGVWFRRRHRHLDVDGSSHGAVRWGWRRTSSAHSRRVVELR

SEQ ID NO: 7060 - protein, 353 aa, Zea mays subsp. mays
  peptide (1)..(353): Ceres Seq. ID no. 13493333
  misc_feature (118)..(288): Pfam Name: Domain of unknown function (DUF702) Pfam Description: Domain of unknown function (DUF702)
  misc_feature (11)..(292): Homolog of NCBI NO: 34906658 NR Description: putative LRP(lateral root primordia) 1 [Oryza
  misc_feature (10)..(288): Homolog of NCBI NO: 882341 NR Description: LRP1
  misc_feature (114)..(288): Homolog of NCBI NO: 18416839 NR Description: lateral root primordia (LRP1) [Arabidopsis >gi|14586363|emb|CAC42894.1| lateral root primordia (LRP1)
  misc_feature (72)..(306): Homolog of NCBI NO: 15234365 NR Description: expressed protein [Arabidopsis thaliana]
  misc_feature (108)..(306): Homolog of NCBI NO: 15223669 NR Description: hypothetical protein [Arabidopsis thaliana]
  misc_feature (79)..(290): Homolog of NCBI NO: 15222285 NR Description: hypothetical protein [Arabidopsis thaliana]
  misc_feature (184)..(289): Homolog of NCBI NO: 15232522 NR Description: expressed protein [Arabidopsis thaliana]
  misc_feature (99)..(169): Homolog of NCBI NO: 15232522 NR Description: expressed protein [Arabidopsis thaliana]
  misc_feature (112)..(177): Homolog of NCBI NO: 15230389 NR Description: expressed protein [Arabidopsis thaliana]
  misc_feature (79)..(178): Homolog of NCBI NO: 15239350 NR Description: zinc finger protein SHI-related [Arabidopsis >gi|4929803|gb|AAD34162.1|AF152555_1 putative zinc finger protein
  misc_feature (30)..(30): Xaa is any aa, unknown or other
MRQAAAMNYGMADVGMVVVAPAASFHHTHXHHHHHEAAAAAAAAAAAASGDPIFPLLSGGPCVLDPDKSASASAIQFWQQQPPPPSSPAAAAGANPNPSASPFAYLKKPLPMLDAGAGSSGSGATTCQDCGNQAKKDCGHNRCRTCCKSRGFDCSTHVKSTWVPAARRRERQQLAASGSASSSPATASAAAVAASASKKPRLLSSQTTTSHTSTSNATTPRSFDTTSSHQDASFRDSLPRQVRAPAVFKCVRVTSIEDGEDEYAYQATVTINGHLFKGFLYDQGPDDGRHAAHQQRRLHGPAGAQHLRAPSRSGVWFRRRHRHLDVDGSSHGAVRWGWRRTSSAHSRRVVELR

SEQ ID NO: 7061 - protein, 347 aa, Zea mays subsp. mays
  peptide (1)..(347): Ceres Seq. ID no. 13493334
  misc_feature (112)..(282): Pfam Name: Domain of unknown function (DUF702) Pfam Description: Domain of unknown function (DUF702)
  misc_feature (5)..(286): Homolog of NCBI NO: 34906658 NR Description: putative LRP(lateral root primordia) 1 [Oryza
  misc_feature (4)..(282): Homolog of NCBI NO: 882341 NR Description: LRP1
  misc_feature (108)..(282): Homolog of NCBI NO: 18416839 NR Description: lateral root primordia (LRP1) [Arabidopsis >gi|14586363|emb|CAC42894.1| lateral root primordia (LRP1)
  misc_feature (66)..(300): Homolog of NCBI NO: 15234365 NR Description: expressed protein [Arabidopsis thaliana]
  misc_feature (102)..(300): Homolog of NCBI NO: 15223669 NR Description: hypothetical protein [Arabidopsis thaliana]
  misc_feature (73)..(284): Homolog of NCBI NO: 15222285 NR Description: hypothetical protein [Arabidopsis thaliana]
  misc_feature (178)..(283): Homolog of NCBI NO: 15232522 NR Description: expressed protein [Arabidopsis thaliana]
  misc_feature (93)..(163): Homolog of NCBI NO: 15232522 NR Description: expressed protein [Arabidopsis thaliana]
  misc_feature (106)..(171): Homolog of NCBI NO: 15230389 NR Description: expressed protein [Arabidopsis thaliana]
  misc_feature (73)..(172): Homolog of NCBI NO: 15239350 NR Description: zinc finger protein SHI-related [Arabidopsis >gi|4929803|gb|AAD34162.1|AF152555_1 putative zinc finger protein
  misc_feature (24)..(24): Xaa is any aa, unknown or other
MNYGMADVGMVVVAPAASFHHTHXHHHHHEAAAAAAAAAAAASGDPIFPLLSGGPCVLDPDKSASASAIQFWQQQPPPPSSPAAAAGANPNPSASPFAYLKKPLPMLDAGAGSSGSGATTCQDCGNQAKKDCGHNRCRTCCKSRGFDCSTHVKSTWVPAARRRERQQLAASGSASSSPATASAAAVAASASKKPRLLSSQTTTSHTSTSNATTPRSFDTTSSHQDASFRDSLPRQVRAPAVFKCVRVTSIEDGEDEYAYQATVTINGHLFKGFLYDQGPDDGRHAAHQQRRLHGPAGAQHLRAPSRSGVWFRRRHRHLDVDGSSHGAVRWGWRRTSSAHSRRVVELR

SEQ ID NO: 7062 - DNA, 1430 bp, Zea mays subsp. mays
  misc_feature (1)..(1430): Ceres Seq. ID no. 12408941
  misc_feature: MA Experiment ID: 108504 Result: Up-regulated in Transcription
  misc_feature: MA Experiment 108504 PARAMETER Experiment Name: Zm_Drought_P Parameter: Age (day) Value: 8
  misc_feature: MA Experiment 108504 PARAMETER Experiment Name: Zm_Drought_P Parameter: Organism Value: Zea mays
  misc_feature: MA Experiment 108504 PARAMETER Experiment Name: Zm_Drought_P Parameter: Plant Line Value: 35A19
  misc_feature: MA Experiment 108504 PARAMETER Experiment Name: Zm_Drought_P Parameter: Timepoint (hr) Value: 12
  misc_feature: MA Experiment 108504 PARAMETER Experiment Name: Zm_Drought_P Parameter: Tissue Value: Aerial
  misc_feature: MA Experiment 108504 PARAMETER Experiment Name: Zm_Drought_P Parameter: Treatment Value: Drought vs. No Drought
  misc_feature: MA Experiment ID: 108523 Result: Up-regulated in Transcription
  misc_feature: MA Experiment 108523 PARAMETER Experiment Name: Zm_42deg_Heat_P Parameter: Age (day) Value: 8
  misc_feature: MA Experiment 108523 PARAMETER Experiment Name: Zm_42deg_Heat_P Parameter: Organism Value: Zea mays
  misc_feature: MA Experiment 108523 PARAMETER Experiment Name: Zm_42deg_Heat_P Parameter: Plant Line Value: 35A19
  misc_feature: MA Experiment 108523 PARAMETER Experiment Name: Zm_42deg_Heat_P Parameter: Temperature (deg C) Value: 42 vs. 22
  misc_feature: MA Experiment 108523 PARAMETER Experiment Name: Zm_42deg_Heat_P Parameter: Timepoint (hr) Value: 6
  misc_feature: MA Experiment 108523 PARAMETER Experiment Name: Zm_42deg_Heat_P Parameter: Tissue Value: Aerial
  misc_feature: MA Experiment ID: 108535 Result: Up-regulated in Transcription
  misc_feature: MA Experiment 108535 PARAMETER Experiment Name: Zm_Meristem_P Parameter: Age (day) Value: 8
  misc_feature: MA Experiment 108535 PARAMETER Experiment Name: Zm_Meristem_P Parameter: Organism Value: Zea mays
  misc_feature: MA Experiment 108535 PARAMETER Experiment Name: Zm_Meristem_P Parameter: Plant Line Value: 35A19
  misc_feature: MA Experiment 108535 PARAMETER Experiment Name: Zm_Meristem_P Parameter: Tissue Value: Root Meristem vs. Above Root Meristem
  misc_feature: MA Experiment ID: 108543 Result: Down-regulated in Transcription
  misc_feature: MA Experiment ID: 108597 Result: Up-regulated in Transcription
  misc_feature: MA Experiment 108597 PARAMETER Experiment Name: Zm_100uM_ABA_P Parameter: Age (day) Value: 9
  misc_feature: MA Experiment 108597 PARAMETER Experiment Name: Zm_100uM_ABA_P Parameter: Organism Value: Zea mays
  misc_feature: MA Experiment 108597 PARAMETER Experiment Name: Zm_100uM_ABA_P Parameter: Plant Line Value: 35A19
  misc_feature: MA Experiment 108597 PARAMETER Experiment Name: Zm_100uM_ABA_P Parameter: Timepoint (hr) Value: 24
  misc_feature: MA Experiment 108597 PARAMETER Experiment Name: Zm_100uM_ABA_P Parameter: Tissue Value: Aerial
  misc_feature: MA Experiment 108597 PARAMETER Experiment Name: Zm_100uM_ABA_P Parameter: Treatment Value: 100uM ABA vs. No Treatment
accatcatggcagaagcggccggcggcggacccctgctccccgaggaactcattatctgggagatcctaacccgtctgccggcgaagcccctcctccgatgccgcgctgtctgcctctcctggtgccgccgactcacctccgacgccaaattcctcctcgcccaccaccgtcgccagccctcgctcccgctcctcactgaaggggacaggagcaccgaggagaggaggatcgacgccctggactaccgcaccggcgagcggcgccccatcgcgcggacaacaggccggaccgccgccaacggggacgacctgaacgtgctggcttcctgcgaaggcctcctcatcctcctcgccaacggcggcctccagatctgcaacccggcgacccgccagcgcgcgccactcactcttctccacggcgcctattgcatctccgcgctttaccctcacatcccgtccaggtcgtaccgtgtgctctgctgcttcgagagagccgaggacggccacgccgtgtaccacgtgcacaccgtcgggtcgcgcgaactcaggtgcgtcggagaacctcccgcgccgtgggcgtccggggatatggtaatggcgatgccgatgatggtgtaccttcacccgcacgtcgtggcagacagcaggatctactggcagccggtaaagctgcccgtcggcaacggcaaggtcaacaacatgctcgtgttcgacacaatgaccgagtccttccagcaactgctgtcgcccgtggagggcccctttcttgaactgtttcagatgaacagcggcgcccttggattgtaccactgccgcagcggcaaggttgatctttgggtgttacaggatcacgggagctggtcctggtcgatgaaccaccggatcaaattggacgtgatgtttttctccctgctgccggtgctggacccggaaggagatgtgctagtgctttctaaaagaggggaaacaggcatcctgtggcaacatctgcatcacatttctggtgtcaatggcagtttgctgggccctgtatcaatggagcgcttatctgaagcttagcaggcataggctcaaagaaagtctagtccaccatgacttcttctcgatggtaggtaatgagggtggtgtggatgaaaaaccattgttcgatggcttgtcaactgtggcattgcttcgtgatgataattctgagccacattgagaaacaaaggtattactcaagctgtttcatctcatcaggatggagtcactcctgcctagtaataacagcactgcagattagtaataacctgaaactatacctcgagtctgatttttcccttttcacatgagtcataaacactgttatgactggtattttattttcccttttcacgtgagtcatgaacactgttattactggtattttattttccattttcacatgagcc

SEQ ID NO: 7063 - protein, 352 aa, Zea mays subsp. mays
  peptide (1)..(352): Ceres Seq. ID no. 12408942
  misc_feature (9)..(56): Pfam Name: F-box domain Pfam Description: F-box domain
  misc_feature (3)..(322): Homolog of NCBI NO: 38346045 NR Description: OSJNBa0059D20.17 [Oryza sativa (japonica
  misc_feature (13)..(341): Homolog of NCBI NO: 38346536 NR Description: OSJNBa0040D17.11 [Oryza sativa (japonica
  misc_feature (9)..(322): Homolog of NCBI NO: 37533944 NR Description: hypothetical protein [Oryza sativa (japonica group)] >gi|14018043|gb|AAK52106.1| Hypothetical protein [Oryza >gi|15451623|gb|AAK98747.1| Hypothetical protein [Oryza sativa]
  misc_feature (6)..(299): Homolog of NCBI NO: 38344215 NR Description: OSJNBb0026E15.3 [Oryza sativa (japonica
  misc_feature (13)..(317): Homolog of NCBI NO: 38346527 NR Description: OSJNBa0040D17.2 [Oryza sativa (japonica
  misc_feature (1)..(316): Homolog of NCBI NO: 37530720 NR Description: unknown protein [Oryza sativa (japonica >gi|14028986|gb|AAK52527.1| Unknown protein [Oryza sativa]
  misc_feature (4)..(299): Homolog of NCBI NO: 34905158 NR Description: P0700D12.24 [Oryza sativa (japonica
  misc_feature (256)..(326): Homolog of NCBI NO: 25553615 NR Description: OJ1046_F10.9 [Oryza sativa (japonica
  misc_feature (12)..(65): Homolog of NCBI NO: 25553615 NR Description: OJ1046_F10.9 [Oryza sativa (japonica
TIMAEAAGGGPLLPEELIIWEILTRLPAKPLLRCRAVCLSWCRRLTSDAKFLLAHHRRQPSLPLLTEGDRSTEERRIDALDYRTGERRPIARTTGRTAANGDDLNVLASCEGLLILLANGGLQICNPATRQRAPLTLLHGAYCISALYPHIPSRSYRVLCCFERAEDGHAVYHVHTVGSRELRCVGEPPAPWASGDMVMAMPMMVYLHPHVVADSRIYWQPVKLPVGNGKVNNMLVFDTMTESFQQLLSPVEGPFLELFQMNSGALGLYHCRSGKVDLWVLQDHGSWSWSMNHRIKLDVMFFSLLPVLDPEGDVLVLSKRGETGILWQHLHHISGVNGSLLGPVSMERLSEA

SEQ ID NO: 7064 - protein, 350 aa, Zea mays subsp. mays
  peptide (1)..(350): Ceres Seq. ID no. 12408943
  misc_feature (7)..(54): Pfam Name: F-box domain Pfam Description: F-box domain
  misc_feature (1)..(320): Homolog of NCBI NO: 38346045 NR Description: OSJNBa0059D20.17 [Oryza sativa (japonica
  misc_feature (11)..(339): Homolog of NCBI NO: 38346536 NR Description: OSJNBa0040D17.11 [Oryza sativa (japonica
  misc_feature (7)..(320): Homolog of NCBI NO: 37533944 NR Description: hypothetical protein [Oryza sativa (japonica group)] >gi|14018043|gb|AAK52106.1| Hypothetical protein [Oryza >gi|15451623|gb|AAK98747.1| Hypothetical protein [Oryza sativa]
  misc_feature (4)..(297): Homolog of NCBI NO: 38344215 NR Description: OSJNBb0026E15.3 [Oryza sativa (japonica
  misc_feature (11)..(315): Homolog of NCBI NO: 38346527 NR Description: OSJNBa0040D17.2 [Oryza sativa (japonica
  misc_feature (1)..(314): Homolog of NCBI NO: 37530720 NR Description: unknown protein [Oryza sativa (japonica >gi|14028986|gb|AAK52527.1| Unknown protein [Oryza sativa]
  misc_feature (2)..(297): Homolog of NCBI NO: 34905158 NR Description: P0700D12.24 [Oryza sativa (japonica
  misc_feature (254)..(324): Homolog of NCBI NO: 25553615 NR Description: OJ1046_F10.9 [Oryza sativa (japonica
  misc_feature (10)..(63): Homolog of NCBI NO: 25553615 NR Description: OJ1046_F10.9 [Oryza sativa (japonica
MAEAAGGGPLLPEELIIWEILTRLPAKPLLRCRAVCLSWCRRLTSDAKFLLAHHRRQPSLPLLTEGDRSTEERRIDALDYRTGERRPIARTTGRTAANGDDLNVLASCEGLLILLANGGLQICNPATRQRAPLTLLHGAYCISALYPHIPSRSYRVLCCFERAEDGHAVYHVHTVGSRELRCVGEPPAPWASGDMVMAMPMMVYLHPHVVADSRIYWQPVKLPVGNGKVNNMLVFDTMTESFQQLLSPVEGPFLELFQMNSGALGLYHCRSGKVDLWVLQDHGSWSWSMNHRIKLDVMFFSLLPVLDPEGDVLVLSKRGETGILWQHLHHISGVNGSLLGPVSMERLSEA

SEQ ID NO: 7065 - DNA, 1815 bp, Zea mays subsp. mays
  misc_feature (1)..(1815): Ceres Seq. ID no. 12408937
  misc_feature: MA Experiment ID: 108527 Result: Up-regulated in Transcription
  misc_feature: MA Experiment 108527 PARAMETER Experiment Name: Zm_5mM_NO_P Parameter: Age (day) Value: 8
  misc_feature: MA Experiment 108527 PARAMETER Experiment Name: Zm_5mM_NO_P Parameter: Organism Value: Zea mays
  misc_feature: MA Experiment 108527 PARAMETER Experiment Name: Zm_5mM_NO_P Parameter: Plant Line Value: 35A19
  misc_feature: MA Experiment 108527 PARAMETER Experiment Name: Zm_5mM_NO_P Parameter: Timepoint (hr) Value: 6
  misc_feature: MA Experiment 108527 PARAMETER Experiment Name: Zm_5mM_NO_P Parameter: Tissue Value: Aerial
  misc_feature: MA Experiment 108527 PARAMETER Experiment Name: Zm_5mM_NO_P Parameter: Treatment Value: 5mM NO vs. No Treatment
  misc_feature: MA Experiment ID: 108529 Result: Up-regulated in Transcription
  misc_feature: MA Experiment 108529 PARAMETER Experiment Name: Zm_Imbibed_Seeds_P Parameter: Age (day) Value: 5 vs. 2
  misc_feature: MA Experiment 108529 PARAMETER Experiment Name: Zm_Imbibed_Seeds_P Parameter: Organism Value: Zea mays
  misc_feature: MA Experiment 108529 PARAMETER Experiment Name: Zm_Imbibed_Seeds_P Parameter: Plant Line Value: 35A19
  misc_feature: MA Experiment 108529 PARAMETER Experiment Name: Zm_Imbibed_Seeds_P Parameter: Tissue Value: Roots vs. Embryo
  misc_feature: MA Experiment ID: 108530 Result: Up-regulated in Transcription
  misc_feature: MA Experiment 108530 PARAMETER Experiment Name: Zm_Imbibed_Seeds_P Parameter: Age (day) Value: 6 vs. 2
  misc_feature: MA Experiment 108530 PARAMETER Experiment Name: Zm_Imbibed_Seeds_P Parameter: Organism Value: Zea mays
  misc_feature: MA Experiment 108530 PARAMETER Experiment Name: Zm_Imbibed_Seeds_P Parameter: Plant Line Value: 35A19
  misc_feature: MA Experiment 108530 PARAMETER Experiment Name: Zm_Imbibed_Seeds_P Parameter: Tissue Value: Aerial vs. Embryo
  misc_feature: MA Experiment ID: 108535 Result: Down-regulated in Transcription
  misc_feature: MA Experiment 108535 PARAMETER Experiment Name: Zm_Meristem_P Parameter: Age (day) Value: 8
  misc_feature: MA Experiment 108535 PARAMETER Experiment Name: Zm_Meristem_P Parameter: Organism Value: Zea mays
  misc_feature: MA Experiment 108535 PARAMETER Experiment Name: Zm_Meristem_P Parameter: Plant Line Value: 35A19
  misc_feature: MA Experiment 108535 PARAMETER Experiment Name: Zm_Meristem_P Parameter: Tissue Value: Root Meristem vs. Above Root Meristem
  misc_feature: MA Experiment ID: 108546 Result: Up-regulated in Transcription
  misc_feature: MA Experiment 108546 PARAMETER Experiment Name: Zm_Imbibed_Seeds_P Parameter: Age (day) Value: 3 vs. 2
  misc_feature: MA Experiment 108546 PARAMETER Experiment Name: Zm_Imbibed_Seeds_P Parameter: Organism Value: Zea mays
  misc_feature: MA Experiment 108546 PARAMETER Experiment Name: Zm_Imbibed_Seeds_P Parameter: Plant Line Value: 35A19
  misc_feature: MA Experiment 108546 PARAMETER Experiment Name: Zm_Imbibed_Seeds_P Parameter: Tissue Value: Roots vs. Embryo
  misc_feature: MA Experiment ID: 108687 Result: Down-regulated in Transcription
  misc_feature: MA Experiment 108687 PARAMETER Experiment Name: Zm_Embryos-Flowers__P Parameter: Tissue Value: Embryo vs. Aerial+
  misc_feature: MA Experiment ID: 108688 Result: Down-regulated in Transcription
  misc_feature: MA Experiment 108688 PARAMETER Experiment Name: Zm_Embryos-Flowers__P Parameter: Tissue Value: Immature Flowers vs. Aerial+
  misc_feature: MA Experiment ID: 20000534 Result: Down-regulated in Transcription
  misc_feature: MA Experiment 20000534 PARAMETER Experiment Name: Zm_Hybrid_Pollen_P Parameter: Age (day) Value: 8
  misc_feature: MA Experiment 20000534 PARAMETER Experiment Name: Zm_Hybrid_Pollen_P Parameter: Organism Value: Zea mays
  misc_feature: MA Experiment 20000534 PARAMETER Experiment Name: Zm_Hybrid_Pollen_P Parameter: Plant Line Value: 35A19
  misc_feature: MA Experiment 20000534 PARAMETER Experiment Name: Zm_Hybrid_Pollen_P Parameter: Tissue Value: Pollen vs. Aerial
  misc_feature: MA Experiment ID: 20000535 Result: Down-regulated in Transcription
  misc_feature: MA Experiment 20000535 PARAMETER Experiment Name: Zm_Hybrid_Seed_Dev_P Parameter: DAP Value: 30 vs. 12
  misc_feature: MA Experiment 20000535 PARAMETER Experiment Name: Zm_Hybrid_Seed_Dev_P Parameter: Organism Value: Zea mays
  misc_feature: MA Experiment 20000535 PARAMETER Experiment Name: Zm_Hybrid_Seed_Dev_P Parameter: Plant Line Value: 35A19
  misc_feature: MA Experiment 20000535 PARAMETER Experiment Name: Zm_Hybrid_Seed_Dev_P Parameter: Tissue Value: Embryo vs. Unfert Floret
  misc_feature: MA Experiment ID: 20001608 Result: Down-regulated in Transcription
  misc_feature: MA Experiment 20001608 PARAMETER Experiment Name: Zm_50ppm_KNO3_L-to-H_P Parameter: Age (day) Value: 21
  misc_feature: MA Experiment 20001608 PARAMETER Experiment Name: Zm_50ppm_KNO3_L-to-H_P Parameter: Organism Value: Zea mays
  misc_feature: MA Experiment 20001608 PARAMETER Experiment Name: Zm_50ppm_KNO3_L-to-H_P Parameter: Plant Line Value: 35A19
  misc_feature: MA Experiment 20001608 PARAMETER Experiment Name: Zm_50ppm_KNO3_L-to-H_P Parameter: Timepoint (hr) Value: 48
  misc_feature: MA Experiment 20001608 PARAMETER Experiment Name: Zm_50ppm_KNO3_L-to-H_P Parameter: Tissue Value: Shoots
  misc_feature: MA Experiment 20001608 PARAMETER Experiment Name: Zm_50ppm_KNO3_L-to-H_P Parameter: Treatment Value: 50ppm KNO3 vs. 50ppm KCl
aagtatcaagctaggcaggcctggtcccgaagaacacccttctctggtcgtcgcatcgcagggcagctagctaggtagctaacatccgccatggcgcgcgggggagacggcctgcaggtgctgagcgcgctggacgcggcgaagacgcagtggtaccacttcacggccatcatcgtcgccggcatgggcttcttcacggacgcctacgacctcttctgcatctccctcgtcaccaagctgctgggccgcatctactacacggacaccagcaaggacagccccgggtcgctgccgcccaacgtcgcggcggcggtcaacggcgtggccttctgcggcacgctggccggccagctcttcttcggctggctgggcgacaagctggggcgcaagagcgtgtacgggatgacgctcatggtcatggtcatctgctccgtcgcgtcgggcctctcgttcggccacacccccacgggggtcatggccacgctctgcttcttccgcttctggctcggcttcggcatcggcggcgactacccgctgtcggccaccatcatgtccgagtacgccaacaagaggacccgcggcgccttcatcgccgccgtcttcgccatgcagggcttcggcatcctcgccggcggcatcgtcacgctcgtcatctccgccgccttccgcgcggcgtacccgtccccggcgtacagggacgaccacttcacctccaccgtgccgcaggccgacttcgtgtggcgggtcatcctcatgctcggcgccgcgccggcgctgctcacctactactggcggatgaagatgcccgagacggcgcggtacacggcgctggtggccaagaacgccaagcaggccgcggccgacatgtccaaggtgctgcagactgagatcgtggacgagcaggagaagctggacgccgccgagggcgccaacagcttcggcctcttctccagggagttcgcgcgccgccacggcctccacctcgtcggcaccgccaccacctggttcctgctcgacatcgccttctacagccagaacctgttccagaaggacatcttcaccagcatcaactggatccccaaggccaacaccatgagcgcgctggaggaggtgtaccgcatctcccgcgcgcagacgctcatcgcgctctgcggcacagtcccgggctactggttcaccgtcgcgctcatcgacgtcgtcggccgcttcgccatccagctgctgggcttcttcatgatgaccgtcttcatgctcggcctcgccatcccttaccaccactggaccacgccgggcaaccacatcggcttcgtcgtcatgtacgccttcaccttcttcttcgccaacttcgggcccaacagcaccaccttcatcgtgcccgccgagatcttcccggcgcgcctgcgctccacctgccacggcatctccgccgcctcggggaaggccggggccatcatcggcgcgttcggcttcctgtacgcggcgcagaaccaggacaggagcaagacggacgccggctaccccgcgggcatcggcgtgcgcaactcgctcttcgtcctcgccgccagcaacatgctcggcttcgtcctcacgttcctcgtgccggagtccaagggcaagtcgctcgaggagatgtccggtgaggctgaagactcagaggaggagcccgtcggcgcccgtgcggtgcggccgtcggagacccagatggtgtagagaatcgatcgatcgacgcgtgttccttcctgcactgcacatggtgggctatcatgtcctcaattgtttttttccacgttaaagtcaaccctggctgtgttttgc

SEQ ID NO: 7066 - protein, 539 aa, Zea mays subsp. mays
  peptide (1)..(539): Ceres Seq. ID no. 12408938
  misc_feature (25)..(517): Pfam Name: Sugar (and other) transporter Pfam Description: Sugar (and other) transporter
  misc_feature (1)..(534): Homolog of NCBI NO: 29367131 NR Description: phosphate transporter HvPT4 [Hordeum vulgare vulgare] >gi|29367133|gb|AAO72438.1| phosphate transporter HvPT4
  misc_feature (1)..(539): Homolog of NCBI NO: 27261479 NR Description: Putative phosphate transporter OsPT12 [Oryza
  misc_feature (1)..(539): Homolog of NCBI NO: 23600482 NR Description: putative phosphate transporter OsPT12 [Oryza
  misc_feature (8)..(539): Homolog of NCBI NO: 29367127 NR Description: phosphate transporter HvPT5 [Hordeum vulgare
  misc_feature (1)..(531): Homolog of NCBI NO: 23506605 NR Description: phosphate transporter 6 [Hordeum vulgare subsp.
  misc_feature (8)..(525): Homolog of NCBI NO: 20162455 NR Description: phosphate transporter [Oryza sativa] phosphate transporter [Oryza sativa] >gi|23600450|gb|AAN39045.1|
  misc_feature (8)..(525): Homolog of NCBI NO: 15983299 NR Description: phosphate transporter [Oryza sativa subsp. indica]
  misc_feature (8)..(530): Homolog of NCBI NO: 7446748 NR Description: phosphate transport protein PT1 - potato
  misc_feature (8)..(530): Homolog of NCBI NO: 7446753 NR Description: probable inorganic phosphate transport protein - >gi|2570523|gb|AAB82146.1| inorganic phosphate transporter
  misc_feature (216)..(517): Homolog of NCBI NO: 14324338 NR Description: metabolite transporter [Thermoplasma volcanium]
MARGGDGLQVLSALDAAKTQWYHFTAIIVAGMGFFTDAYDLFCISLVTKLLGRIYYTDTSKDSPGSLPPNVAAAVNGVAFCGTLAGQLFFGWLGDKLGRKSVYGMTLMVMVICSVASGLSFGHTPTGVMATLCFFRFWLGFGIGGDYPLSATIMSEYANKRTRGAFIAAVFAMQGFGILAGGIVTLVISAAFRAAYPSPAYRDDHFTSTVPQADFVWRVILMLGAAPALLTYYWRMKMPETARYTALVAKNAKQAAADMSKVLQTEIVDEQEKLDAAEGANSFGLFSREFARRHGLHLVGTATTWFLLDIAFYSQNLFQKDIFTSINWIPKANTMSALEEVYRISRAQTLIALCGTVPGYWFTVALIDVVGRFAIQLLGFFMMTVFMLGLAIPYHHWTTPGNHIGFVVMYAFTFFFANFGPNSTTFIVPAEIFPARLRSTCHGISAASGKAGAIIGAFGFLYAAQNQDRSKTDAGYPAGIGVRNSLFVLAASNMLGFVLTFLVPESKGKSLEEMSGEAEDSEEEPVGARAVRPSETQMV

SEQ ID NO: 7067 - protein, 508 aa, Zea mays subsp. mays
  peptide (1)..(508): Ceres Seq. ID no. 12408939
  misc_feature (1)..(486): Pfam Name: Sugar (and other) transporter Pfam Description: Sugar (and other) transporter
  misc_feature (1)..(503): Homolog of NCBI NO: 29367131 NR Description: phosphate transporter HvPT4 [Hordeum vulgare vulgare] >gi|29367133|gb|AAO72438.1| phosphate transporter HvPT4
  misc_feature (1)..(508): Homolog of NCBI NO: 27261479 NR Description: Putative phosphate transporter OsPT12 [Oryza
  misc_feature (1)..(508): Homolog of NCBI NO: 23600482 NR Description: putative phosphate transporter OsPT12 [Oryza
  misc_feature (1)..(508): Homolog of NCBI NO: 29367127 NR Description: phosphate transporter HvPT5 [Hordeum vulgare
  misc_feature (1)..(500): Homolog of NCBI NO: 23506605 NR Description: phosphate transporter 6 [Hordeum vulgare subsp.
  misc_feature (1)..(494): Homolog of NCBI NO: 20162455 NR Description: phosphate transporter [Oryza sativa] phosphate transporter [Oryza sativa] >gi|23600450|gb|AAN39045.1|
  misc_feature (1)..(494): Homolog of NCBI NO: 15983299 NR Description: phosphate transporter [Oryza sativa subsp. indica]
  misc_feature (1)..(499): Homolog of NCBI NO: 7446748 NR Description: phosphate transport protein PT1 - potato
  misc_feature (1)..(499): Homolog of NCBI NO: 7446753 NR Description: probable inorganic phosphate transport protein - >gi|2570523|gb|AAB82146.1| inorganic phosphate transporter
  misc_feature (185)..(486): Homolog of NCBI NO: 14324338 NR Description: metabolite transporter [Thermoplasma volcanium]
MGFFTDAYDLFCISLVTKLLGRIYYTDTSKDSPGSLPPNVAAAVNGVAFCGTLAGQLFFGWLGDKLGRKSVYGMTLMVMVICSVASGLSFGHTPTGVMATLCFFRFWLGFGIGGDYPLSATIMSEYANKRTRGAFIAAVFAMQGFGILAGGIVTLVISAAFRAAYPSPAYRDDHFTSTVPQADFVWRVILMLGAAPALLTYYWRMKMPETARYTALVAKNAKQAAADMSKVLQTEIVDEQEKLDAAEGANSFGLFSREFARRHGLHLVGTATTWFLLDIAFYSQNLFQKDIFTSINWIPKANTMSALEEVYRISRAQTLIALCGTVPGYWFTVALIDVVGRFAIQLLGFFMMTVFMLGLAIPYHHWTTPGNHIGFVVMYAFTFFFANFGPNSTTFIVPAEIFPARLRSTCHGISAASGKAGAIIGAFGFLYAAQNQDRSKTDAGYPAGIGVRNSLFVLAASNMLGFVLTFLVPESKGKSLEEMSGEAEDSEEEPVGARAVRPSETQMV

SEQ ID NO: 7068 - protein, 435 aa, Zea mays subsp. mays
  peptide (1)..(435): Ceres Seq. ID no. 12408940
  misc_feature (1)..(413): Pfam Name: Sugar (and other) transporter Pfam Description: Sugar (and other) transporter
  misc_feature (1)..(430): Homolog of NCBI NO: 29367131 NR Description: phosphate transporter HvPT4 [Hordeum vulgare vulgare] >gi|29367133|gb|AAO72438.1| phosphate transporter HvPT4
  misc_feature (1)..(435): Homolog of NCBI NO: 27261479 NR Description: Putative phosphate transporter OsPT12 [Oryza
  misc_feature (1)..(435): Homolog of NCBI NO: 23600482 NR Description: putative phosphate transporter OsPT12 [Oryza
  misc_feature (1)..(435): Homolog of NCBI NO: 29367127 NR Description: phosphate transporter HvPT5 [Hordeum vulgare
  misc_feature (1)..(427): Homolog of NCBI NO: 23506605 NR Description: phosphate transporter 6 [Hordeum vulgare subsp.
  misc_feature (1)..(421): Homolog of NCBI NO: 20162455 NR Description: phosphate transporter [Oryza sativa] phosphate transporter [Oryza sativa] >gi|23600450|gb|AAN39045.1|
  misc_feature (1)..(421): Homolog of NCBI NO: 15983299 NR Description: phosphate transporter [Oryza sativa subsp. indica]
  misc_feature (1)..(426): Homolog of NCBI NO: 7446748 NR Description: phosphate transport protein PT1 - potato
  misc_feature (1)..(426): Homolog of NCBI NO: 7446753 NR Description: probable inorganic phosphate transport protein - >gi|2570523|gb|AAB82146.1| inorganic phosphate transporter
  misc_feature (112)..(413): Homolog of NCBI NO: 14324338 NR Description: metabolite transporter [Thermoplasma volcanium]
MTLMVMVICSVASGLSFGHTPTGVMATLCFFRFWLGFGIGGDYPLSATIMSEYANKRTRGAFIAAVFAMQGFGILAGGIVTLVISAAFRAAYPSPAYRDDHFTSTVPQADFVWRVILMLGAAPALLTYYWRMKMPETARYTALVAKNAKQAAADMSKVLQTEIVDEQEKLDAAEGANSFGLFSREFARRHGLHLVGTATTWFLLDIAFYSQNLFQKDIFTSINWIPKANTMSALEEVYRISRAQTLIALCGTVPGYWFTVALIDVVGRFAIQLLGFFMMTVFMLGLAIPYHHWTTPGNHIGFVVMYAFTFFFANFGPNSTTFIVPAEIFPARLRSTCHGISAASGKAGAIIGAFGFLYAAQNQDRSKTDAGYPAGIGVRNSLFVLAASNMLGFVLTFLVPESKGKSLEEMSGEAEDSEEEPVGARAVRPSETQMV

SEQ ID NO: 7069 - DNA, 1448 bp, Zea mays subsp. mays
  misc_feature (1)..(1448): Ceres Seq. ID no. 13494789
  misc_feature: MA Experiment ID: 108504 Result: Down-regulated in Transcription
  misc_feature: MA Experiment 108504 PARAMETER Experiment Name: Zm_Drought_P Parameter: Age (day) Value: 8
  misc_feature: MA Experiment 108504 PARAMETER Experiment Name: Zm_Drought_P Parameter: Organism Value: Zea mays
  misc_feature: MA Experiment 108504 PARAMETER Experiment Name: Zm_Drought_P Parameter: Plant Line Value: 35A19
  misc_feature: MA Experiment 108504 PARAMETER Experiment Name: Zm_Drought_P Parameter: Timepoint (hr) Value: 12
  misc_feature: MA Experiment 108504 PARAMETER Experiment Name: Zm_Drought_P Parameter: Tissue Value: Aerial
  misc_feature: MA Experiment 108504 PARAMETER Experiment Name: Zm_Drought_P Parameter: Treatment Value: Drought vs. No Drought
  misc_feature: MA Experiment ID: 108527 Result: Down-regulated in Transcription
  misc_feature: MA Experiment 108527 PARAMETER Experiment Name: Zm_5mM_NO_P Parameter: Age (day) Value: 8
  misc_feature: MA Experiment 108527 PARAMETER Experiment Name: Zm_5mM_NO_P Parameter: Organism Value: Zea mays
  misc_feature: MA Experiment 108527 PARAMETER Experiment Name: Zm_5mM_NO_P Parameter: Plant Line Value: 35A19
  misc_feature: MA Experiment 108527 PARAMETER Experiment Name: Zm_5mM_NO_P Parameter: Timepoint (hr) Value: 6
  misc_feature: MA Experiment 108527 PARAMETER Experiment Name: Zm_5mM_NO_P Parameter: Tissue Value: Aerial
  misc_feature: MA Experiment 108527 PARAMETER Experiment Name: Zm_5mM_NO_P Parameter: Treatment Value: 5mM NO vs. No Treatment
  misc_feature: MA Experiment ID: 108536 Result: Up-regulated in Transcription
  misc_feature: MA Experiment 108536 PARAMETER Experiment Name: Zm_Meristem_P Parameter: Age (day) Value: 8
  misc_feature: MA Experiment 108536 PARAMETER Experiment Name: Zm_Meristem_P Parameter: Organism Value: Zea mays
  misc_feature: MA Experiment 108536 PARAMETER Experiment Name: Zm_Meristem_P Parameter: Plant Line Value: 35A19
  misc_feature: MA Experiment 108536 PARAMETER Experiment Name: Zm_Meristem_P Parameter: Tissue Value: Shoot Meristem vs. Above Shoot Meristem
  misc_feature: MA Experiment ID: 108540 Result: Down-regulated in Transcription
  misc_feature: MA Experiment 108540 PARAMETER Experiment Name: Zm_20percent_PEG_P Parameter: Age (day) Value: 8
  misc_feature: MA Experiment 108540 PARAMETER Experiment Name: Zm_20percent_PEG_P Parameter: Organism Value: Zea mays
  misc_feature: MA Experiment 108540 PARAMETER Experiment Name: Zm_20percent_PEG_P Parameter: Plant Line Value: 35A19
  misc_feature: MA Experiment 108540 PARAMETER Experiment Name: Zm_20percent_PEG_P Parameter: Timepoint (hr) Value: 6
  misc_feature: MA Experiment 108540 PARAMETER Experiment Name: Zm_20percent_PEG_P Parameter: Tissue Value: Aerial
  misc_feature: MA Experiment 108540 PARAMETER Experiment Name: Zm_20percent_PEG_P Parameter: Treatment Value: 20percent PEG vs. No Treatment
  misc_feature: MA Experiment ID: 108543 Result: Down-regulated in Transcription
  misc_feature: MA Experiment ID: 108556 Result: Down-regulated in Transcription
  misc_feature: MA Experiment 108556 PARAMETER Experiment Name: Zm_Drought_P Parameter: Age (day) Value: 9
  misc_feature: MA Experiment 108556 PARAMETER Experiment Name: Zm_Drought_P Parameter: Organism Value: Zea mays
  misc_feature: MA Experiment 108556 PARAMETER Experiment Name: Zm_Drought_P Parameter: Plant Line Value: 35A19
  misc_feature: MA Experiment 108556 PARAMETER Experiment Name: Zm_Drought_P Parameter: Timepoint (hr) Value: 24
  misc_feature: MA Experiment 108556 PARAMETER Experiment Name: Zm_Drought_P Parameter: Tissue Value: Aerial
  misc_feature: MA Experiment 108556 PARAMETER Experiment Name: Zm_Drought_P Parameter: Treatment Value: Drought vs. No Drought
  misc_feature: MA Experiment ID: 108559 Result: Down-regulated in Transcription
  misc_feature: MA Experiment 108559 PARAMETER Experiment Name: Zm_5mM_NO_P Parameter: Age (day) Value: 8
  misc_feature: MA Experiment 108559 PARAMETER Experiment Name: Zm_5mM_NO_P Parameter: Organism Value: Zea mays
  misc_feature: MA Experiment 108559 PARAMETER Experiment Name: Zm_5mM_NO_P Parameter: Plant Line Value: 35A19
  misc_feature: MA Experiment 108559 PARAMETER Experiment Name: Zm_5mM_NO_P Parameter: Timepoint (hr) Value: 12
  misc_feature: MA Experiment 108559 PARAMETER Experiment Name: Zm_5mM_NO_P Parameter: Tissue Value: Aerial
  misc_feature: MA Experiment 108559 PARAMETER Experiment Name: Zm_5mM_NO_P Parameter: Treatment Value: 5mM NO vs. No Treatment
  misc_feature: MA Experiment ID: 108597 Result: Down-regulated in Transcription
  misc_feature: MA Experiment 108597 PARAMETER Experiment Name: Zm_100uM_ABA_P Parameter: Age (day) Value: 9
  misc_feature: MA Experiment 108597 PARAMETER Experiment Name: Zm_100uM_ABA_P Parameter: Organism Value: Zea mays
  misc_feature: MA Experiment 108597 PARAMETER Experiment Name: Zm_100uM_ABA_P Parameter: Plant Line Value: 35A19
  misc_feature: MA Experiment 108597 PARAMETER Experiment Name: Zm_100uM_ABA_P Parameter: Timepoint (hr) Value: 24
  misc_feature: MA Experiment 108597 PARAMETER Experiment Name: Zm_100uM_ABA_P Parameter: Tissue Value: Aerial
  misc_feature: MA Experiment 108597 PARAMETER Experiment Name: Zm_100uM_ABA_P Parameter: Treatment Value: 100uM ABA vs. No Treatment
  misc_feature: MA Experiment ID: 108689 Result: Down-regulated in Transcription
  misc_feature: MA Experiment 108689 PARAMETER Experiment Name: Zm_Drought_Roots_P Parameter: Age (day) Value: 9
  misc_feature: MA Experiment 108689 PARAMETER Experiment Name: Zm_Drought_Roots_P Parameter: Organism Value: Zea mays
  misc_feature: MA Experiment 108689 PARAMETER Experiment Name: Zm_Drought_Roots_P Parameter: Plant Line Value: 35A19
  misc_feature: MA Experiment 108689 PARAMETER Experiment Name: Zm_Drought_Roots_P Parameter: Timepoint (hr) Value: 24
  misc_feature: MA Experiment 108689 PARAMETER Experiment Name: Zm_Drought_Roots_P Parameter: Tissue Value: Roots
  misc_feature: MA Experiment 108689 PARAMETER Experiment Name: Zm_Drought_Roots_P Parameter: Treatment Value: Drought vs. No Drought
  misc_feature: MA Experiment ID: 20000535 Result: Down-regulated in Transcription
  misc_feature: MA Experiment 20000535 PARAMETER Experiment Name: Zm_Hybrid_Seed_Dev_P Parameter: DAP Value: 30 vs. 12
  misc_feature: MA Experiment 20000535 PARAMETER Experiment Name: Zm_Hybrid_Seed_Dev_P Parameter: Organism Value: Zea mays
  misc_feature: MA Experiment 20000535 PARAMETER Experiment Name: Zm_Hybrid_Seed_Dev_P Parameter: Plant Line Value: 35A19
  misc_feature: MA Experiment 20000535 PARAMETER Experiment Name: Zm_Hybrid_Seed_Dev_P Parameter: Tissue Value: Embryo vs. Unfert Floret
  misc_feature: MA Experiment ID: 20000629 Result: Up-regulated in Transcription
  misc_feature: MA Experiment 20000629 PARAMETER Experiment Name: Zm_Herbicide-Treatments_P Parameter: Timepoint (hr) Value: 12
  misc_feature: MA Experiment 20000629 PARAMETER Experiment Name: Zm_Herbicide-Treatments_P Parameter: Tissue Value: Aerial
  misc_feature: MA Experiment 20000629 PARAMETER Experiment Name: Zm_Herbicide-Treatments_P Parameter: Treatment Value: Trimec vs. No Treatment
  misc_feature: MA Experiment ID: 20001608 Result: Down-regulated in Transcription
  misc_feature: MA Experiment 20001608 PARAMETER Experiment Name: Zm_50ppm_KNO3_L-to-H_P Parameter: Age (day) Value: 21
  misc_feature: MA Experiment 20001608 PARAMETER Experiment Name: Zm_50ppm_KNO3_L-to-H_P Parameter: Organism Value: Zea mays
  misc_feature: MA Experiment 20001608 PARAMETER Experiment Name: Zm_50ppm_KNO3_L-to-H_P Parameter: Plant Line Value: 35A19
  misc_feature: MA Experiment 20001608 PARAMETER Experiment Name: Zm_50ppm_KNO3_L-to-H_P Parameter: Timepoint (hr) Value: 48
  misc_feature: MA Experiment 20001608 PARAMETER Experiment Name: Zm_50ppm_KNO3_L-to-H_P Parameter: Tissue Value: Shoots
  misc_feature: MA Experiment 20001608 PARAMETER Experiment Name: Zm_50ppm_KNO3_L-to-H_P Parameter: Treatment Value: 50ppm KNO3 vs. 50ppm KCl
  misc_feature: MA Experiment ID: 20001613 Result: Down-regulated in Transcription
  misc_feature: MA Experiment 20001613 PARAMETER Experiment Name: Zm_50ppm_KNO3_L-to-H_P Parameter: Age (day) Value: 20
  misc_feature: MA Experiment 20001613 PARAMETER Experiment Name: Zm_50ppm_KNO3_L-to-H_P Parameter: Organism Value: Zea mays
  misc_feature: MA Experiment 20001613 PARAMETER Experiment Name: Zm_50ppm_KNO3_L-to-H_P Parameter: Plant Line Value: 35A19
  misc_feature: MA Experiment 20001613 PARAMETER Experiment Name: Zm_50ppm_KNO3_L-to-H_P Parameter: Timepoint (hr) Value: 24
  misc_feature: MA Experiment 20001613 PARAMETER Experiment Name: Zm_50ppm_KNO3_L-to-H_P Parameter: Tissue Value: Roots
  misc_feature: MA Experiment 20001613 PARAMETER Experiment Name: Zm_50ppm_KNO3_L-to-H_P Parameter: Treatment Value: 50ppm KNO3 vs. 50ppm KCl
gactcagtggcacggggcgcggacgctgccgctcgcgatatttgcgagagagagagagagagagagggcccgagagccgaggacgagtgcagtctggctggcgtgatgctgcttcggagcgcgtcctcgccgctgctcaactgcgggcgcgcgccggctgcggcggcgtcggtcgagncacctcgcggtggtttcgccgttgttatcaccggcagtggcggcgctaggcaggggccggtgctgtgccgcgccatntccgagggggacctcgccgcgccgctcgtgcccaagaaggatnatggacacggganggcgccgaggctatcggcgtccttgtcctcgtccgcctccatcttcgtcgaggaggacggcgagggcgaggaggaggaggaggacctggtcgcggtcgcggtcgcgggggccggcgtggacgtgccgctgccgctgcgtcggctgctgacgaacacggggctggacgtgtccgccgccgcggcgctggcgttcgtggagcagggcgtcggcggcagcggcgggggcgggaaggcgtgcggcagcagcggcggcaagggtggggtcggggacggcgacggtggcagcaaccgcgccgccacggacgcccactaccggcagatgatcgaggcggacccgggcaactcgctgctcctggtcaactacgccaggttcctcaaggaggtggcgggggacgcagcaagggcgcaggagtactgcgagcgcgccatcctcgccagtcccggcgacgccgaggcgctgtcgctctacgcgggcctcgtttgggagaccagccgcgacgctggccgcgccgaggactactacagccgcgccgtccaggccgcacccgacgactgctacgtcctgggntcttacgccgggttcctgtgggacgccgaggaggacgaggaagagaactccgagcccttgccacctccttcgctgttccagggggcagctcagcgtccttccatcacagcggcctcttagatgatcgtgaactcgatctagatctcaccaccgcctgtgaacgaagctgaatctggaaccctggagagtggagagtgactgggagtgggagataaccgtgcagaaacccccgacgagtgactcgcantcgccggccggctcctcgccgcttgtgaactgaatcacggcacatgtaaaactgaatctggcagagcacacacgcgccgcgcctaagcctattagcgtctatagactttgcagggctatgtatagtagatatgtagattgagaccctgctgagcttgtacgtgcagtatgttcctagtcacttgtgtatcattactagtaatgcagtatctctcgcaaaataaacgtcaaaaacccttcctgctgcttcatccgagcagagcatcttccaagaagagcagatatcgaactgcaagaactgatgcactgaatcacaaagcttt

SEQ ID NO: 7070 - protein, 332 aa, Zea mays subsp. mays
  peptide (1)..(332): Ceres Seq. ID no. 13494790
  misc_feature (146)..(332): Homolog of NCBI NO: 18412668 NR Description: expressed protein [Arabidopsis thaliana]
  misc_feature (173)..(311): Homolog of NCBI NO: 15241290 NR Description: expressed protein [Arabidopsis thaliana]
  misc_feature (174)..(332): Homolog of NCBI NO: 14532728 NR Description: unknown protein [Arabidopsis thaliana]
  misc_feature (174)..(332): Homolog of NCBI NO: 15236755 NR Description: expressed protein [Arabidopsis thaliana]
  misc_feature (179)..(311): Homolog of NCBI NO: 7487766 NR Description: hypothetical protein T6K21.120 - Arabidopsis >gi|2894603|emb|CAA17137.1| putative protein [Arabidopsis >gi|7268546|emb|CAB78796.1| putative protein [Arabidopsis
  misc_feature (179)..(311): Homolog of NCBI NO: 18414994 NR Description: expressed protein [Arabidopsis thaliana]
  misc_feature (179)..(311): Homolog of NCBI NO: 21592868 NR Description: unknown [Arabidopsis thaliana]
  misc_feature (130)..(316): Homolog of NCBI NO: 37537130 NR Description: unknown protein [Oryza sativa (japonica
  misc_feature (123)..(273): Homolog of NCBI NO: 38345382 NR Description: OSJNBa0067K08.11 [Oryza sativa (japonica
  misc_feature (207)..(311): Homolog of NCBI NO: 18390404 NR Description: expressed protein [Arabidopsis thaliana] unknown protein [Arabidopsis thaliana]
  misc_feature (146)..(332): Homolog of NCBI NO: 18412668 NR Description: expressed protein [Arabidopsis thaliana]
  misc_feature (173)..(311): Homolog of NCBI NO: 15241290 NR Description: expressed protein [Arabidopsis thaliana]
  misc_feature (174)..(332): Homolog of NCBI NO: 14532728 NR Description: unknown protein [Arabidopsis thaliana]
  misc_feature (174)..(332): Homolog of NCBI NO: 15236755 NR Description: expressed protein [Arabidopsis thaliana]
  misc_feature (179)..(311): Homolog of NCBI NO: 7487766 NR Description: hypothetical protein T6K21.120 - Arabidopsis >gi|2894603|emb|CAA17137.1| putative protein [Arabidopsis >gi|7268546|emb|CAB78796.1| putative protein [Arabidopsis
  misc_feature (179)..(311): Homolog of NCBI NO: 18414994 NR Description: expressed protein [Arabidopsis thaliana]
  misc_feature (179)..(311): Homolog of NCBI NO: 21592868 NR Description: unknown [Arabidopsis thaliana]
  misc_feature (130)..(316): Homolog of NCBI NO: 37537130 NR Description: unknown protein [Oryza sativa (japonica
  misc_feature (123)..(273): Homolog of NCBI NO: 38345382 NR Description: OSJNBa0067K08.11 [Oryza sativa (japonica
  misc_feature (207)..(311): Homolog of NCBI NO: 18390404 NR Description: expressed protein [Arabidopsis thaliana] unknown protein [Arabidopsis thaliana]
  misc_feature (60)..(60): Xaa is any aa, unknown or other
  misc_feature (85)..(85): Xaa is any aa, unknown or other
  misc_feature (100)..(100): Xaa is any aa, unknown or other
  misc_feature (104)..(104): Xaa is any aa, unknown or other
  misc_feature (293)..(293): Xaa is any aa, unknown or other
DSVARGADAAARDICEREREREGPRAEDECSLAGVMLLRSASSPLLNCGRAPAAAASVEXPRGGFAVVITGSGGARQGPVLCRAXSEGDLAAPLVPKKDXGHGXAPRLSASLSSSASIFVEEDGEGEEEEEDLVAVAVAGAGVDVPLPLRRLLTNTGLDVSAAAALAFVEQGVGGSGGGGKACGSSGGKGGVGDGDGGSNRAATDAHYRQMIEADPGNSLLLVNYARFLKEVAGDAARAQEYCERAILASPGDAEALSLYAGLVWETSRDAGRAEDYYSRAVQAAPDDCYVLXSYAGFLWDAEEDEEENSEPLPPPSLFQGAAQRPSITAAS

SEQ ID NO: 7071 - protein, 297 aa, Zea mays subsp. mays
  peptide (1)..(297): Ceres Seq. ID no. 13494791
  misc_feature (111)..(297): Homolog of NCBI NO: 18412668 NR Description: expressed protein [Arabidopsis thaliana]
  misc_feature (138)..(276): Homolog of NCBI NO: 15241290 NR Description: expressed protein [Arabidopsis thaliana]
  misc_feature (139)..(297): Homolog of NCBI NO: 14532728 NR Description: unknown protein [Arabidopsis thaliana]
  misc_feature (139)..(297): Homolog of NCBI NO: 15236755 NR Description: expressed protein [Arabidopsis thaliana]
  misc_feature (144)..(276): Homolog of NCBI NO: 7487766 NR Description: hypothetical protein T6K21.120 - Arabidopsis >gi|2894603|emb|CAA17137.1| putative protein [Arabidopsis >gi|7268546|emb|CAB78796.1| putative protein [Arabidopsis
  misc_feature (144)..(276): Homolog of NCBI NO: 21592868 NR Description: unknown [Arabidopsis thaliana]
  misc_feature (144)..(276): Homolog of NCBI NO: 18414994 NR Description: expressed protein [Arabidopsis thaliana]
  misc_feature (95)..(281): Homolog of NCBI NO: 37537130 NR Description: unknown protein [Oryza sativa (japonica
  misc_feature (88)..(238): Homolog of NCBI NO: 38345382 NR Description: OSJNBa0067K08.11 [Oryza sativa (japonica
  misc_feature (172)..(276): Homolog of NCBI NO: 18390404 NR Description: expressed protein [Arabidopsis thaliana] unknown protein [Arabidopsis thaliana]
  misc_feature (111)..(297): Homolog of NCBI NO: 18412668 NR Description: expressed protein [Arabidopsis thaliana]
  misc_feature (138)..(276): Homolog of NCBI NO: 15241290 NR Description: expressed protein [Arabidopsis thaliana]
  misc_feature (139)..(297): Homolog of NCBI NO: 14532728 NR Description: unknown protein [Arabidopsis thaliana]
  misc_feature (139)..(297): Homolog of NCBI NO: 15236755 NR Description: expressed protein [Arabidopsis thaliana]
  misc_feature (144)..(276): Homolog of NCBI NO: 7487766 NR Description: hypothetical protein T6K21.120 - Arabidopsis >gi|2894603|emb|CAA17137.1| putative protein [Arabidopsis >gi|7268546|emb|CAB78796.1| putative protein [Arabidopsis
  misc_feature (144)..(276): Homolog of NCBI NO: 21592868 NR Description: unknown [Arabidopsis thaliana]
  misc_feature (144)..(276): Homolog of NCBI NO: 18414994 NR Description: expressed protein [Arabidopsis thaliana]
  misc_feature (95)..(281): Homolog of NCBI NO: 37537130 NR Description: unknown protein [Oryza sativa (japonica
  misc_feature (88)..(238): Homolog of NCBI NO: 38345382 NR Description: OSJNBa0067K08.11 [Oryza sativa (japonica
  misc_feature (172)..(276): Homolog of NCBI NO: 18390404 NR Description: expressed protein [Arabidopsis thaliana] unknown protein [Arabidopsis thaliana]
  misc_feature (25)..(25): Xaa is any aa, unknown or other
  misc_feature (50)..(50): Xaa is any aa, unknown or other
  misc_feature (65)..(65): Xaa is any aa, unknown or other
  misc_feature (69)..(69): Xaa is any aa, unknown or other
  misc_feature (258)..(258): Xaa is any aa, unknown or other
MLLRSASSPLLNCGRAPAAAASVEXPRGGFAVVITGSGGARQGPVLCRAXSEGDLAAPLVPKKDXGHGXAPRLSASLSSSASIFVEEDGEGEEEEEDLVAVAVAGAGVDVPLPLRRLLTNTGLDVSAAAALAFVEQGVGGSGGGGKACGSSGGKGGVGDGDGGSNRAATDAHYRQMIEADPGNSLLLVNYARFLKEVAGDAARAQEYCERAILASPGDAEALSLYAGLVWETSRDAGRAEDYYSRAVQAAPDDCYVLXSYAGFLWDAEEDEEENSEPLPPPSLFQGAAQRPSITAAS

SEQ ID NO: 7072 - DNA, 1291 bp, Zea mays subsp. mays
  misc_feature (1)..(1291): Ceres Seq. ID no. 12346104
  misc_feature: MA Experiment ID: 20000108 Result: Up-regulated in Transcription
  misc_feature: MA Experiment 20000108 PARAMETER Experiment Name: Zm_Root-Tips_P Parameter: Age (day) Value: 12
  misc_feature: MA Experiment 20000108 PARAMETER Experiment Name: Zm_Root-Tips_P Parameter: Organism Value: Zea mays
  misc_feature: MA Experiment 20000108 PARAMETER Experiment Name: Zm_Root-Tips_P Parameter: Tissue Value: Root tips vs. Root mid region    35
  misc_feature: MA Experiment 20000108 PARAMETER Experiment Name: Zm_Root-Tips_P Parameter: Tissue Value: Root tips vs. Root mid region   Sequence Listing-Misc Features (4)
attggcgagcctgcacgcggccttgccctcccaggaagggaggccgaactgagcagttcgaccaggcagccatccacctccaaccccccttcgcctgcgcaaatcgttaccatcccagcgagaaagatggcgcgcgtctccaatgccaagaagcggcagggcgccaagcccgcctccgcgctcagcagcaccgacaccagcaccgccgcaaagaggaaggccgaggacgaccgccccgtgcgcgtctacgccgacggcatcttcgatctcttccacttcggccacgcccgcgccctcgagcaggccaagatgctgttccccaacacctatcttctcgtcggatgctgcaacgacgagctaacctaccgctacaagggcaagaccgtcatgacccaggaagagcgatacgaatccctgcggcactgcaagtgggttgatgaggtcattcctgatgcaccgtgggttctcacacaggagtttattgataagcatcagattgactatgttgctcatgatgcgctgccttatgctgatactagcggaacagcaaatgatgtctatgaatttgttaaaaagattggaaaattcaaggaaacaaaaaggacagacggggtttctacttcagatctcataatgaggatcttgaaggactataaccagtatgtcatgaggaatttagcacggggctactcgaggaaagatcttggtgtgagctatgtcaaggagaaacaattgcaagttaatatgaagatcaataaactgcgggagactgtgaaggcacatcaggaaaagttgcaaacagtggcaaagactgctggtttgaatcatgaagaatggcttgctaatgcggatcgctgggttgctggtttcctagagaagtttgagcaacactgccacaatatggaaactgcgatcaaggatcggatacaggagaggctagggaaacagttgagcaaaggaataatcgctggtcttgtgcaggaaccggtgacagcctaaaacaggtgatgctgtcaatgaaacgcactgatgcttttcagatcatcctcccgatgtggttctggtgcgaggcttgtaagggtgcaacgcggttgctgagacgttttaattttgtggtgcatgtgaactcttcccgtatacaaatgtctataggagaggcgtttggtgttttgggcatcgtcgtgggcgtgtttctttgtatctaacgggttagattaaccttttttttgtatcgagattgatgttctttcgtggttataataataataaataataataatattgtcaaagc

SEQ ID NO: 7073 - protein, 332 aa, Zea mays subsp. mays
  peptide (1)..(332): Ceres Seq. ID no. 12346105
  misc_feature (43)..(332): Homolog of NCBI NO: 37537166 NR Description: putative cholinephosphate cytidylyltransferase
  misc_feature (74)..(319): Homolog of NCBI NO: 21668498 NR Description: CTP:phosphorylcholine cytidylyltransferase thaliana] >gi|21668500|dbj|BAC01277.1| CTP:phosphorylcholine
  misc_feature (43)..(319): Homolog of NCBI NO: 7488484 NR Description: probable choline-phosphate cytidylyltransferase
  misc_feature (74)..(319): Homolog of NCBI NO: 30683147 NR Description: cholinephosphate cytidylyltransferase transferase/CTP:phosphocholine cytidylyltransferase), putative
  misc_feature (43)..(318): Homolog of NCBI NO: 15225218 NR Description: putative phospholipid cytidylyltransferase; id: At2g32260.1 [Arabidopsis thaliana] >gi|25288639|pir||H84730
  misc_feature (75)..(322): Homolog of NCBI NO: 7488791 NR Description: choline-phosphate cytidylyltransferase (EC - garden pea >gi|1657382|emb|CAA70317.1| cholinephosphate
  misc_feature (74)..(319): Homolog of NCBI NO: 25288640 NR Description: probable phosphocholine cytidylyltransferase - Arabidopsis thaliana >gi|5280991|emb|CAB45996.1| putative cytidylyltransferase [Arabidopsis thaliana]
  misc_feature (43)..(319): Homolog of NCBI NO: 7488483 NR Description: probable choline-phosphate cytidylyltransferase
  misc_feature (67)..(322): Homolog of NCBI NO: 7488446 NR Description: choline-phosphate cytidylyltransferase (EC
  misc_feature (67)..(322): Homolog of NCBI NO: 7488485 NR Description: probable choline-phosphate cytidylyltransferase
IGEPARGLALPGREAELSSSTRQPSTSNPPSPAQIVTIPARKMARVSNAKKRQGAKPASALSSTDTSTAAKRKAEDDRPVRVYADGIFDLFHFGHARALEQAKMLFPNTYLLVGCCNDELTYRYKGKTVMTQEERYESLRHCKWVDEVIPDAPWVLTQEFIDKHQIDYVAHDALPYADTSGTANDVYEFVKKIGKFKETKRTDGVSTSDLIMRILKDYNQYVMRNLARGYSRKDLGVSYVKEKQLQVNMKINKLRETVKAHQEKLQTVAKTAGLNHEEWLANADRWVAGFLEKFEQHCHNMETAIKDRIQERLGKQLSKGIIAGLVQEPVTA

SEQ ID NO: 7074 - protein, 290 aa, Zea mays subsp. mays
  peptide (1)..(290): Ceres Seq. ID no. 12346106
  misc_feature (1)..(290): Homolog of NCBI NO: 37537166 NR Description: putative cholinephosphate cytidylyltransferase
  misc_feature (32)..(277): Homolog of NCBI NO: 21668498 NR Description: CTP:phosphorylcholine cytidylyltransferase thaliana] >gi|21668500|dbj|BAC01277.1| CTP:phosphorylcholine
  misc_feature (1)..(277): Homolog of NCBI NO: 7488484 NR Description: probable choline-phosphate cytidylyltransferase
  misc_feature (32)..(277): Homolog of NCBI NO: 30683147 NR Description: cholinephosphate cytidylyltransferase transferase/CTP:phosphocholine cytidylyltransferase), putative
  misc_feature (1)..(276): Homolog of NCBI NO: 15225218 NR Description: putative phospholipid cytidylyltransferase; id: At2g32260.1 [Arabidopsis thaliana] >gi|25288639|pir||H84730
  misc_feature (33)..(280): Homolog of NCBI NO: 7488791 NR Description: choline-phosphate cytidylyltransferase (EC - garden pea >gi|1657382|emb|CAA70317.1| cholinephosphate
  misc_feature (32)..(277): Homolog of NCBI NO: 25288640 NR Description: probable phosphocholine cytidylyltransferase - Arabidopsis thaliana >gi|5280991|emb|CAB45996.1| putative cytidylyltransferase [Arabidopsis thaliana]
  misc_feature (1)..(277): Homolog of NCBI NO: 7488483 NR Description: probable choline-phosphate cytidylyltransferase
  misc_feature (25)..(280): Homolog of NCBI NO: 7488446 NR Description: choline-phosphate cytidylyltransferase (EC
  misc_feature (25)..(280): Homolog of NCBI NO: 7488485 NR Description: probable choline-phosphate cytidylyltransferase
MARVSNAKKRQGAKPASALSSTDTSTAAKRKAEDDRPVRVYADGIFDLFHFGHARALEQAKMLFPNTYLLVGCCNDELTYRYKGKTVMTQEERYESLRHCKWVDEVIPDAPWVLTQEFIDKHQIDYVAHDALPYADTSGTANDVYEFVKKIGKFKETKRTDGVSTSDLIMRILKDYNQYVMRNLARGYSRKDLGVSYVKEKQLQVNMKINKLRETVKAHQEKLQTVAKTAGLNHEEWLANADRWVAGFLEKFEQHCHNMETAIKDRIQERLGKQLSKGIIAGLVQEPVTA

SEQ ID NO: 7075 - protein, 229 aa, Zea mays subsp. mays
  peptide (1)..(229): Ceres Seq. ID no. 12346107
  misc_feature (1)..(229): Homolog of NCBI NO: 37537166 NR Description: putative cholinephosphate cytidylyltransferase
  misc_feature (1)..(216): Homolog of NCBI NO: 21668498 NR Description: CTP:phosphorylcholine cytidylyltransferase thaliana] >gi|21668500|dbj|BAC01277.1| CTP:phosphorylcholine
  misc_feature (1)..(216): Homolog of NCBI NO: 7488484 NR Description: probable choline-phosphate cytidylyltransferase
  misc_feature (1)..(216): Homolog of NCBI NO: 30683147 NR Description: cholinephosphate cytidylyltransferase transferase/CTP:phosphocholine cytidylyltransferase), putative
  misc_feature (1)..(215): Homolog of NCBI NO: 15225218 NR Description: putative phospholipid cytidylyltransferase; id: At2g32260.1 [Arabidopsis thaliana] >gi|25288639|pir||H84730
  misc_feature (1)..(219): Homolog of NCBI NO: 7488791 NR Description: choline-phosphate cytidylyltransferase (EC - garden pea >gi|1657382|emb|CAA70317.1| cholinephosphate
  misc_feature (1)..(216): Homolog of NCBI NO: 25288640 NR Description: probable phosphocholine cytidylyltransferase - Arabidopsis thaliana >gi|5280991|emb|CAB45996.1| putative cytidylyltransferase [Arabidopsis thaliana]
  misc_feature (1)..(216): Homolog of NCBI NO: 7488483 NR Description: probable choline-phosphate cytidylyltransferase
  misc_feature (1)..(219): Homolog of NCBI NO: 7488446 NR Description: choline-phosphate cytidylyltransferase (EC
  misc_feature (1)..(219): Homolog of NCBI NO: 7488485 NR Description: probable choline-phosphate cytidylyltransferase
MLFPNTYLLVGCCNDELTYRYKGKTVMTQEERYESLRHCKWVDEVIPDAPWVLTQEFIDKHQIDYVAHDALPYADTSGTANDVYEFVKKIGKFKETKRTDGVSTSDLIMRILKDYNQYVMRNLARGYSRKDLGVSYVKEKQLQVNMKINKLRETVKAHQEKLQTVAKTAGLNHEEWLANADRWVAGFLEKFEQHCHNMETAIKDRIQERLGKQLSKGIIAGLVQEPVTA

SEQ ID NO: 7076 - DNA, 1600 bp, Zea mays subsp. mays
  misc_feature (1)..(1600): Ceres Seq. ID no. 12566193
  misc_feature: MA Experiment ID: 108528 Result: Up-regulated in Transcription
  misc_feature: MA Experiment 108528 PARAMETER Experiment Name: Zm_Imbibed_Seeds_P Parameter: Age (day) Value: 5 vs. 2
  misc_feature: MA Experiment 108528 PARAMETER Experiment Name: Zm_Imbibed_Seeds_P Parameter: Organism Value: Zea mays
  misc_feature: MA Experiment 108528 PARAMETER Experiment Name: Zm_Imbibed_Seeds_P Parameter: Plant Line Value: 35A19
  misc_feature: MA Experiment 108528 PARAMETER Experiment Name: Zm_Imbibed_Seeds_P Parameter: Tissue Value: Aerial vs. Embryo
  misc_feature: MA Experiment ID: 108530 Result: Up-regulated in Transcription
  misc_feature: MA Experiment 108530 PARAMETER Experiment Name: Zm_Imbibed_Seeds_P Parameter: Age (day) Value: 6 vs. 2
  misc_feature: MA Experiment 108530 PARAMETER Experiment Name: Zm_Imbibed_Seeds_P Parameter: Organism Value: Zea mays
  misc_feature: MA Experiment 108530 PARAMETER Experiment Name: Zm_Imbibed_Seeds_P Parameter: Plant Line Value: 35A19
  misc_feature: MA Experiment 108530 PARAMETER Experiment Name: Zm_Imbibed_Seeds_P Parameter: Tissue Value: Aerial vs. Embryo
acctgttctccacctcgcccccaccttcgtccttctccatctagggttctctctgtttcctcctcatcggaattggagcttcgcatagagtgtccctcgtcatcgccgccggcaccgacgccggcagccatgtccatgctccttatacagaaacaacccctccctctctccgttcgtccccgcacgactctccgccagtgccgtctccccacgactcgattctccgccgccgccgccgactcggctagccgcgctgcccccttcgccgtcgaggactacctcgtcgccgcatgccacctaaccccggcgcaggcgctcaaggcctccaaggtgctctcgcacctcaagtcaccctcccgacccgacgccgtgctagccttcctctcgggcctcggtctctccgacgccgacatcgccgccgccgtcgcctacgaccccaagcttctctgctccgaggtcgagcgcacgctggccccgcgtctcgcggagctccgggatctcggcctctctccgtctcagatcgcccgcctcgcactcgtcgaccccgcgcgcttccgccgccccaccgtcgtctccaagctgcagtattacgtccctctcttcggttccttcgagaacctgctccaggctctcaggaacaacgcctaccttctcagctccgacctcgagcgcgttgtgaagcccaacgtcgcgttcctggtggagtgcgggctagatgcttgtgatattgccaagctgtccatacccgtccctaggctgatcaccaccaacccagaacgcgtccgggcaatggtggagcgagctgaagctgtcggtgtgcctcgtggcactgggatgtttaggcacgcactgctggctgttgcattcctcagcgaggagaagatcaaagctaaggcagagtttttgaagacaacatttcggtggtcggatgctgaggtgggcgttgcggtttccaagctgccattggtgctcaagcactccaaggacaggctgcgccgcatgtcagagttcctgatcaccaaggttgggttggagccagagtacattgctcacaggcctgctctgcttacatatagcttggaacgccgcctcatgccccgacactatgttgtgaattacctgaaggaaaatggattgttggagcaggaccggagctactatactgctgtccagatgagtgagagtgccttcatggataagttcatatgcccctacaaggaagctgcaccaagcctcgccctagattatgctgctgcttgcagaggagaggtgcccactaccttcttggcaaatgtttaacccttcagtgtaaagcaatgttttgacacttagcagtgagctggtaattttgtttctttccttgcctaactgctacatcccgcagctgtgtctttagcaattggctctggtacataagatgtgagccatggttattaccagggctagatttatctttgctctctgttattcaagctgatcaagtattccaatttcacatgtcactgtatggtatggatttagtgggtgagtaccctgtatattgctctgcaactgttatcgatgcaatgtttctgaataaatatgcaggatgcacggttcc

SEQ ID NO: 7077 - protein, 432 aa, Zea mays subsp. mays
  peptide (1)..(432): Ceres Seq. ID no. 12566194
  misc_feature (125)..(399): Pfam Name: mTERF Pfam Description: mTERF
  misc_feature (83)..(402): Homolog of NCBI NO: 39545750 NR Description: OSJNBb0034I13.16 [Oryza sativa (japonica
  misc_feature (76)..(425): Homolog of NCBI NO: 34394750 NR Description: unknown protein [Oryza sativa (japonica
  misc_feature (80)..(412): Homolog of NCBI NO: 18415647 NR Description: expressed protein; protein id: At5g07900.1, by cDNA: 22350., supported by cDNA: gi_13878064, supported by gi_17104654 [Arabidopsis thaliana] >gi|11281400|pir||T45615
  misc_feature (114)..(420): Homolog of NCBI NO: 15238313 NR Description: putative protein; protein id: At5g64950.1, by cDNA: 142672. [Arabidopsis thaliana] emb|CAB62602.1~gene_id:MXK3.18~similar to unknown protein
  misc_feature (114)..(420): Homolog of NCBI NO: 21553423 NR Description: unknown [Arabidopsis thaliana]
  misc_feature (88)..(418): Homolog of NCBI NO: 15218140 NR Description: hypothetical protein; protein id: At1g21150.1
  misc_feature (88)..(418): Homolog of NCBI NO: 25511650 NR Description: T22I11.2 protein - Arabidopsis thaliana
  misc_feature (125)..(412): Homolog of NCBI NO: 18412304 NR Description: expressed protein; protein id: At1g79220.1, by cDNA: 6667. [Arabidopsis thaliana] >gi|7487897|pir||T01035
  misc_feature (57)..(365): Homolog of NCBI NO: 15232683 NR Description: putative protein; protein id: At3g46950.1, by cDNA: gi_15028090 [Arabidopsis thaliana]
TCSPPRPHLRPSPSRVLSVSSSSELELRIECPSSSPPAPTPAAMSMLLIQKQPLPLSVRPRTTLRQCRLPTTRFSAAAADSASRAAPFAVEDYLVAACHLTPAQALKASKVLSHLKSPSRPDAVLAFLSGLGLSDADIAAAVAYDPKLLCSEVERTLAPRLAELRDLGLSPSQIARLALVDPARFRRPTVVSKLQYYVPLFGSFENLLQALRNNAYLLSSDLERVVKPNVAFLVECGLDACDIAKLSIPVPRLITTNPERVRAMVERAEAVGVPRGTGMFRHALLAVAFLSEEKIKAKAEFLKTTFRWSDAEVGVAVSKLPLVLKHSKDRLRRMSEFLITKVGLEPEYIAHRPALLTYSLERRLMPRHYVVNYLKENGLLEQDRSYYTAVQMSESAFMDKFICPYKEAAPSLALDYAAACRGEVPTTFLANV

SEQ ID NO: 7078 - protein, 389 aa, Zea mays subsp. mays
  peptide (1)..(389): Ceres Seq. ID no. 12566195
  misc_feature (82)..(356): Pfam Name: mTERF Pfam Description: mTERF
  misc_feature (40)..(359): Homolog of NCBI NO: 39545750 NR Description: OSJNBb0034I13.16 [Oryza sativa (japonica
  misc_feature (33)..(382): Homolog of NCBI NO: 34394750 NR Description: unknown protein [Oryza sativa (japonica
  misc_feature (37)..(369): Homolog of NCBI NO: 18415647 NR Description: expressed protein; protein id: At5g07900.1, by cDNA: 22350., supported by cDNA: gi_13878064, supported by gi_17104654 [Arabidopsis thaliana] >gi|11281400|pir||T45615
  misc_feature (71)..(377): Homolog of NCBI NO: 15238313 NR Description: putative protein; protein id: At5g64950.1, by cDNA: 142672. [Arabidopsis thaliana] emb|CAB62602.1~gene_id:MXK3.18~similar to unknown protein
  misc_feature (71)..(377): Homolog of NCBI NO: 21553423 NR Description: unknown [Arabidopsis thaliana]
  misc_feature (45)..(375): Homolog of NCBI NO: 15218140 NR Description: hypothetical protein; protein id: At1g21150.1
  misc_feature (45)..(375): Homolog of NCBI NO: 25511650 NR Description: T22I11.2 protein - Arabidopsis thaliana
  misc_feature (82)..(369): Homolog of NCBI NO: 18412304 NR Description: expressed protein; protein id: At1g79220.1, by cDNA: 6667. [Arabidopsis thaliana] >gi|7487897|pir||T01035
  misc_feature (14)..(322): Homolog of NCBI NO: 15232683 NR Description: putative protein; protein id: At3g46950.1, by cDNA: gi_15028090 [Arabidopsis thaliana]
MSMLLIQKQPLPLSVRPRTTLRQCRLPTTRFSAAAADSASRAAPFAVEDYLVAACHLTPAQALKASKVLSHLKSPSRPDAVLAFLSGLGLSDADIAAAVAYDPKLLCSEVERTLAPRLAELRDLGLSPSQIARLALVDPARFRRPTVVSKLQYYVPLFGSFENLLQALRNNAYLLSSDLERVVKPNVAFLVECGLDACDIAKLSIPVPRLITTNPERVRAMVERAEAVGVPRGTGMFRHALLAVAFLSEEKIKAKAEFLKTTFRWSDAEVGVAVSKLPLVLKHSKDRLRRMSEFLITKVGLEPEYIAHRPALLTYSLERRLMPRHYVVNYLKENGLLEQDRSYYTAVQMSESAFMDKFICPYKEAAPSLALDYAAACRGEVPTTFLANV

SEQ ID NO: 7079 - protein, 387 aa, Zea mays subsp. mays
  peptide (1)..(387): Ceres Seq. ID no. 12566196
  misc_feature (80)..(354): Pfam Name: mTERF Pfam Description: mTERF
  misc_feature (43)..(373): Homolog of NCBI NO: 25511650 NR Description: T22I11.2 protein - Arabidopsis thaliana
  misc_feature (80)..(367): Homolog of NCBI NO: 18412304 NR Description: expressed protein; protein id: At1g79220.1, by cDNA: 6667. [Arabidopsis thaliana] >gi|7487897|pir||T01035
  misc_feature (31)..(380): Homolog of NCBI NO: 34394750 NR Description: unknown protein [Oryza sativa (japonica
  misc_feature (69)..(375): Homolog of NCBI NO: 15238313 NR Description: putative protein; protein id: At5g64950.1, by cDNA: 142672. [Arabidopsis thaliana] emb|CAB62602.1~gene_id:MXK3.18~similar to unknown protein
  misc_feature (43)..(373): Homolog of NCBI NO: 15218140 NR Description: hypothetical protein; protein id: At1g21150.1
  misc_feature (69)..(375): Homolog of NCBI NO: 21553423 NR Description: unknown [Arabidopsis thaliana]
  misc_feature (35)..(367): Homolog of NCBI NO: 18415647 NR Description: expressed protein; protein id: At5g07900.1, by cDNA: 22350., supported by cDNA: gi_13878064, supported by gi_17104654 [Arabidopsis thaliana] >gi|11281400|pir||T45615
  misc_feature (38)..(357): Homolog of NCBI NO: 39545750 NR Description: OSJNBb0034I13.16 [Oryza sativa (japonica
  misc_feature (12)..(320): Homolog of NCBI NO: 15232683 NR Description: putative protein; protein id: At3g46950.1, by cDNA: gi_15028090 [Arabidopsis thaliana]
MLLIQKQPLPLSVRPRTTLRQCRLPTTRFSAAAADSASRAAPFAVEDYLVAACHLTPAQALKASKVLSHLKSPSRPDAVLAFLSGLGLSDADIAAAVAYDPKLLCSEVERTLAPRLAELRDLGLSPSQIARLALVDPARFRRPTVVSKLQYYVPLFGSFENLLQALRNNAYLLSSDLERVVKPNVAFLVECGLDACDIAKLSIPVPRLITTNPERVRAMVERAEAVGVPRGTGMFRHALLAVAFLSEEKIKAKAEFLKTTFRWSDAEVGVAVSKLPLVLKHSKDRLRRMSEFLITKVGLEPEYIAHRPALLTYSLERRLMPRHYVVNYLKENGLLEQDRSYYTAVQMSESAFMDKFICPYKEAAPSLALDYAAACRGEVPTTFLANV

SEQ ID NO: 7080 - DNA, 1639 bp, Zea mays subsp. mays
  misc_feature (1)..(1639): Ceres Seq. ID no. 12566830
  misc_feature: MA Experiment ID: 108535 Result: Up-regulated in Transcription
  misc_feature: MA Experiment 108535 PARAMETER Experiment Name: Zm_Meristem_P Parameter: Age (day) Value: 8
  misc_feature: MA Experiment 108535 PARAMETER Experiment Name: Zm_Meristem_P Parameter: Organism Value: Zea mays
  misc_feature: MA Experiment 108535 PARAMETER Experiment Name: Zm_Meristem_P Parameter: Plant Line Value: 35A19
  misc_feature: MA Experiment 108535 PARAMETER Experiment Name: Zm_Meristem_P Parameter: Tissue Value: Root Meristem vs. Above Root Meristem
  misc_feature: MA Experiment ID: 108543 Result: Up-regulated in Transcription
  misc_feature: MA Experiment ID: 108556 Result: Down-regulated in Transcription
  misc_feature: MA Experiment 108556 PARAMETER Experiment Name: Zm_Drought_P Parameter: Age (day) Value: 9
  misc_feature: MA Experiment 108556 PARAMETER Experiment Name: Zm_Drought_P Parameter: Organism Value: Zea mays
  misc_feature: MA Experiment 108556 PARAMETER Experiment Name: Zm_Drought_P Parameter: Plant Line Value: 35A19
  misc_feature: MA Experiment 108556 PARAMETER Experiment Name: Zm_Drought_P Parameter: Timepoint (hr) Value: 24
  misc_feature: MA Experiment 108556 PARAMETER Experiment Name: Zm_Drought_P Parameter: Tissue Value: Aerial
  misc_feature: MA Experiment 108556 PARAMETER Experiment Name: Zm_Drought_P Parameter: Treatment Value: Drought vs. No Drought
  misc_feature: MA Experiment ID: 108689 Result: Down-regulated in Transcription
  misc_feature: MA Experiment 108689 PARAMETER Experiment Name: Zm_Drought_Roots_P Parameter: Age (day) Value: 9
  misc_feature: MA Experiment 108689 PARAMETER Experiment Name: Zm_Drought_Roots_P Parameter: Organism Value: Zea mays
  misc_feature: MA Experiment 108689 PARAMETER Experiment Name: Zm_Drought_Roots_P Parameter: Plant Line Value: 35A19
  misc_feature: MA Experiment 108689 PARAMETER Experiment Name: Zm_Drought_Roots_P Parameter: Timepoint (hr) Value: 24
  misc_feature: MA Experiment 108689 PARAMETER Experiment Name: Zm_Drought_Roots_P Parameter: Tissue Value: Roots
  misc_feature: MA Experiment 108689 PARAMETER Experiment Name: Zm_Drought_Roots_P Parameter: Treatment Value: Drought vs. No Drought
  misc_feature: MA Experiment ID: 20000108 Result: Up-regulated in Transcription
  misc_feature: MA Experiment 20000108 PARAMETER Experiment Name: Zm_Root-Tips_P Parameter: Age (day) Value: 12
  misc_feature: MA Experiment 20000108 PARAMETER Experiment Name: Zm_Root-Tips_P Parameter: Organism Value: Zea mays
  misc_feature: MA Experiment 20000108 PARAMETER Experiment Name: Zm_Root-Tips_P Parameter: Tissue Value: Root tips vs. Root mid region    35
  misc_feature: MA Experiment 20000108 PARAMETER Experiment Name: Zm_Root-Tips_P Parameter: Tissue Value: Root tips vs. Root mid region   Sequence Listing-Misc Features (4)
  misc_feature: MA Experiment ID: 20000478 Result: Down-regulated in Transcription
  misc_feature: MA Experiment 20000478 PARAMETER Experiment Name: Zm_5mM_SA_P Parameter: Age (day) Value: 11
  misc_feature: MA Experiment 20000478 PARAMETER Experiment Name: Zm_5mM_SA_P Parameter: Organism Value: Zea mays
  misc_feature: MA Experiment 20000478 PARAMETER Experiment Name: Zm_5mM_SA_P Parameter: Plant Line Value: 35A19
  misc_feature: MA Experiment 20000478 PARAMETER Experiment Name: Zm_5mM_SA_P Parameter: Timepoint (hr) Value: 72
  misc_feature: MA Experiment 20000478 PARAMETER Experiment Name: Zm_5mM_SA_P Parameter: Tissue Value: Aerial
  misc_feature: MA Experiment 20000478 PARAMETER Experiment Name: Zm_5mM_SA_P Parameter: Treatment Value: 5mM SA vs. No Treatment
  misc_feature: MA Experiment ID: 20000479 Result: Down-regulated in Transcription
  misc_feature: MA Experiment 20000479 PARAMETER Experiment Name: Zm_Drought_P Parameter: Age (day) Value: 10
  misc_feature: MA Experiment 20000479 PARAMETER Experiment Name: Zm_Drought_P Parameter: Organism Value: Zea mays
  misc_feature: MA Experiment 20000479 PARAMETER Experiment Name: Zm_Drought_P Parameter: Plant Line Value: 35A19
  misc_feature: MA Experiment 20000479 PARAMETER Experiment Name: Zm_Drought_P Parameter: Timepoint (hr) Value: 48
  misc_feature: MA Experiment 20000479 PARAMETER Experiment Name: Zm_Drought_P Parameter: Tissue Value: Aerial
  misc_feature: MA Experiment 20000479 PARAMETER Experiment Name: Zm_Drought_P Parameter: Treatment Value: Drought vs. No Drought
  misc_feature: MA Experiment ID: 20000480 Result: Down-regulated in Transcription
  misc_feature: MA Experiment 20000480 PARAMETER Experiment Name: Zm_Drought_P Parameter: Age (day) Value: 11
  misc_feature: MA Experiment 20000480 PARAMETER Experiment Name: Zm_Drought_P Parameter: Organism Value: Zea mays
  misc_feature: MA Experiment 20000480 PARAMETER Experiment Name: Zm_Drought_P Parameter: Plant Line Value: 35A19
  misc_feature: MA Experiment 20000480 PARAMETER Experiment Name: Zm_Drought_P Parameter: Timepoint (hr) Value: 72
  misc_feature: MA Experiment 20000480 PARAMETER Experiment Name: Zm_Drought_P Parameter: Tissue Value: Aerial
  misc_feature: MA Experiment 20000480 PARAMETER Experiment Name: Zm_Drought_P Parameter: Treatment Value: Drought vs. No Drought
  misc_feature: MA Experiment ID: 20000488 Result: Up-regulated in Transcription
  misc_feature: MA Experiment 20000488 PARAMETER Experiment Name: Zm_50mM_NH4NO3_L_to_H_P Parameter: Organism Value: Zea mays
  misc_feature: MA Experiment 20000488 PARAMETER Experiment Name: Zm_50mM_NH4NO3_L_to_H_P Parameter: Timepoint (hr) Value: 8
  misc_feature: MA Experiment 20000488 PARAMETER Experiment Name: Zm_50mM_NH4NO3_L_to_H_P Parameter: Tissue Value: Leaves
  misc_feature: MA Experiment 20000488 PARAMETER Experiment Name: Zm_50mM_NH4NO3_L_to_H_P Parameter: Treatment Value: 50mM NH4NO3 vs. 100mM Mannitol
gcacgagaccattacctagaacatcctaatcgaaaattcctcctgttcatttcctcctgctcccccctcctccctcccccccccctcctcgccgctcgccgttgaagaggtaggcccacgggccggcgagaatggaggcggcgacgatggcgtggacggcggcggtggtcggggcggggctggtgtactggttcgtctgggtgatgggcgcggcggaggtgaagggcaagcgggcggtggatctcaagatgggatccatcacgcgggacaaggtgcaggacaagtacacgcagtactggtccttcttccgccgccccaaggagacggccaccacggcggcgtcggcggagaaggtgccggccttcgtcgacaccttctacaacctcgtgaccgacatctacgagtgggggtggggccagtccttccacttctccccgtccctccccggccgctcccaccgcgacgccacgcgcgtccacgaggagcgcgtcgccgacctcctcggcgccaggccgggccaccgcctcctggacgtcggctgcggcgtcggcgggcccatgcgcgccatcgccgngcactcgggatccaacgtcgtcggcatcaccatcaacgagtaccaggtgaaccgcgcccgcgcgcacaaccgcaaggccggcctcgactccccgcgctgcgaggtcgtctgcggcaacttcctctccatgccgttcccggacgcctccttcgacggcgcctactccatcgaggccacctgccacgcgcccaggctgcaggacgtgtacggcgaggtctaccgcgtgctcaagccggggggactctacgtctcctacgagtgggtcaccaccccgctgtaccgcgccgaggacccggaccacgtcgagtgcatccacggcatcgagcgcggcgacgcgctaccggggctccgccgccaggacgagatcgcgtccatcgctaaggaggtcgggttcgaggtgctcaaggagcaggacctggcgctgccccccgcgctgccctggtggacgcgcctnaagatgggccgcatcgcctactggcgcaactccctcgtcgtccgcgtgctcaccatgcttccgggtcgcgcccaagggcgtctccgaggtgcacgagatgctgtacgagaccgcgcagcacctcacccgcggcggcgagaccggcatcttcacgcccatgcacatggtgctcctccgcaagcccgccgccgccgcctccaccgaggaggccaactagtgtaagactacacaccgccaccaatcagttactactcgcccaccgcaagggggagaaaatggggagggaggaaaaagatgcaagcagcagcagcaccagaggtaagaagagcaggctaatcggcgacttgaagaagttacaaattgatctattagagaagaagatactactaggaacgattcttctctccgtttactcttttccctgttcgtagctttgagttttaatttttgttttttggtggacggattgttccggggaggtcgaggttgggatctaaatttattttcaatcggtggagatccatctatctatcagcagcagcagcaggagcaaccatgttttctctccaacaatacattggaattgaattcctaacgggcagattggatcc

SEQ ID NO: 7081 - protein, 372 aa, Zea mays subsp. mays
  peptide (1)..(372): Ceres Seq. ID no. 12566831
  misc_feature (87)..(287): Pfam Name: ubiE/COQ5 methyltransferase family Pfam Description: ubiE/COQ5 methyltransferase family
  misc_feature (1)..(319): Homolog of NCBI NO: 3560533 NR Description: 24-methylene lophenol C24(1)methyltransferase
  misc_feature (1)..(319): Homolog of NCBI NO: 7443718 NR Description: probable sterol 24-C-methyltransferase (EC
  misc_feature (1)..(317): Homolog of NCBI NO: 15217917 NR Description: sterol-C-methyltransferase; protein id: supported by cDNA: 2688., supported by cDNA: gi_12083241, by cDNA: gi_15028254, supported by cDNA: gi_21281106 [Arabidopsis
  misc_feature (1)..(317): Homolog of NCBI NO: 22136020 NR Description: 24-sterol C-methyltransferase [Arabidopsis
  misc_feature (1)..(317): Homolog of NCBI NO: 23397216 NR Description: putative sterol-C-methyltransferase [Arabidopsis
  misc_feature (1)..(317): Homolog of NCBI NO: 1061040 NR Description: sterol-C-methyltransferase [Arabidopsis thaliana]
  misc_feature (9)..(319): Homolog of NCBI NO: 7443717 NR Description: probable sterol 24-C-methyltransferase (EC
  misc_feature (1)..(317): Homolog of NCBI NO: 21555010 NR Description: sterol-C-methyltransferase [Arabidopsis thaliana]
  misc_feature (1)..(319): Homolog of NCBI NO: 15222955 NR Description: S-adenosyl-methionine-sterol-C-methyltransferase, protein id: At1g76090.1, supported by cDNA: gi_14030612, by cDNA: gi_2246455 [Arabidopsis thaliana]
  misc_feature (1)..(319): Homolog of NCBI NO: 2246456 NR Description: S-adenosyl-methionine-sterol-C-methyltransferase
  misc_feature (148)..(148): Xaa is any aa, unknown or other
  misc_feature (299)..(299): Xaa is any aa, unknown or other
MEAATMAWTAAVVGAGLVYWFVWVMGAAEVKGKRAVDLKMGSITRDKVQDKYTQYWSFFRRPKETATTAASAEKVPAFVDTFYNLVTDIYEWGWGQSFHFSPSLPGRSHRDATRVHEERVADLLGARPGHRLLDVGCGVGGPMRAIAXHSGSNVVGITINEYQVNRARAHNRKAGLDSPRCEVVCGNFLSMPFPDASFDGAYSIEATCHAPRLQDVYGEVYRVLKPGGLYVSYEWVTTPLYRAEDPDHVECIHGIERGDALPGLRRQDEIASIAKEVGFEVLKEQDLALPPALPWWTRXKMGRIAYWRNSLVVRVLTMLPGRAQGRLRGARDAVRDRAAPHPRRRDRHLHAHAHGAPPQARRRRLHRGGQLV

SEQ ID NO: 7082 - protein, 367 aa, Zea mays subsp. mays
  peptide (1)..(367): Ceres Seq. ID no. 12566832
  misc_feature (82)..(282): Pfam Name: ubiE/COQ5 methyltransferase family Pfam Description: ubiE/COQ5 methyltransferase family
  misc_feature (1)..(314): Homolog of NCBI NO: 3560533 NR Description: 24-methylene lophenol C24(1)methyltransferase
  misc_feature (1)..(314): Homolog of NCBI NO: 7443718 NR Description: probable sterol 24-C-methyltransferase (EC
  misc_feature (1)..(312): Homolog of NCBI NO: 15217917 NR Description: sterol-C-methyltransferase; protein id: supported by cDNA: 2688., supported by cDNA: gi_12083241, by cDNA: gi_15028254, supported by cDNA: gi_21281106 [Arabidopsis
  misc_feature (1)..(312): Homolog of NCBI NO: 22136020 NR Description: 24-sterol C-methyltransferase [Arabidopsis
  misc_feature (1)..(312): Homolog of NCBI NO: 23397216 NR Description: putative sterol-C-methyltransferase [Arabidopsis
  misc_feature (1)..(312): Homolog of NCBI NO: 1061040 NR Description: sterol-C-methyltransferase [Arabidopsis thaliana]
  misc_feature (4)..(314): Homolog of NCBI NO: 7443717 NR Description: probable sterol 24-C-methyltransferase (EC
  misc_feature (1)..(312): Homolog of NCBI NO: 21555010 NR Description: sterol-C-methyltransferase [Arabidopsis thaliana]
  misc_feature (1)..(314): Homolog of NCBI NO: 15222955 NR Description: S-adenosyl-methionine-sterol-C-methyltransferase, protein id: At1g76090.1, supported by cDNA: gi_14030612, by cDNA: gi_2246455 [Arabidopsis thaliana]
  misc_feature (1)..(314): Homolog of NCBI NO: 2246456 NR Description: S-adenosyl-methionine-sterol-C-methyltransferase
  misc_feature (143)..(143): Xaa is any aa, unknown or other
  misc_feature (294)..(294): Xaa is any aa, unknown or other
MAWTAAVVGAGLVYWFVWVMGAAEVKGKRAVDLKMGSITRDKVQDKYTQYWSFFRRPKETATTAASAEKVPAFVDTFYNLVTDIYEWGWGQSFHFSPSLPGRSHRDATRVHEERVADLLGARPGHRLLDVGCGVGGPMRAIAXHSGSNVVGITINEYQVNRARAHNRKAGLDSPRCEVVCGNFLSMPFPDASFDGAYSIEATCHAPRLQDVYGEVYRVLKPGGLYVSYEWVTTPLYRAEDPDHVECIHGIERGDALPGLRRQDEIASIAKEVGFEVLKEQDLALPPALPWWTRXKMGRIAYWRNSLVVRVLTMLPGRAQGRLRGARDAVRDRAAPHPRRRDRHLHAHAHGAPPQARRRRLHRGGQLV

SEQ ID NO: 7083 - protein, 348 aa, Zea mays subsp. mays
  peptide (1)..(348): Ceres Seq. ID no. 12566833
  misc_feature (63)..(263): Pfam Name: ubiE/COQ5 methyltransferase family Pfam Description: ubiE/COQ5 methyltransferase family
  misc_feature (1)..(295): Homolog of NCBI NO: 3560533 NR Description: 24-methylene lophenol C24(1)methyltransferase
  misc_feature (1)..(295): Homolog of NCBI NO: 7443718 NR Description: probable sterol 24-C-methyltransferase (EC
  misc_feature (1)..(293): Homolog of NCBI NO: 15217917 NR Description: sterol-C-methyltransferase; protein id: supported by cDNA: 2688., supported by cDNA: gi_12083241, by cDNA: gi_15028254, supported by cDNA: gi_21281106 [Arabidopsis
  misc_feature (1)..(293): Homolog of NCBI NO: 22136020 NR Description: 24-sterol C-methyltransferase [Arabidopsis
  misc_feature (1)..(293): Homolog of NCBI NO: 23397216 NR Description: putative sterol-C-methyltransferase [Arabidopsis
  misc_feature (1)..(293): Homolog of NCBI NO: 1061040 NR Description: sterol-C-methyltransferase [Arabidopsis thaliana]
  misc_feature (1)..(295): Homolog of NCBI NO: 7443717 NR Description: probable sterol 24-C-methyltransferase (EC
  misc_feature (1)..(293): Homolog of NCBI NO: 21555010 NR Description: sterol-C-methyltransferase [Arabidopsis thaliana]
  misc_feature (1)..(295): Homolog of NCBI NO: 15222955 NR Description: S-adenosyl-methionine-sterol-C-methyltransferase, protein id: At1g76090.1, supported by cDNA: gi_14030612, by cDNA: gi_2246455 [Arabidopsis thaliana]
  misc_feature (1)..(295): Homolog of NCBI NO: 2246456 NR Description: S-adenosyl-methionine-sterol-C-methyltransferase
  misc_feature (124)..(124): Xaa is any aa, unknown or other
  misc_feature (275)..(275): Xaa is any aa, unknown or other
MGAAEVKGKRAVDLKMGSITRDKVQDKYTQYWSFFRRPKETATTAASAEKVPAFVDTFYNLVTDIYEWGWGQSFHFSPSLPGRSHRDATRVHEERVADLLGARPGHRLLDVGCGVGGPMRAIAXHSGSNVVGITINEYQVNRARAHNRKAGLDSPRCEVVCGNFLSMPFPDASFDGAYSIEATCHAPRLQDVYGEVYRVLKPGGLYVSYEWVTTPLYRAEDPDHVECIHGIERGDALPGLRRQDEIASIAKEVGFEVLKEQDLALPPALPWWTRXKMGRIAYWRNSLVVRVLTMLPGRAQGRLRGARDAVRDRAAPHPRRRDRHLHAHAHGAPPQARRRRLHRGGQLV

SEQ ID NO: 7084 - DNA, 1899 bp, Zea mays subsp. mays
  misc_feature (1)..(1899): Ceres Seq. ID no. 12358625
  misc_feature: MA Experiment ID: 108522 Result: Up-regulated in Transcription
  misc_feature: MA Experiment 108522 PARAMETER Experiment Name: Zm_42deg_Heat_P Parameter: Age (day) Value: 8
  misc_feature: MA Experiment 108522 PARAMETER Experiment Name: Zm_42deg_Heat_P Parameter: Organism Value: Zea mays
  misc_feature: MA Experiment 108522 PARAMETER Experiment Name: Zm_42deg_Heat_P Parameter: Plant Line Value: 35A19
  misc_feature: MA Experiment 108522 PARAMETER Experiment Name: Zm_42deg_Heat_P Parameter: Temperature (deg C) Value: 42 vs. 22
  misc_feature: MA Experiment 108522 PARAMETER Experiment Name: Zm_42deg_Heat_P Parameter: Timepoint (hr) Value: 1
  misc_feature: MA Experiment 108522 PARAMETER Experiment Name: Zm_42deg_Heat_P Parameter: Tissue Value: Aerial
  misc_feature: MA Experiment ID: 108523 Result: Up-regulated in Transcription
  misc_feature: MA Experiment 108523 PARAMETER Experiment Name: Zm_42deg_Heat_P Parameter: Age (day) Value: 8
  misc_feature: MA Experiment 108523 PARAMETER Experiment Name: Zm_42deg_Heat_P Parameter: Organism Value: Zea mays
  misc_feature: MA Experiment 108523 PARAMETER Experiment Name: Zm_42deg_Heat_P Parameter: Plant Line Value: 35A19
  misc_feature: MA Experiment 108523 PARAMETER Experiment Name: Zm_42deg_Heat_P Parameter: Temperature (deg C) Value: 42 vs. 22
  misc_feature: MA Experiment 108523 PARAMETER Experiment Name: Zm_42deg_Heat_P Parameter: Timepoint (hr) Value: 6
  misc_feature: MA Experiment 108523 PARAMETER Experiment Name: Zm_42deg_Heat_P Parameter: Tissue Value: Aerial
  misc_feature: MA Experiment ID: 108535 Result: Up-regulated in Transcription
  misc_feature: MA Experiment 108535 PARAMETER Experiment Name: Zm_Meristem_P Parameter: Age (day) Value: 8
  misc_feature: MA Experiment 108535 PARAMETER Experiment Name: Zm_Meristem_P Parameter: Organism Value: Zea mays
  misc_feature: MA Experiment 108535 PARAMETER Experiment Name: Zm_Meristem_P Parameter: Plant Line Value: 35A19
  misc_feature: MA Experiment 108535 PARAMETER Experiment Name: Zm_Meristem_P Parameter: Tissue Value: Root Meristem vs. Above Root Meristem
  misc_feature: MA Experiment ID: 108544 Result: Down-regulated in Transcription
ctccaccgcgcccacttcttatactgccagcgtctgctccctctcgcggaggcctcgctctggttggaaggtttggagaaactccccggctcgaggagatcgtgacattgagaggacgatgggagggcgcgcgctcctcctcctcctcctggtctcggcgttggtctttcagatccacgcctccgacccgctgctgtacgagccgttcgatgaggactttgaggggagatgggtcgtctccaagaaggatgaataccaaggtgtgtggaggcatgccaagagtgatggtcatgaggactatggcctccttgttagtgagaaggcaaggaaatacgccataatcaaggagcttgatgagccagttaccttgaaggatgggacagtggtcctgcagtttgaagtgagacttcagaatggccttgaatgcggaggtgcctacattaagtacatccgccctcaggatgctggatgggatgccaaggagtttgataatgagactccatacactattatgtttggtccagataagtgtggatcaaccaacaaggttcatttcatccttaagcacaagaatcctaagactggaaagtatgttgagcatcatctcaaattcccaccatctgtcccatatgacaagctctctcatgtctacacggctatcttgaagccagacaatgaggtcaaaattttggtagatggggaagaaaagaagaaggcgaacttcctttctgctgatgattttgagccagcacttatcccatccaagaccattcctgaccctgatgacaagaagccggaggactgggatgagagagctaaaattcctgatccagatgcagtaaagcctgatgactgggatgaggatgccccgatggaaattgtggatgatgaagccaccaagcctgagggatggttggatgatgaacctgaggagattgatgatcctgaggcagccaagcctgaggactgggacgatgaggaggatggtgaatgggaggcgccaaagattgacaaccccaagtgtgaagaggcacctggatgtggcgagtggaagaggccaatgaagcagaatcctgcttacaagggcaagtggcatgcacctatgattgacaaccccaactacaagggaatctggaagcctcaggagatccccaaccctgagtactttgagcttgacaagcctgactttgatccaattgctgctattgggattgagatctggacaatgcaggatggcatcctgtttgacaatatcttgattgctgacgatgagaaggttgccacctccattctggagaagacctggaagcccaagtatgatgttgagaaggaaaaggagaaggctgaggaggaggctgctgctggtgcagatggtctttctgagttccagaagaagatttttgacgtcctgtacaagattgctgatgttccgttcttggcaccctacaaaaccaagatcattgatgttatcgagaagggagagaagcagcccaacatcactattggcattctggtctccgttgtcgtcgtgttcgttaccgttctcttcaagatcctgtttggaggcaagaagccggtggcacctgtgaaacctgcagctgaggcgaagaagcccaaggccacagtgaccgacggtgctggaagcagtggcgacaaggatgagaaagaggacgaaaaggaggagacagcaggcccacgtcggaggacccgaagggagacatagagacctatttttgatgtgtttggatgttctggcgcctgcttattttgaggactcttaatatttctgagtgtataataggaacttgtgtcacctctgcggcttccctgctgcttatttgtttttacatggttagaccaggaaccttcacgagctgtagaatttagttcttgttggct

SEQ ID NO: 7085 - protein, 573 aa, Zea mays subsp. mays
  peptide (1)..(573): Ceres Seq. ID no. 12358626
  misc_feature (64)..(420): Pfam Name: Calreticulin family Pfam Description: Calreticulin family
  misc_feature (40)..(573): Homolog of NCBI NO: 21740628 NR Description: OSJNBb0012E08.10 [Oryza sativa (japonica
  misc_feature (32)..(573): Homolog of NCBI NO: 3334138 NR Description: CALNEXIN HOMOLOG PRECURSOR
  misc_feature (46)..(571): Homolog of NCBI NO: 15240353 NR Description: calnexin - like protein; protein id: At5g61790.1, by cDNA: 2869., supported by cDNA: gi_15292686, supported by gi_16649020 [Arabidopsis thaliana]
  misc_feature (146)..(569): Homolog of NCBI NO: 7441503 NR Description: calnexin - maize (fragment)
  misc_feature (34)..(572): Homolog of NCBI NO: 11131469 NR Description: Calnexin homolog precursor
  misc_feature (37)..(573): Homolog of NCBI NO: 15240773 NR Description: calnexin homolog; protein id: At5g07340.1 thaliana] >gi|27151766|sp|Q38798|CAX2_ARATH Calnexin homolog 2
  misc_feature (37)..(573): Homolog of NCBI NO: 473878 NR Description: calnexin homolog
  misc_feature (49)..(573): Homolog of NCBI NO: 11131766 NR Description: Calnexin homolog precursor
  misc_feature (63)..(562): Homolog of NCBI NO: 38567017 NR Description: probable calcium-binding protein precursor cnx1
  misc_feature (63)..(553): Homolog of NCBI NO: 18564808 NR Description: calnexin [Aspergillus niger]
STAPTSYTASVCSLSRRPRSGWKVWRNSPARGDRDIERTMGGRALLLLLLVSALVFQIHASDPLLYEPFDEDFEGRWVVSKKDEYQGVWRHAKSDGHEDYGLLVSEKARKYAIIKELDEPVTLKDGTVVLQFEVRLQNGLECGGAYIKYIRPQDAGWDAKEFDNETPYTIMFGPDKCGSTNKVHFILKHKNPKTGKYVEHHLKFPPSVPYDKLSHVYTAILKPDNEVKILVDGEEKKKANFLSADDFEPALIPSKTIPDPDDKKPEDWDERAKIPDPDAVKPDDWDEDAPMEIVDDEATKPEGWLDDEPEEIDDPEAAKPEDWDDEEDGEWEAPKIDNPKCEEAPGCGEWKRPMKQNPAYKGKWHAPMIDNPNYKGIWKPQEIPNPEYFELDKPDFDPIAAIGIEIWTMQDGILFDNILIADDEKVATSILEKTWKPKYDVEKEKEKAEEEAAAGADGLSEFQKKIFDVLYKIADVPFLAPYKTKIIDVIEKGEKQPNITIGILVSVVVVFVTVLFKILFGGKKPVAPVKPAAEAKKPKATVTDGAGSSGDKDEKEDEKEETAGPRRRTRRET

SEQ ID NO: 7086 - protein, 534 aa, Zea mays subsp. mays
  peptide (1)..(534): Ceres Seq. ID no. 12358627
  misc_feature (25)..(381): Pfam Name: Calreticulin family Pfam Description: Calreticulin family
  misc_feature (1)..(534): Homolog of NCBI NO: 21740628 NR Description: OSJNBb0012E08.10 [Oryza sativa (japonica
  misc_feature (1)..(534): Homolog of NCBI NO: 3334138 NR Description: CALNEXIN HOMOLOG PRECURSOR
  misc_feature (7)..(532): Homolog of NCBI NO: 15240353 NR Description: calnexin - like protein; protein id: At5g61790.1, by cDNA: 2869., supported by cDNA: gi_15292686, supported by gi_16649020 [Arabidopsis thaliana]
  misc_feature (107)..(530): Homolog of NCBI NO: 7441503 NR Description: calnexin - maize (fragment)
  misc_feature (1)..(533): Homolog of NCBI NO: 11131469 NR Description: Calnexin homolog precursor
  misc_feature (1)..(534): Homolog of NCBI NO: 15240773 NR Description: calnexin homolog; protein id: At5g07340.1 thaliana] >gi|27151766|sp|Q38798|CAX2_ARATH Calnexin homolog 2
  misc_feature (1)..(534): Homolog of NCBI NO: 473878 NR Description: calnexin homolog
  misc_feature (10)..(534): Homolog of NCBI NO: 11131766 NR Description: Calnexin homolog precursor
  misc_feature (24)..(523): Homolog of NCBI NO: 38567017 NR Description: probable calcium-binding protein precursor cnx1
  misc_feature (24)..(514): Homolog of NCBI NO: 18564808 NR Description: calnexin [Aspergillus niger]
MGGRALLLLLLVSALVFQIHASDPLLYEPFDEDFEGRWVVSKKDEYQGVWRHAKSDGHEDYGLLVSEKARKYAIIKELDEPVTLKDGTVVLQFEVRLQNGLECGGAYIKYIRPQDAGWDAKEFDNETPYTIMFGPDKCGSTNKVHFILKHKNPKTGKYVEHHLKFPPSVPYDKLSHVYTAILKPDNEVKILVDGEEKKKANFLSADDFEPALIPSKTIPDPDDKKPEDWDERAKIPDPDAVKPDDWDEDAPMEIVDDEATKPEGWLDDEPEEIDDPEAAKPEDWDDEEDGEWEAPKIDNPKCEEAPGCGEWKRPMKQNPAYKGKWHAPMIDNPNYKGIWKPQEIPNPEYFELDKPDFDPIAAIGIEIWTMQDGILFDNILIADDEKVATSILEKTWKPKYDVEKEKEKAEEEAAAGADGLSEFQKKIFDVLYKIADVPFLAPYKTKIIDVIEKGEKQPNITIGILVSVVVVFVTVLFKILFGGKKPVAPVKPAAEAKKPKATVTDGAGSSGDKDEKEDEKEETAGPRRRTRRET

SEQ ID NO: 7087 - protein, 403 aa, Zea mays subsp. mays
  peptide (1)..(403): Ceres Seq. ID no. 12358628
  misc_feature (1)..(250): Pfam Name: Calreticulin family Pfam Description: Calreticulin family
  misc_feature (1)..(403): Homolog of NCBI NO: 21740628 NR Description: OSJNBb0012E08.10 [Oryza sativa (japonica
  misc_feature (1)..(403): Homolog of NCBI NO: 3334138 NR Description: CALNEXIN HOMOLOG PRECURSOR
  misc_feature (1)..(401): Homolog of NCBI NO: 15240353 NR Description: calnexin - like protein; protein id: At5g61790.1, by cDNA: 2869., supported by cDNA: gi_15292686, supported by gi_16649020 [Arabidopsis thaliana]
  misc_feature (1)..(399): Homolog of NCBI NO: 7441503 NR Description: calnexin - maize (fragment)
  misc_feature (1)..(402): Homolog of NCBI NO: 11131469 NR Description: Calnexin homolog precursor
  misc_feature (1)..(403): Homolog of NCBI NO: 15240773 NR Description: calnexin homolog; protein id: At5g07340.1 thaliana] >gi|27151766|sp|Q38798|CAX2_ARATH Calnexin homolog 2
  misc_feature (1)..(403): Homolog of NCBI NO: 473878 NR Description: calnexin homolog
  misc_feature (1)..(403): Homolog of NCBI NO: 11131766 NR Description: Calnexin homolog precursor
  misc_feature (1)..(392): Homolog of NCBI NO: 38567017 NR Description: probable calcium-binding protein precursor cnx1
  misc_feature (1)..(383): Homolog of NCBI NO: 18564808 NR Description: calnexin [Aspergillus niger]
MFGPDKCGSTNKVHFILKHKNPKTGKYVEHHLKFPPSVPYDKLSHVYTAILKPDNEVKILVDGEEKKKANFLSADDFEPALIPSKTIPDPDDKKPEDWDERAKIPDPDAVKPDDWDEDAPMEIVDDEATKPEGWLDDEPEEIDDPEAAKPEDWDDEEDGEWEAPKIDNPKCEEAPGCGEWKRPMKQNPAYKGKWHAPMIDNPNYKGIWKPQEIPNPEYFELDKPDFDPIAAIGIEIWTMQDGILFDNILIADDEKVATSILEKTWKPKYDVEKEKEKAEEEAAAGADGLSEFQKKIFDVLYKIADVPFLAPYKTKIIDVIEKGEKQPNITIGILVSVVVVFVTVLFKILFGGKKPVAPVKPAAEAKKPKATVTDGAGSSGDKDEKEDEKEETAGPRRRTRRET

SEQ ID NO: 7088 - DNA, 1676 bp, Zea mays subsp. mays
  misc_feature (1)..(1676): Ceres Seq. ID no. 12344231
  misc_feature: MA Experiment ID: 108515 Result: Up-regulated in Transcription
  misc_feature: MA Experiment 108515 PARAMETER Experiment Name: Zm_2mM_SA_P Parameter: Age (day) Value: 8
  misc_feature: MA Experiment 108515 PARAMETER Experiment Name: Zm_2mM_SA_P Parameter: Organism Value: Zea mays
  misc_feature: MA Experiment 108515 PARAMETER Experiment Name: Zm_2mM_SA_P Parameter: Plant Line Value: 35A19
  misc_feature: MA Experiment 108515 PARAMETER Experiment Name: Zm_2mM_SA_P Parameter: Timepoint (hr) Value: 12
  misc_feature: MA Experiment 108515 PARAMETER Experiment Name: Zm_2mM_SA_P Parameter: Tissue Value: Aerial
  misc_feature: MA Experiment 108515 PARAMETER Experiment Name: Zm_2mM_SA_P Parameter: Treatment Value: 2mM SA vs. No Treatment
  misc_feature: MA Experiment ID: 108527 Result: Up-regulated in Transcription
  misc_feature: MA Experiment 108527 PARAMETER Experiment Name: Zm_5mM_NO_P Parameter: Age (day) Value: 8
  misc_feature: MA Experiment 108527 PARAMETER Experiment Name: Zm_5mM_NO_P Parameter: Organism Value: Zea mays
  misc_feature: MA Experiment 108527 PARAMETER Experiment Name: Zm_5mM_NO_P Parameter: Plant Line Value: 35A19
  misc_feature: MA Experiment 108527 PARAMETER Experiment Name: Zm_5mM_NO_P Parameter: Timepoint (hr) Value: 6
  misc_feature: MA Experiment 108527 PARAMETER Experiment Name: Zm_5mM_NO_P Parameter: Tissue Value: Aerial
  misc_feature: MA Experiment 108527 PARAMETER Experiment Name: Zm_5mM_NO_P Parameter: Treatment Value: 5mM NO vs. No Treatment
  misc_feature: MA Experiment ID: 108529 Result: Up-regulated in Transcription
  misc_feature: MA Experiment 108529 PARAMETER Experiment Name: Zm_Imbibed_Seeds_P Parameter: Age (day) Value: 5 vs. 2
  misc_feature: MA Experiment 108529 PARAMETER Experiment Name: Zm_Imbibed_Seeds_P Parameter: Organism Value: Zea mays
  misc_feature: MA Experiment 108529 PARAMETER Experiment Name: Zm_Imbibed_Seeds_P Parameter: Plant Line Value: 35A19
  misc_feature: MA Experiment 108529 PARAMETER Experiment Name: Zm_Imbibed_Seeds_P Parameter: Tissue Value: Roots vs. Embryo
  misc_feature: MA Experiment ID: 108535 Result: Down-regulated in Transcription
  misc_feature: MA Experiment 108535 PARAMETER Experiment Name: Zm_Meristem_P Parameter: Age (day) Value: 8
  misc_feature: MA Experiment 108535 PARAMETER Experiment Name: Zm_Meristem_P Parameter: Organism Value: Zea mays
  misc_feature: MA Experiment 108535 PARAMETER Experiment Name: Zm_Meristem_P Parameter: Plant Line Value: 35A19
  misc_feature: MA Experiment 108535 PARAMETER Experiment Name: Zm_Meristem_P Parameter: Tissue Value: Root Meristem vs. Above Root Meristem
  misc_feature: MA Experiment ID: 108543 Result: Down-regulated in Transcription
  misc_feature: MA Experiment ID: 108545 Result: Down-regulated in Transcription
  misc_feature: MA Experiment 108545 PARAMETER Experiment Name: Zm_Imbibed_Seeds_P Parameter: Age (day) Value: 3 vs. 2
  misc_feature: MA Experiment 108545 PARAMETER Experiment Name: Zm_Imbibed_Seeds_P Parameter: Organism Value: Zea mays
  misc_feature: MA Experiment 108545 PARAMETER Experiment Name: Zm_Imbibed_Seeds_P Parameter: Plant Line Value: 35A19
  misc_feature: MA Experiment 108545 PARAMETER Experiment Name: Zm_Imbibed_Seeds_P Parameter: Tissue Value: Aerial vs. Embryo
  misc_feature: MA Experiment ID: 108559 Result: Up-regulated in Transcription
  misc_feature: MA Experiment 108559 PARAMETER Experiment Name: Zm_5mM_NO_P Parameter: Age (day) Value: 8
  misc_feature: MA Experiment 108559 PARAMETER Experiment Name: Zm_5mM_NO_P Parameter: Organism Value: Zea mays
  misc_feature: MA Experiment 108559 PARAMETER Experiment Name: Zm_5mM_NO_P Parameter: Plant Line Value: 35A19
  misc_feature: MA Experiment 108559 PARAMETER Experiment Name: Zm_5mM_NO_P Parameter: Timepoint (hr) Value: 12
  misc_feature: MA Experiment 108559 PARAMETER Experiment Name: Zm_5mM_NO_P Parameter: Tissue Value: Aerial
  misc_feature: MA Experiment 108559 PARAMETER Experiment Name: Zm_5mM_NO_P Parameter: Treatment Value: 5mM NO vs. No Treatment
  misc_feature: MA Experiment ID: 108689 Result: Down-regulated in Transcription
  misc_feature: MA Experiment 108689 PARAMETER Experiment Name: Zm_Drought_Roots_P Parameter: Age (day) Value: 9
  misc_feature: MA Experiment 108689 PARAMETER Experiment Name: Zm_Drought_Roots_P Parameter: Organism Value: Zea mays
  misc_feature: MA Experiment 108689 PARAMETER Experiment Name: Zm_Drought_Roots_P Parameter: Plant Line Value: 35A19
  misc_feature: MA Experiment 108689 PARAMETER Experiment Name: Zm_Drought_Roots_P Parameter: Timepoint (hr) Value: 24
  misc_feature: MA Experiment 108689 PARAMETER Experiment Name: Zm_Drought_Roots_P Parameter: Tissue Value: Roots
  misc_feature: MA Experiment 108689 PARAMETER Experiment Name: Zm_Drought_Roots_P Parameter: Treatment Value: Drought vs. No Drought
  misc_feature: MA Experiment ID: 20000478 Result: Up-regulated in Transcription
  misc_feature: MA Experiment 20000478 PARAMETER Experiment Name: Zm_5mM_SA_P Parameter: Age (day) Value: 11
  misc_feature: MA Experiment 20000478 PARAMETER Experiment Name: Zm_5mM_SA_P Parameter: Organism Value: Zea mays
  misc_feature: MA Experiment 20000478 PARAMETER Experiment Name: Zm_5mM_SA_P Parameter: Plant Line Value: 35A19
  misc_feature: MA Experiment 20000478 PARAMETER Experiment Name: Zm_5mM_SA_P Parameter: Timepoint (hr) Value: 72
  misc_feature: MA Experiment 20000478 PARAMETER Experiment Name: Zm_5mM_SA_P Parameter: Tissue Value: Aerial
  misc_feature: MA Experiment 20000478 PARAMETER Experiment Name: Zm_5mM_SA_P Parameter: Treatment Value: 5mM SA vs. No Treatment
  misc_feature: MA Experiment ID: 20000535 Result: Down-regulated in Transcription
  misc_feature: MA Experiment 20000535 PARAMETER Experiment Name: Zm_Hybrid_Seed_Dev_P Parameter: DAP Value: 30 vs. 12
  misc_feature: MA Experiment 20000535 PARAMETER Experiment Name: Zm_Hybrid_Seed_Dev_P Parameter: Organism Value: Zea mays
  misc_feature: MA Experiment 20000535 PARAMETER Experiment Name: Zm_Hybrid_Seed_Dev_P Parameter: Plant Line Value: 35A19
  misc_feature: MA Experiment 20000535 PARAMETER Experiment Name: Zm_Hybrid_Seed_Dev_P Parameter: Tissue Value: Embryo vs. Unfert Floret
  misc_feature: MA Experiment ID: 20000626 Result: Up-regulated in Transcription
  misc_feature: MA Experiment 20000626 PARAMETER Experiment Name: Zm_Herbicide-Treatments_P Parameter: Timepoint (hr) Value: 12
  misc_feature: MA Experiment 20000626 PARAMETER Experiment Name: Zm_Herbicide-Treatments_P Parameter: Tissue Value: Aerial
  misc_feature: MA Experiment 20000626 PARAMETER Experiment Name: Zm_Herbicide-Treatments_P Parameter: Treatment Value: Roundup vs. No Treatment
  misc_feature: MA Experiment ID: 20001610 Result: Down-regulated in Transcription
  misc_feature: MA Experiment 20001610 PARAMETER Experiment Name: Zm_50ppm_KNO3_L-to-H_P Parameter: Age (day) Value: 19
  misc_feature: MA Experiment 20001610 PARAMETER Experiment Name: Zm_50ppm_KNO3_L-to-H_P Parameter: Organism Value: Zea mays
  misc_feature: MA Experiment 20001610 PARAMETER Experiment Name: Zm_50ppm_KNO3_L-to-H_P Parameter: Plant Line Value: 35A19
  misc_feature: MA Experiment 20001610 PARAMETER Experiment Name: Zm_50ppm_KNO3_L-to-H_P Parameter: Timepoint (hr) Value: 2
  misc_feature: MA Experiment 20001610 PARAMETER Experiment Name: Zm_50ppm_KNO3_L-to-H_P Parameter: Tissue Value: Roots
  misc_feature: MA Experiment 20001610 PARAMETER Experiment Name: Zm_50ppm_KNO3_L-to-H_P Parameter: Treatment Value: 50ppm KNO3 vs. 50ppm KCl
  misc_feature: MA Experiment ID: 20001613 Result: Down-regulated in Transcription
  misc_feature: MA Experiment 20001613 PARAMETER Experiment Name: Zm_50ppm_KNO3_L-to-H_P Parameter: Age (day) Value: 20
  misc_feature: MA Experiment 20001613 PARAMETER Experiment Name: Zm_50ppm_KNO3_L-to-H_P Parameter: Organism Value: Zea mays
  misc_feature: MA Experiment 20001613 PARAMETER Experiment Name: Zm_50ppm_KNO3_L-to-H_P Parameter: Plant Line Value: 35A19
  misc_feature: MA Experiment 20001613 PARAMETER Experiment Name: Zm_50ppm_KNO3_L-to-H_P Parameter: Timepoint (hr) Value: 24
  misc_feature: MA Experiment 20001613 PARAMETER Experiment Name: Zm_50ppm_KNO3_L-to-H_P Parameter: Tissue Value: Roots
  misc_feature: MA Experiment 20001613 PARAMETER Experiment Name: Zm_50ppm_KNO3_L-to-H_P Parameter: Treatment Value: 50ppm KNO3 vs. 50ppm KCl
aggcgatgagcgcctctcgcgacgccagggcggagagctagccggccggagcccacacgcagctggaagcaccagatcaccgatcgtgccggccgagcggcggcgcaggcgcacaggcgcttacatgggagtagaggcgggcgggtgcgggcggagggcggtcgtcaccgggttctacgtctggggctgggagttcctcaccgccctccttctcttctcggccgccgtcgccgccgcagactcctactagcaagctacctaccttctttctttcattcccttaggtagctcagccgtacacacaacagcacacaagtcatcagttactagctagttagtagcctatacaacacatacatatatacatacaaaggtgagtgaggttcgcgtgcaagcagagccaatcgtgccgatcgagctatatacatagccggcggcgagagatgggagaagcggcctcggccgtggcggcgtcgaagaggggcggcggcgggccggcgccgttcctgaccaagacgcaccagatggtggaggagcggggcacggacgaggtgatctcgtgggcggagcagggccgctccttcgtggtgtggaagcccgttgagctggcgcgcgacctcctcccgctccacttcaagcactgcaacttctcctccttcgtccgccagctcaacacctacggtttccggaaggtggtgccggaccggtgggagttcgcgaacgacaacttccgtcgaggcgagcagggtctcctgtccggcatccgccgccgcaagtcaacggcgctgcagatgtccaagtccggatccggcggcagcggcggcgtgaacgccacgttccccccgcctctgccccctccacctcccgcgtcggccaccacgtccggcgtccacgagcgcagctcgtcgtcggcgtcgtcgccaccgcgggcgcccgacctggccagcgagaacgagcagctcaagaaggacaaccacacgctgtccgtcgagctggcgcaggcgcgccggcactgcgaggagctcctgggcttcctctcgcgcttcctcgacgtccggcagctcgacctccggctgctcatgcaggaggacgtgcgagcgggggcaagcgacgacggcgcacagcgccgcgcgcacgcagtggccagccagctggagcgcggcggcggcgaggaggggaagagcgtgaagctgttcggcgtactcttaaaggacgccgcgaggaagaggggccggtgcgaggaagcggcggccagcgagcggcccatcaagatgatcagggtcggcgagccgtgggtcggcgtcccgtcgtcgggcccgggccggtgcggcggcgagaattaactgtcatccaatgtgaggttgatgacaaggacagtttcatccatcatatcgagcaagtaacaaagccagtgctgtggtaaaactgcaaagacagaacacaggacacaggagaaatataggcgtaaggcatgttaattaagaattaattatatatgggatgcttttgaagtagcaagattggaagtagagataagtaaaacgggctagaagcagcgcccatgtgttcagaatggaaaattagcgtttccgtgtgtgtgttaagaaaaacttatatgcgctttctgcgagcacggttgattcttaagagcgacagcaaatgaaaggtgtattatt

SEQ ID NO: 7089 - protein, 299 aa, Zea mays subsp. mays
  peptide (1)..(299): Ceres Seq. ID no. 12344232
  misc_feature (18)..(198): Pfam Name: HSF-type DNA-binding Pfam Description: HSF-type DNA-binding
  misc_feature (18)..(293): Homolog of NCBI NO: 5821136 NR Description: heat shock factor [Nicotiana tabacum]
  misc_feature (18)..(289): Homolog of NCBI NO: 123684 NR Description: HEAT SHOCK FACTOR PROTEIN HSF24 (HEAT SHOCK FACTOR 24) (HSTF 24) (HEAT STRESS TRANSCRIPTION FACTOR)
MGEAASAVAASKRGGGGPAPFLTKTHQMVEERGTDEVISWAEQGRSFVVWKPVELARDLLPLHFKHCNFSSFVRQLNTYGFRKVVPDRWEFANDNFRRGEQGLLSGIRRRKSTALQMSKSGSGGSGGVNATFPPPLPPPPPASATTSGVHERSSSSASSPPRAPDLASENEQLKKDNHTLSVELAQARRHCEELLGFLSRFLDVRQLDLRLLMQEDVRAGASDDGAQRRAHAVASQLERGGGEEGKSVKLFGVLLKDAARKRGRCEEAAASERPIKMIRVGEPWVGVPSSGPGRCGGEN

SEQ ID NO: 7090 - protein, 272 aa, Zea mays subsp. mays
  peptide (1)..(272): Ceres Seq. ID no. 12344233
  misc_feature (1)..(171): Pfam Name: HSF-type DNA-binding Pfam Description: HSF-type DNA-binding
  misc_feature (1)..(266): Homolog of NCBI NO: 5821136 NR Description: heat shock factor [Nicotiana tabacum]
  misc_feature (1)..(262): Homolog of NCBI NO: 123684 NR Description: HEAT SHOCK FACTOR PROTEIN HSF24 (HEAT SHOCK FACTOR 24) (HSTF 24) (HEAT STRESS TRANSCRIPTION FACTOR)
MVEERGTDEVISWAEQGRSFVVWKPVELARDLLPLHFKHCNFSSFVRQLNTYGFRKVVPDRWEFANDNFRRGEQGLLSGIRRRKSTALQMSKSGSGGSGGVNATFPPPLPPPPPASATTSGVHERSSSSASSPPRAPDLASENEQLKKDNHTLSVELAQARRHCEELLGFLSRFLDVRQLDLRLLMQEDVRAGASDDGAQRRAHAVASQLERGGGEEGKSVKLFGVLLKDAARKRGRCEEAAASERPIKMIRVGEPWVGVPSSGPGRCGGEN

SEQ ID NO: 7091 - protein, 183 aa, Zea mays subsp. mays
  peptide (1)..(183): Ceres Seq. ID no. 12344234
  misc_feature (1)..(82): Pfam Name: HSF-type DNA-binding Pfam Description: HSF-type DNA-binding
  misc_feature (1)..(177): Homolog of NCBI NO: 5821136 NR Description: heat shock factor [Nicotiana tabacum]
  misc_feature (1)..(173): Homolog of NCBI NO: 123684 NR Description: HEAT SHOCK FACTOR PROTEIN HSF24 (HEAT SHOCK FACTOR 24) (HSTF 24) (HEAT STRESS TRANSCRIPTION FACTOR)
MSKSGSGGSGGVNATFPPPLPPPPPASATTSGVHERSSSSASSPPRAPDLASENEQLKKDNHTLSVELAQARRHCEELLGFLSRFLDVRQLDLRLLMQEDVRAGASDDGAQRRAHAVASQLERGGGEEGKSVKLFGVLLKDAARKRGRCEEAAASERPIKMIRVGEPWVGVPSSGPGRCGGEN

SEQ ID NO: 7092 - DNA, 732 bp, Zea mays subsp. mays
  misc_feature (1)..(732): Ceres Seq. ID no. 12379156
  misc_feature: MA Experiment ID: 108527 Result: Down-regulated in Transcription
  misc_feature: MA Experiment 108527 PARAMETER Experiment Name: Zm_5mM_NO_P Parameter: Age (day) Value: 8
  misc_feature: MA Experiment 108527 PARAMETER Experiment Name: Zm_5mM_NO_P Parameter: Organism Value: Zea mays
  misc_feature: MA Experiment 108527 PARAMETER Experiment Name: Zm_5mM_NO_P Parameter: Plant Line Value: 35A19
  misc_feature: MA Experiment 108527 PARAMETER Experiment Name: Zm_5mM_NO_P Parameter: Timepoint (hr) Value: 6
  misc_feature: MA Experiment 108527 PARAMETER Experiment Name: Zm_5mM_NO_P Parameter: Tissue Value: Aerial
  misc_feature: MA Experiment 108527 PARAMETER Experiment Name: Zm_5mM_NO_P Parameter: Treatment Value: 5mM NO vs. No Treatment
  misc_feature: MA Experiment ID: 108528 Result: Up-regulated in Transcription
  misc_feature: MA Experiment 108528 PARAMETER Experiment Name: Zm_Imbibed_Seeds_P Parameter: Age (day) Value: 5 vs. 2
  misc_feature: MA Experiment 108528 PARAMETER Experiment Name: Zm_Imbibed_Seeds_P Parameter: Organism Value: Zea mays
  misc_feature: MA Experiment 108528 PARAMETER Experiment Name: Zm_Imbibed_Seeds_P Parameter: Plant Line Value: 35A19
  misc_feature: MA Experiment 108528 PARAMETER Experiment Name: Zm_Imbibed_Seeds_P Parameter: Tissue Value: Aerial vs. Embryo
  misc_feature: MA Experiment ID: 108529 Result: Down-regulated in Transcription
  misc_feature: MA Experiment 108529 PARAMETER Experiment Name: Zm_Imbibed_Seeds_P Parameter: Age (day) Value: 5 vs. 2
  misc_feature: MA Experiment 108529 PARAMETER Experiment Name: Zm_Imbibed_Seeds_P Parameter: Organism Value: Zea mays
  misc_feature: MA Experiment 108529 PARAMETER Experiment Name: Zm_Imbibed_Seeds_P Parameter: Plant Line Value: 35A19
  misc_feature: MA Experiment 108529 PARAMETER Experiment Name: Zm_Imbibed_Seeds_P Parameter: Tissue Value: Roots vs. Embryo
  misc_feature: MA Experiment ID: 108530 Result: Up-regulated in Transcription
  misc_feature: MA Experiment 108530 PARAMETER Experiment Name: Zm_Imbibed_Seeds_P Parameter: Age (day) Value: 6 vs. 2
  misc_feature: MA Experiment 108530 PARAMETER Experiment Name: Zm_Imbibed_Seeds_P Parameter: Organism Value: Zea mays
  misc_feature: MA Experiment 108530 PARAMETER Experiment Name: Zm_Imbibed_Seeds_P Parameter: Plant Line Value: 35A19
  misc_feature: MA Experiment 108530 PARAMETER Experiment Name: Zm_Imbibed_Seeds_P Parameter: Tissue Value: Aerial vs. Embryo
  misc_feature: MA Experiment ID: 108536 Result: Down-regulated in Transcription
  misc_feature: MA Experiment 108536 PARAMETER Experiment Name: Zm_Meristem_P Parameter: Age (day) Value: 8
  misc_feature: MA Experiment 108536 PARAMETER Experiment Name: Zm_Meristem_P Parameter: Organism Value: Zea mays
  misc_feature: MA Experiment 108536 PARAMETER Experiment Name: Zm_Meristem_P Parameter: Plant Line Value: 35A19
  misc_feature: MA Experiment 108536 PARAMETER Experiment Name: Zm_Meristem_P Parameter: Tissue Value: Shoot Meristem vs. Above Shoot Meristem
  misc_feature: MA Experiment ID: 108543 Result: Up-regulated in Transcription
  misc_feature: MA Experiment ID: 108544 Result: Up-regulated in Transcription
  misc_feature: MA Experiment ID: 108545 Result: Up-regulated in Transcription
  misc_feature: MA Experiment 108545 PARAMETER Experiment Name: Zm_Imbibed_Seeds_P Parameter: Age (day) Value: 3 vs. 2
  misc_feature: MA Experiment 108545 PARAMETER Experiment Name: Zm_Imbibed_Seeds_P Parameter: Organism Value: Zea mays
  misc_feature: MA Experiment 108545 PARAMETER Experiment Name: Zm_Imbibed_Seeds_P Parameter: Plant Line Value: 35A19
  misc_feature: MA Experiment 108545 PARAMETER Experiment Name: Zm_Imbibed_Seeds_P Parameter: Tissue Value: Aerial vs. Embryo
  misc_feature: MA Experiment ID: 108547 Result: Up-regulated in Transcription
  misc_feature: MA Experiment 108547 PARAMETER Experiment Name: Zm_Imbibed_Seeds_P Parameter: Age (day) Value: 4 vs. 2
  misc_feature: MA Experiment 108547 PARAMETER Experiment Name: Zm_Imbibed_Seeds_P Parameter: Organism Value: Zea mays
  misc_feature: MA Experiment 108547 PARAMETER Experiment Name: Zm_Imbibed_Seeds_P Parameter: Plant Line Value: 35A19
  misc_feature: MA Experiment 108547 PARAMETER Experiment Name: Zm_Imbibed_Seeds_P Parameter: Tissue Value: Aerial vs. Embryo
  misc_feature: MA Experiment ID: 108556 Result: Down-regulated in Transcription
  misc_feature: MA Experiment 108556 PARAMETER Experiment Name: Zm_Drought_P Parameter: Age (day) Value: 9
  misc_feature: MA Experiment 108556 PARAMETER Experiment Name: Zm_Drought_P Parameter: Organism Value: Zea mays
  misc_feature: MA Experiment 108556 PARAMETER Experiment Name: Zm_Drought_P Parameter: Plant Line Value: 35A19
  misc_feature: MA Experiment 108556 PARAMETER Experiment Name: Zm_Drought_P Parameter: Timepoint (hr) Value: 24
  misc_feature: MA Experiment 108556 PARAMETER Experiment Name: Zm_Drought_P Parameter: Tissue Value: Aerial
  misc_feature: MA Experiment 108556 PARAMETER Experiment Name: Zm_Drought_P Parameter: Treatment Value: Drought vs. No Drought
  misc_feature: MA Experiment ID: 108559 Result: Down-regulated in Transcription
  misc_feature: MA Experiment 108559 PARAMETER Experiment Name: Zm_5mM_NO_P Parameter: Age (day) Value: 8
  misc_feature: MA Experiment 108559 PARAMETER Experiment Name: Zm_5mM_NO_P Parameter: Organism Value: Zea mays
  misc_feature: MA Experiment 108559 PARAMETER Experiment Name: Zm_5mM_NO_P Parameter: Plant Line Value: 35A19
  misc_feature: MA Experiment 108559 PARAMETER Experiment Name: Zm_5mM_NO_P Parameter: Timepoint (hr) Value: 12
  misc_feature: MA Experiment 108559 PARAMETER Experiment Name: Zm_5mM_NO_P Parameter: Tissue Value: Aerial
  misc_feature: MA Experiment 108559 PARAMETER Experiment Name: Zm_5mM_NO_P Parameter: Treatment Value: 5mM NO vs. No Treatment
  misc_feature: MA Experiment ID: 108687 Result: Down-regulated in Transcription
  misc_feature: MA Experiment 108687 PARAMETER Experiment Name: Zm_Embryos-Flowers__P Parameter: Tissue Value: Embryo vs. Aerial+
  misc_feature: MA Experiment ID: 20000480 Result: Down-regulated in Transcription
  misc_feature: MA Experiment 20000480 PARAMETER Experiment Name: Zm_Drought_P Parameter: Age (day) Value: 11
  misc_feature: MA Experiment 20000480 PARAMETER Experiment Name: Zm_Drought_P Parameter: Organism Value: Zea mays
  misc_feature: MA Experiment 20000480 PARAMETER Experiment Name: Zm_Drought_P Parameter: Plant Line Value: 35A19
  misc_feature: MA Experiment 20000480 PARAMETER Experiment Name: Zm_Drought_P Parameter: Timepoint (hr) Value: 72
  misc_feature: MA Experiment 20000480 PARAMETER Experiment Name: Zm_Drought_P Parameter: Tissue Value: Aerial
  misc_feature: MA Experiment 20000480 PARAMETER Experiment Name: Zm_Drought_P Parameter: Treatment Value: Drought vs. No Drought
  misc_feature: MA Experiment ID: 20000535 Result: Down-regulated in Transcription
  misc_feature: MA Experiment 20000535 PARAMETER Experiment Name: Zm_Hybrid_Seed_Dev_P Parameter: DAP Value: 30 vs. 12
  misc_feature: MA Experiment 20000535 PARAMETER Experiment Name: Zm_Hybrid_Seed_Dev_P Parameter: Organism Value: Zea mays
  misc_feature: MA Experiment 20000535 PARAMETER Experiment Name: Zm_Hybrid_Seed_Dev_P Parameter: Plant Line Value: 35A19
  misc_feature: MA Experiment 20000535 PARAMETER Experiment Name: Zm_Hybrid_Seed_Dev_P Parameter: Tissue Value: Embryo vs. Unfert Floret
  misc_feature: MA Experiment ID: 20000626 Result: Down-regulated in Transcription
  misc_feature: MA Experiment 20000626 PARAMETER Experiment Name: Zm_Herbicide-Treatments_P Parameter: Timepoint (hr) Value: 12
  misc_feature: MA Experiment 20000626 PARAMETER Experiment Name: Zm_Herbicide-Treatments_P Parameter: Tissue Value: Aerial
  misc_feature: MA Experiment 20000626 PARAMETER Experiment Name: Zm_Herbicide-Treatments_P Parameter: Treatment Value: Roundup vs. No Treatment
ggactgaggtgctcagctgacgccggtcgcctcgcagtggcaagtgcccgagcgatgcagcagataatcagcgcctgcaagctgcctcacacgcaacgggccgccgcgctcctgccgcagaggccatcgctcaggcgccttccagtcccaggaggtgcgccgccgccgcggcgattggtagtcaggaggagatgccaggaagaggataagcagcagcaagaggccgaggagggaagcggccctgacgagcaggagcaggagcagcagaagcgaacgttcctgagcctggaggaggccgggctggtggagatgtccggcctcagcacgcacgagcgtttcctctgccgcctcaccatatcgtctctgaacctgctgagagtgatctcggagcaggagggcgtcccgatagaggagctcaacgccggggcgcgtctgcgactggttcctcaaggacaagctcaagagagagcagaacgtcggcaccgccgtcttgcagtgggacgaccctgggcttctagctagttccagcttcgttctgagccaatgatcatgctattctacactgcagcgcacgcaggggctatatatttcagggcttcaggcccttcacgggatgagcaaccaatgccacattccatttatatatatctttcggtttggtttcatctttacaaattttctgtagcgacgaacatttttcctgtgcggaaaatgggaaaggaatttacgggc

SEQ ID NO: 7093 - protein, 173 aa, Zea mays subsp. mays
  peptide (1)..(173): Ceres Seq. ID no. 12379157
  misc_feature (19)..(142): Homolog of NCBI NO: 38344806 NR Description: OSJNBa0043L09.26 [Oryza sativa (japonica
  misc_feature (62)..(142): Homolog of NCBI NO: 22328854 NR Description: Expressed protein; protein id: At4g21445.1, by cDNA: gi_17933352 [Arabidopsis thaliana]
GLRCSADAGRLAVASARAMQQIISACKLPHTQRAAALLPQRPSLRRLPVPGGAPPPRRLVVRRRCQEEDKQQQEAEEGSGPDEQEQEQQKRTFLSLEEAGLVEMSGLSTHERFLCRLTISSLNLLRVISEQEGVPIEELNAGARLRLVPQGQAQERAERRHRRLAVGRPWASS

SEQ ID NO: 7094 - protein, 155 aa, Zea mays subsp. mays
  peptide (1)..(155): Ceres Seq. ID no. 12379158
  misc_feature (1)..(124): Homolog of NCBI NO: 38344806 NR Description: OSJNBa0043L09.26 [Oryza sativa (japonica
  misc_feature (44)..(124): Homolog of NCBI NO: 22328854 NR Description: Expressed protein; protein id: At4g21445.1, by cDNA: gi_17933352 [Arabidopsis thaliana]
MQQIISACKLPHTQRAAALLPQRPSLRRLPVPGGAPPPRRLVVRRRCQEEDKQQQEAEEGSGPDEQEQEQQKRTFLSLEEAGLVEMSGLSTHERFLCRLTISSLNLLRVISEQEGVPIEELNAGARLRLVPQGQAQERAERRHRRLAVGRPWASS

SEQ ID NO: 7095 - DNA, 840 bp, Zea mays subsp. mays
  misc_feature (1)..(840): Ceres Seq. ID no. 12341781
  misc_feature: MA Experiment ID: 108535 Result: Up-regulated in Transcription
  misc_feature: MA Experiment 108535 PARAMETER Experiment Name: Zm_Meristem_P Parameter: Age (day) Value: 8
  misc_feature: MA Experiment 108535 PARAMETER Experiment Name: Zm_Meristem_P Parameter: Organism Value: Zea mays
  misc_feature: MA Experiment 108535 PARAMETER Experiment Name: Zm_Meristem_P Parameter: Plant Line Value: 35A19
  misc_feature: MA Experiment 108535 PARAMETER Experiment Name: Zm_Meristem_P Parameter: Tissue Value: Root Meristem vs. Above Root Meristem
  misc_feature: MA Experiment ID: 108544 Result: Down-regulated in Transcription
  misc_feature: MA Experiment ID: 20000108 Result: Up-regulated in Transcription
  misc_feature: MA Experiment 20000108 PARAMETER Experiment Name: Zm_Root-Tips_P Parameter: Age (day) Value: 12
  misc_feature: MA Experiment 20000108 PARAMETER Experiment Name: Zm_Root-Tips_P Parameter: Organism Value: Zea mays
  misc_feature: MA Experiment 20000108 PARAMETER Experiment Name: Zm_Root-Tips_P Parameter: Tissue Value: Root tips vs. Root mid region    35
  misc_feature: MA Experiment 20000108 PARAMETER Experiment Name: Zm_Root-Tips_P Parameter: Tissue Value: Root tips vs. Root mid region   Sequence Listing-Misc Features (4)
  misc_feature: MA Experiment ID: 20000492 Result: Up-regulated in Transcription
  misc_feature: MA Experiment 20000492 PARAMETER Experiment Name: Zm_Hybrid_Seed_Dev_P Parameter: DAP Value: 12
  misc_feature: MA Experiment 20000492 PARAMETER Experiment Name: Zm_Hybrid_Seed_Dev_P Parameter: Organism Value: Zea mays
  misc_feature: MA Experiment 20000492 PARAMETER Experiment Name: Zm_Hybrid_Seed_Dev_P Parameter: Plant Line Value: 35A19
  misc_feature: MA Experiment 20000492 PARAMETER Experiment Name: Zm_Hybrid_Seed_Dev_P Parameter: Tissue Value: Fert Kernel vs. Unfert Floret
aagcacttcccgagaaaaggaagacagagaaggaaactgcagtgaagtcgccggcgccgccgcgacaggaggaaggagcagcagcggcaggggaggcccggcgatctcttctgctgcgtgcggcgagggagtaaaaggagccgcgacaggatgcactcctttgggcaccgcgccaacgcggtggcaacgttcgcggtcaccatactggccgcgatttgcttcgccgcctccttctccgacaacttcaacaccccaacacccactgcctccgttaagatcttgaatctaaactggttccagaaggaggccaacggcaacgacgaggttagcatgacgctgaacatttcggccgacctttcgtctcttttcacgtggaacacaaaacaggtgtttgtttttgtggcagcagagtatgagactccacagaatgctttgaatcaagtttccctttgggatggcattatacctgcaaaggagcatgccaagtttttgatccataccacaaacaagtacagatttattgaccagggaagcaatctaaagggcaaggaattcaacttgacaatgcactggcacattatgccaaagactggcaaaatgtttgcagataagatagtaatgacaggctatcgtctccctgagctatacagatagtcagatagatcatggacaggactaagtggcctgcaagaagtgttagtggcagtggcataattgatcctgagcgttttgttctaatctaagtggagcatgtaaccttataagcttgtacttaagctgaaccaggcaaaacaaagttgtaatttgagaggatatgtatggttcaattttgatttgcct

SEQ ID NO: 7096 - protein, 167 aa, Zea mays subsp. mays
  peptide (1)..(167): Ceres Seq. ID no. 12341782
  misc_feature (1)..(167): Pfam Name: Signal peptidase subunit Pfam Description: Signal peptidase subunit
  misc_feature (1)..(167): Homolog of NCBI NO: 28558783 NR Description: signal peptidase protein-like protein [Cucumis
  misc_feature (1)..(167): Homolog of NCBI NO: 15240934 NR Description: signal peptidase; protein id: At5g27430.1, by cDNA: gi_3044217 [Arabidopsis thaliana]
  misc_feature (1)..(167): Homolog of NCBI NO: 18397160 NR Description: expressed protein; protein id: At3g05230.1, by cDNA: 15144. [Arabidopsis thaliana] Probable microsomal signal peptidase 22 kDa subunit (SPase 22 kDa
  misc_feature (1)..(166): Homolog of NCBI NO: 34895578 NR Description: unnamed protein product [Oryza sativa (japonica group)] >gi|17369173|sp|Q9LGB4|SP22_ORYSA Probable microsomal peptidase 22 kDa subunit (SPase 22 kDa subunit) (SPC22)
  misc_feature (1)..(166): Homolog of NCBI NO: 31200695 NR Description: ENSANGP00000018480 [Anopheles gambiae]
  misc_feature (1)..(148): Homolog of NCBI NO: 134791 NR Description: Microsomal signal peptidase 23 kDa subunit (SPase
  misc_feature (1)..(148): Homolog of NCBI NO: 11345462 NR Description: hypothetical protein FLJ22649 similar to signal SPC22/23 [Homo sapiens] >gi|20863506|ref|XP_134164.1| RIKEN cDNA
  misc_feature (1)..(148): Homolog of NCBI NO: 26390287 NR Description: unnamed protein product [Mus musculus]
  misc_feature (1)..(148): Homolog of NCBI NO: 26346292 NR Description: unnamed protein product [Mus musculus]
  misc_feature (1)..(148): Homolog of NCBI NO: 39587410 NR Description: Hypothetical protein CBG22979 [Caenorhabditis
MHSFGHRANAVATFAVTILAAICFAASFSDNFNTPTPTASVKILNLNWFQKEANGNDEVSMTLNISADLSSLFTWNTKQVFVFVAAEYETPQNALNQVSLWDGIIPAKEHAKFLIHTTNKYRFIDQGSNLKGKEFNLTMHWHIMPKTGKMFADKIVMTGYRLPELYR

SEQ ID NO: 7097 - protein, 107 aa, Zea mays subsp. mays
  peptide (1)..(107): Ceres Seq. ID no. 12341783
  misc_feature (1)..(107): Pfam Name: Signal peptidase subunit Pfam Description: Signal peptidase subunit
  misc_feature (1)..(107): Homolog of NCBI NO: 28558783 NR Description: signal peptidase protein-like protein [Cucumis
  misc_feature (1)..(107): Homolog of NCBI NO: 15240934 NR Description: signal peptidase; protein id: At5g27430.1, by cDNA: gi_3044217 [Arabidopsis thaliana]
  misc_feature (1)..(107): Homolog of NCBI NO: 18397160 NR Description: expressed protein; protein id: At3g05230.1, by cDNA: 15144. [Arabidopsis thaliana] Probable microsomal signal peptidase 22 kDa subunit (SPase 22 kDa
  misc_feature (1)..(106): Homolog of NCBI NO: 34895578 NR Description: unnamed protein product [Oryza sativa (japonica group)] >gi|17369173|sp|Q9LGB4|SP22_ORYSA Probable microsomal peptidase 22 kDa subunit (SPase 22 kDa subunit) (SPC22)
  misc_feature (1)..(106): Homolog of NCBI NO: 31200695 NR Description: ENSANGP00000018480 [Anopheles gambiae]
  misc_feature (1)..(88): Homolog of NCBI NO: 134791 NR Description: Microsomal signal peptidase 23 kDa subunit (SPase
  misc_feature (1)..(88): Homolog of NCBI NO: 11345462 NR Description: hypothetical protein FLJ22649 similar to signal SPC22/23 [Homo sapiens] >gi|20863506|ref|XP_134164.1| RIKEN cDNA
  misc_feature (1)..(88): Homolog of NCBI NO: 26390287 NR Description: unnamed protein product [Mus musculus]
  misc_feature (1)..(88): Homolog of NCBI NO: 26346292 NR Description: unnamed protein product [Mus musculus]
  misc_feature (1)..(88): Homolog of NCBI NO: 39587410 NR Description: Hypothetical protein CBG22979 [Caenorhabditis
MTLNISADLSSLFTWNTKQVFVFVAAEYETPQNALNQVSLWDGIIPAKEHAKFLIHTTNKYRFIDQGSNLKGKEFNLTMHWHIMPKTGKMFADKIVMTGYRLPELYR

SEQ ID NO: 7098 - protein, 93 aa, Zea mays subsp. mays
  peptide (1)..(93): Ceres Seq. ID no. 12341784
STSREKEDREGNCSEVAGAAATGGRSSSGRGGPAISSAACGEGVKGAATGCTPLGTAPTRWQRSRSPYWPRFASPPPSPTTSTPQHPLPPLRS

SEQ ID NO: 7099 - DNA, 1035 bp, Zea mays subsp. mays
  misc_feature (1)..(1035): Ceres Seq. ID no. 12386576
  misc_feature: MA Experiment ID: 20000535 Result: Up-regulated in Transcription
  misc_feature: MA Experiment 20000535 PARAMETER Experiment Name: Zm_Hybrid_Seed_Dev_P Parameter: DAP Value: 30 vs. 12
  misc_feature: MA Experiment 20000535 PARAMETER Experiment Name: Zm_Hybrid_Seed_Dev_P Parameter: Organism Value: Zea mays
  misc_feature: MA Experiment 20000535 PARAMETER Experiment Name: Zm_Hybrid_Seed_Dev_P Parameter: Plant Line Value: 35A19
  misc_feature: MA Experiment 20000535 PARAMETER Experiment Name: Zm_Hybrid_Seed_Dev_P Parameter: Tissue Value: Embryo vs. Unfert Floret
  misc_feature: MA Experiment ID: 20001608 Result: Up-regulated in Transcription
  misc_feature: MA Experiment 20001608 PARAMETER Experiment Name: Zm_50ppm_KNO3_L-to-H_P Parameter: Age (day) Value: 21
  misc_feature: MA Experiment 20001608 PARAMETER Experiment Name: Zm_50ppm_KNO3_L-to-H_P Parameter: Organism Value: Zea mays
  misc_feature: MA Experiment 20001608 PARAMETER Experiment Name: Zm_50ppm_KNO3_L-to-H_P Parameter: Plant Line Value: 35A19
  misc_feature: MA Experiment 20001608 PARAMETER Experiment Name: Zm_50ppm_KNO3_L-to-H_P Parameter: Timepoint (hr) Value: 48
  misc_feature: MA Experiment 20001608 PARAMETER Experiment Name: Zm_50ppm_KNO3_L-to-H_P Parameter: Tissue Value: Shoots
  misc_feature: MA Experiment 20001608 PARAMETER Experiment Name: Zm_50ppm_KNO3_L-to-H_P Parameter: Treatment Value: 50ppm KNO3 vs. 50ppm KCl
aggcctccgcagtccgcacacccctcctgtgctttgagattcgcgcgtcgcgcctgccgacctcgtgcctcccgcggactcgccggcgaacgcctcttggagatgccgcccgccgcggcggcgctcctccggtgcgctccggcggtcccattcgcggcccgcagtagcgctgtttcccgctcaggcatggcgcggcgtctggtggcagcgagcgctgcggccggcaggctggcaccggcgtaccgcgggctgctgctcgacgccggtggcacgctgctgcaggttgcgcggccggtagccgagacgtatgcctccatcggccgacgttacggtgtgacgaagactaagaagagaatcatggaggggttcaagcgggcattctccgcgccatggccgaagacactcaggtaccagggagatgggcggccattctggagaattgtcgtggcagaagcgaccgactgcactgatggtgattatttcgaagaagtgtatcagtattatgcgcatggagatgcttggcgattgcctactggagcagacgcagcactgcgtgagctgaaggatgctggagttaagctcgctgttgtatctaacttcgataccaggctacggaaattgcttaaagaccttaatgtctccgagatgtttgatgccattgtggtgtcatccgaggtcggatatgagaaaccttccccagagatcttcaatatagcattggatcaaattggcgtggaagccagcaaggcaatccatgttggagacgatgaaactgcagacatggcaggtgccaatgctacaggacttgagtgctggctgtggggtaaggatgtgacgacgttttcggaaatacaggagcggattctgacaacagatgatcctcaatgagtgaatttggaatgttgcaaaaaatgatagttgtttcttttttccctcagttccttctttttggtttccttccaactcgtgtgttggcattttcattgtgctttcgtgaaataagctcatgccatggctaggtactgatgttccttc

SEQ ID NO: 7100 - protein, 295 aa, Zea mays subsp. mays
  peptide (1)..(295): Ceres Seq. ID no. 12386577
  misc_feature (81)..(277): Pfam Name: haloacid dehalogenase-like hydrolase Pfam Description: haloacid dehalogenase-like hydrolase
  misc_feature (41)..(292): Homolog of NCBI NO: 30683719 NR Description: haloacid dehalogenase-like hydrolase family
  misc_feature (61)..(292): Homolog of NCBI NO: 28393346 NR Description: unknown protein [Arabidopsis thaliana]
  misc_feature (81)..(289): Homolog of NCBI NO: 34899086 NR Description: contains ESTs to Arabidopsis thaliana chromosome 2, At2g41250~unknown protein
  misc_feature (81)..(288): Homolog of NCBI NO: 15227309 NR Description: hypothetical protein; protein id: At2g41250.1, by cDNA: gi_17979160 [Arabidopsis thaliana]
  misc_feature (82)..(269): Homolog of NCBI NO: 37520921 NR Description: hypothetical protein gll1352 [Gloeobacter
  misc_feature (82)..(273): Homolog of NCBI NO: 27714603 NR Description: similar to RIKEN cDNA 2810435D12 [Mus musculus]
  misc_feature (82)..(273): Homolog of NCBI NO: 21312204 NR Description: RIKEN cDNA 2810435D12 [Mus musculus] unnamed protein product [Mus musculus] RIKEN cDNA 2810435D12 gene [Mus musculus]
  misc_feature (82)..(273): Homolog of NCBI NO: 13654294 NR Description: hypothetical protein MGC12904 [Homo sapiens] Similar to RIKEN cDNA 2810435D12 gene [Homo sapiens]
  misc_feature (84)..(273): Homolog of NCBI NO: 23041810 NR Description: hypothetical protein [Trichodesmium erythraeum
  misc_feature (84)..(273): Homolog of NCBI NO: 23130292 NR Description: hypothetical protein [Nostoc punctiforme]
RPPQSAHPSCALRFARRACRPRASRGLAGERLLEMPPAAAALLRCAPAVPFAARSSAVSRSGMARRLVAASAAAGRLAPAYRGLLLDAGGTLLQVARPVAETYASIGRRYGVTKTKKRIMEGFKRAFSAPWPKTLRYQGDGRPFWRIVVAEATDCTDGDYFEEVYQYYAHGDAWRLPTGADAALRELKDAGVKLAVVSNFDTRLRKLLKDLNVSEMFDAIVVSSEVGYEKPSPEIFNIALDQIGVEASKAIHVGDDETADMAGANATGLECWLWGKDVTTFSEIQERILTTDDPQ

SEQ ID NO: 7101 - protein, 261 aa, Zea mays subsp. mays
  peptide (1)..(261): Ceres Seq. ID no. 12386578
  misc_feature (47)..(243): Pfam Name: haloacid dehalogenase-like hydrolase Pfam Description: haloacid dehalogenase-like hydrolase
  misc_feature (7)..(258): Homolog of NCBI NO: 30683719 NR Description: haloacid dehalogenase-like hydrolase family
  misc_feature (27)..(258): Homolog of NCBI NO: 28393346 NR Description: unknown protein [Arabidopsis thaliana]
  misc_feature (47)..(255): Homolog of NCBI NO: 34899086 NR Description: contains ESTs to Arabidopsis thaliana chromosome 2, At2g41250~unknown protein
  misc_feature (47)..(254): Homolog of NCBI NO: 15227309 NR Description: hypothetical protein; protein id: At2g41250.1, by cDNA: gi_17979160 [Arabidopsis thaliana]
  misc_feature (48)..(235): Homolog of NCBI NO: 37520921 NR Description: hypothetical protein gll1352 [Gloeobacter
  misc_feature (48)..(239): Homolog of NCBI NO: 27714603 NR Description: similar to RIKEN cDNA 2810435D12 [Mus musculus]
  misc_feature (48)..(239): Homolog of NCBI NO: 21312204 NR Description: RIKEN cDNA 2810435D12 [Mus musculus] unnamed protein product [Mus musculus] RIKEN cDNA 2810435D12 gene [Mus musculus]
  misc_feature (48)..(239): Homolog of NCBI NO: 13654294 NR Description: hypothetical protein MGC12904 [Homo sapiens] Similar to RIKEN cDNA 2810435D12 gene [Homo sapiens]
  misc_feature (50)..(239): Homolog of NCBI NO: 23041810 NR Description: hypothetical protein [Trichodesmium erythraeum
  misc_feature (50)..(239): Homolog of NCBI NO: 23130292 NR Description: hypothetical protein [Nostoc punctiforme]
MPPAAAALLRCAPAVPFAARSSAVSRSGMARRLVAASAAAGRLAPAYRGLLLDAGGTLLQVARPVAETYASIGRRYGVTKTKKRIMEGFKRAFSAPWPKTLRYQGDGRPFWRIVVAEATDCTDGDYFEEVYQYYAHGDAWRLPTGADAALRELKDAGVKLAVVSNFDTRLRKLLKDLNVSEMFDAIVVSSEVGYEKPSPEIFNIALDQIGVEASKAIHVGDDETADMAGANATGLECWLWGKDVTTFSEIQERILTTDDPQ

SEQ ID NO: 7102 - protein, 233 aa, Zea mays subsp. mays
  peptide (1)..(233): Ceres Seq. ID no. 12386579
  misc_feature (19)..(215): Pfam Name: haloacid dehalogenase-like hydrolase Pfam Description: haloacid dehalogenase-like hydrolase
  misc_feature (1)..(230): Homolog of NCBI NO: 30683719 NR Description: haloacid dehalogenase-like hydrolase family
  misc_feature (1)..(230): Homolog of NCBI NO: 28393346 NR Description: unknown protein [Arabidopsis thaliana]
  misc_feature (19)..(227): Homolog of NCBI NO: 34899086 NR Description: contains ESTs to Arabidopsis thaliana chromosome 2, At2g41250~unknown protein
  misc_feature (19)..(226): Homolog of NCBI NO: 15227309 NR Description: hypothetical protein; protein id: At2g41250.1, by cDNA: gi_17979160 [Arabidopsis thaliana]
  misc_feature (20)..(207): Homolog of NCBI NO: 37520921 NR Description: hypothetical protein gll1352 [Gloeobacter
  misc_feature (20)..(211): Homolog of NCBI NO: 27714603 NR Description: similar to RIKEN cDNA 2810435D12 [Mus musculus]
  misc_feature (20)..(211): Homolog of NCBI NO: 21312204 NR Description: RIKEN cDNA 2810435D12 [Mus musculus] unnamed protein product [Mus musculus] RIKEN cDNA 2810435D12 gene [Mus musculus]
  misc_feature (20)..(211): Homolog of NCBI NO: 13654294 NR Description: hypothetical protein MGC12904 [Homo sapiens] Similar to RIKEN cDNA 2810435D12 gene [Homo sapiens]
  misc_feature (22)..(211): Homolog of NCBI NO: 23041810 NR Description: hypothetical protein [Trichodesmium erythraeum
  misc_feature (22)..(211): Homolog of NCBI NO: 23130292 NR Description: hypothetical protein [Nostoc punctiforme]
MARRLVAASAAAGRLAPAYRGLLLDAGGTLLQVARPVAETYASIGRRYGVTKTKKRIMEGFKRAFSAPWPKTLRYQGDGRPFWRIVVAEATDCTDGDYFEEVYQYYAHGDAWRLPTGADAALRELKDAGVKLAVVSNFDTRLRKLLKDLNVSEMFDAIVVSSEVGYEKPSPEIFNIALDQIGVEASKAIHVGDDETADMAGANATGLECWLWGKDVTTFSEIQERILTTDDPQ

SEQ ID NO: 7103 - DNA, 763 bp, Zea mays subsp. mays
  misc_feature (1)..(763): Ceres Seq. ID no. 12401201
  misc_feature: MA Experiment ID: 108687 Result: Down-regulated in Transcription
  misc_feature: MA Experiment 108687 PARAMETER Experiment Name: Zm_Embryos-Flowers__P Parameter: Tissue Value: Embryo vs. Aerial+
  misc_feature: MA Experiment ID: 20000535 Result: Down-regulated in Transcription
  misc_feature: MA Experiment 20000535 PARAMETER Experiment Name: Zm_Hybrid_Seed_Dev_P Parameter: DAP Value: 30 vs. 12
  misc_feature: MA Experiment 20000535 PARAMETER Experiment Name: Zm_Hybrid_Seed_Dev_P Parameter: Organism Value: Zea mays
  misc_feature: MA Experiment 20000535 PARAMETER Experiment Name: Zm_Hybrid_Seed_Dev_P Parameter: Plant Line Value: 35A19
  misc_feature: MA Experiment 20000535 PARAMETER Experiment Name: Zm_Hybrid_Seed_Dev_P Parameter: Tissue Value: Embryo vs. Unfert Floret
cattttcctcttctgacctccggcagcaccatggagaacgtcgccgcgaatccttccgctgcggccgccgccgcagggaatggcgtccaagcatcgggggccggaggggagcgcccggaggacgcgtcgaagcagaacctggcgcaggtgacgagctcgatccagaagacgctgggcctgctccaccagctcaacctcaccgtctcctccttcaactctgcctcccagcttcccctcctccagcgcctgaacgcgctcgtggcggagctcgacacgatgcagaaactagccgagggttgtaacatccaggtgccaatggaggtcgtcaatttgatcgacgatgggaagaaccccgacgagtttactagggatgtgctcaacagctgcattgccaagaaccagatcaccaagggcaagactgacgctttcaagagcctacggaagcatctccttgaggagcttgaacaagctttccctgaggacgtagaagcatacagggagatccgtgctacttctgctgctgaggcaaagcggttggctcagtcccatggcaatttgcttaatggagatgtcaaagtgaaagctgagcattgactgaagggtacgactacagagggcaagtttactatctctgtttagtttggggatggctttgttaacgtgaaacgtgcatatctttctagcgcactttcccttcatgtgattgatccgtgaatctgtacatattaatatattatcataacatgtgtggcaattttaatcc

SEQ ID NO: 7104 - protein, 197 aa, Zea mays subsp. mays
  peptide (1)..(197): Ceres Seq. ID no. 12401202
  misc_feature (41)..(196): Homolog of NCBI NO: 18396004 NR Description: Expressed protein; protein id: At1g26665.1, by cDNA: gi_13926326, supported by cDNA: gi_16323257 [Arabidopsis >gi|13926327|gb|AAK49628.1|AF372912_1 At1g26660/T24P13_4
  misc_feature (41)..(196): Homolog of NCBI NO: 15238215 NR Description: putative protein; protein id: At5g41910.1 thaliana] >gi|9757936|dbj|BAB08424.1| gene_id:MJC20.1~similar to protein~sp|P45966 [Arabidopsis thaliana]
  misc_feature (41)..(174): Homolog of NCBI NO: 25403266 NR Description: protein T24P13.4 [imported] - Arabidopsis >gi|9295719|gb|AAF87025.1|AC006535_3 T24P13.4 [Arabidopsis
  misc_feature (30)..(169): Homolog of NCBI NO: 29145113 NR Description: similar to DNA segment, Chr 13, Wayne State
  misc_feature (3)..(169): Homolog of NCBI NO: 34873422 NR Description: similar to DNA segment, Chr 13, Wayne State
  misc_feature (54)..(169): Homolog of NCBI NO: 20070410 NR Description: DNA segment, Chr 13, Wayne State University 50, [Mus musculus] >gi|27681537|ref|XP_214417.1| similar to DNA Chr 13, Wayne State University 50, expressed [Mus musculus]
  misc_feature (54)..(169): Homolog of NCBI NO: 13097162 NR Description: Similar to CG5057 gene product [Homo sapiens]
  misc_feature (47)..(172): Homolog of NCBI NO: 9799628 NR Description: Nut2 [Drosophila melanogaster]
  misc_feature (81)..(189): Homolog of NCBI NO: 29841376 NR Description: similar to GenBank Accession Number BC003353
  misc_feature (47)..(172): Homolog of NCBI NO: 24665095 NR Description: CG5057-PA [Drosophila melanogaster]
HFPLLTSGSTMENVAANPSAAAAAAGNGVQASGAGGERPEDASKQNLAQVTSSIQKTLGLLHQLNLTVSSFNSASQLPLLQRLNALVAELDTMQKLAEGCNIQVPMEVVNLIDDGKNPDEFTRDVLNSCIAKNQITKGKTDAFKSLRKHLLEELEQAFPEDVEAYREIRATSAAEAKRLAQSHGNLLNGDVKVKAEH

SEQ ID NO: 7105 - protein, 187 aa, Zea mays subsp. mays
  peptide (1)..(187): Ceres Seq. ID no. 12401203
  misc_feature (31)..(186): Homolog of NCBI NO: 18396004 NR Description: Expressed protein; protein id: At1g26665.1, by cDNA: gi_13926326, supported by cDNA: gi_16323257 [Arabidopsis >gi|13926327|gb|AAK49628.1|AF372912_1 At1g26660/T24P13_4
  misc_feature (31)..(186): Homolog of NCBI NO: 15238215 NR Description: putative protein; protein id: At5g41910.1 thaliana] >gi|9757936|dbj|BAB08424.1| gene_id:MJC20.1~similar to protein~sp|P45966 [Arabidopsis thaliana]
  misc_feature (31)..(164): Homolog of NCBI NO: 25403266 NR Description: protein T24P13.4 [imported] - Arabidopsis >gi|9295719|gb|AAF87025.1|AC006535_3 T24P13.4 [Arabidopsis
  misc_feature (20)..(159): Homolog of NCBI NO: 29145113 NR Description: similar to DNA segment, Chr 13, Wayne State
  misc_feature (1)..(159): Homolog of NCBI NO: 34873422 NR Description: similar to DNA segment, Chr 13, Wayne State
  misc_feature (44)..(159): Homolog of NCBI NO: 20070410 NR Description: DNA segment, Chr 13, Wayne State University 50, [Mus musculus] >gi|27681537|ref|XP_214417.1| similar to DNA Chr 13, Wayne State University 50, expressed [Mus musculus]
  misc_feature (44)..(159): Homolog of NCBI NO: 13097162 NR Description: Similar to CG5057 gene product [Homo sapiens]
  misc_feature (37)..(162): Homolog of NCBI NO: 9799628 NR Description: Nut2 [Drosophila melanogaster]
  misc_feature (71)..(179): Homolog of NCBI NO: 29841376 NR Description: similar to GenBank Accession Number BC003353
  misc_feature (37)..(162): Homolog of NCBI NO: 24665095 NR Description: CG5057-PA [Drosophila melanogaster]
MENVAANPSAAAAAAGNGVQASGAGGERPEDASKQNLAQVTSSIQKTLGLLHQLNLTVSSFNSASQLPLLQRLNALVAELDTMQKLAEGCNIQVPMEVVNLIDDGKNPDEFTRDVLNSCIAKNQITKGKTDAFKSLRKHLLEELEQAFPEDVEAYREIRATSAAEAKRLAQSHGNLLNGDVKVKAEH

SEQ ID NO: 7106 - protein, 105 aa, Zea mays subsp. mays
  peptide (1)..(105): Ceres Seq. ID no. 12401204
  misc_feature (1)..(104): Homolog of NCBI NO: 18396004 NR Description: Expressed protein; protein id: At1g26665.1, by cDNA: gi_13926326, supported by cDNA: gi_16323257 [Arabidopsis >gi|13926327|gb|AAK49628.1|AF372912_1 At1g26660/T24P13_4
  misc_feature (1)..(104): Homolog of NCBI NO: 15238215 NR Description: putative protein; protein id: At5g41910.1 thaliana] >gi|9757936|dbj|BAB08424.1| gene_id:MJC20.1~similar to protein~sp|P45966 [Arabidopsis thaliana]
  misc_feature (1)..(82): Homolog of NCBI NO: 25403266 NR Description: protein T24P13.4 [imported] - Arabidopsis >gi|9295719|gb|AAF87025.1|AC006535_3 T24P13.4 [Arabidopsis
  misc_feature (1)..(77): Homolog of NCBI NO: 29145113 NR Description: similar to DNA segment, Chr 13, Wayne State
  misc_feature (1)..(77): Homolog of NCBI NO: 34873422 NR Description: similar to DNA segment, Chr 13, Wayne State
  misc_feature (1)..(77): Homolog of NCBI NO: 20070410 NR Description: DNA segment, Chr 13, Wayne State University 50, [Mus musculus] >gi|27681537|ref|XP_214417.1| similar to DNA Chr 13, Wayne State University 50, expressed [Mus musculus]
  misc_feature (1)..(77): Homolog of NCBI NO: 13097162 NR Description: Similar to CG5057 gene product [Homo sapiens]
  misc_feature (1)..(80): Homolog of NCBI NO: 9799628 NR Description: Nut2 [Drosophila melanogaster]
  misc_feature (1)..(97): Homolog of NCBI NO: 29841376 NR Description: similar to GenBank Accession Number BC003353
  misc_feature (1)..(80): Homolog of NCBI NO: 24665095 NR Description: CG5057-PA [Drosophila melanogaster]
MQKLAEGCNIQVPMEVVNLIDDGKNPDEFTRDVLNSCIAKNQITKGKTDAFKSLRKHLLEELEQAFPEDVEAYREIRATSAAEAKRLAQSHGNLLNGDVKVKAEH

SEQ ID NO: 7107 - DNA, 1427 bp, Zea mays subsp. mays
  misc_feature (1)..(1427): Ceres Seq. ID no. 12365626
  misc_feature: MA Experiment ID: 108535 Result: Down-regulated in Transcription
  misc_feature: MA Experiment 108535 PARAMETER Experiment Name: Zm_Meristem_P Parameter: Age (day) Value: 8
  misc_feature: MA Experiment 108535 PARAMETER Experiment Name: Zm_Meristem_P Parameter: Organism Value: Zea mays
  misc_feature: MA Experiment 108535 PARAMETER Experiment Name: Zm_Meristem_P Parameter: Plant Line Value: 35A19
  misc_feature: MA Experiment 108535 PARAMETER Experiment Name: Zm_Meristem_P Parameter: Tissue Value: Root Meristem vs. Above Root Meristem
  misc_feature: MA Experiment ID: 108544 Result: Down-regulated in Transcription
  misc_feature: MA Experiment ID: 108559 Result: Up-regulated in Transcription
  misc_feature: MA Experiment 108559 PARAMETER Experiment Name: Zm_5mM_NO_P Parameter: Age (day) Value: 8
  misc_feature: MA Experiment 108559 PARAMETER Experiment Name: Zm_5mM_NO_P Parameter: Organism Value: Zea mays
  misc_feature: MA Experiment 108559 PARAMETER Experiment Name: Zm_5mM_NO_P Parameter: Plant Line Value: 35A19
  misc_feature: MA Experiment 108559 PARAMETER Experiment Name: Zm_5mM_NO_P Parameter: Timepoint (hr) Value: 12
  misc_feature: MA Experiment 108559 PARAMETER Experiment Name: Zm_5mM_NO_P Parameter: Tissue Value: Aerial
  misc_feature: MA Experiment 108559 PARAMETER Experiment Name: Zm_5mM_NO_P Parameter: Treatment Value: 5mM NO vs. No Treatment
acaaccggcccccaaggccctctgtaggtgttcaattcctgccactccccgcttccactttggcatcttgctcgcaccggggcaaggcaatggcgccgccgcgtcgctacctggccgcgttgctcgccctgctatgcgcgtgcaccaccacgacggcgccggcgggctccgtcgtcgcggccgcgaacgtaccgatcactacgtgccggtcgttctgcggcaacatcacggtggactacccgttcgcgctgcacgaggggtgcggccacgcggggctgcgggacctgctcttctgcatcaacggcgcgctgatgctccacctcccctcgggctcctaccgcgtggtcgacgtcgactacgcgtaccggggcctgaccctgcacgacccggccatgtccgactgccgcgcgctggacctcgccccggctgggcggggcaacggcttcgtcatcgagccgtggcgggagccgtacctgtcgccggactcggacaacgtgttcctcctcctgggctgccgcgccacctcgccgctgttccagggcttccccgaccgccacctcccctgccggaacgtgtctgggatggggtgcggcgactacctcggctgcctcgcctgggacgactactacgccggcggaggcgggcggcggggcccgtcgtcgggcgacgccgcggggcaaccgcccgagtgctgcgcgctgccctggggtgccatccgggcggtgaacgtcagccggctcgagtgcgaggggtacagcagcgcgtacagcctcgcgcccgtgcgcgccgagggcgccgccgcgggctgggcgtacgggatccgggtgtcgtggacgctgcccgagtccaaccgcggattctgcggcgcgtgccgcgccacgggcggggcgtgtggccatgacacggagagccacgccgacctgtgcctctgcggggactggaactccacctccaactgcgactcctcggccgacgccagcacggtcggtcgccgccacgctgcccgctgtcgccgcgcttcgctgggccatcctcgcctcaggattgacgtcactatggtactacgcgtcgacgacatcaaatatgtgatggacggtggattcatgctgtgatcgacaactgcccttcaaacaacagtacacaccacctagagaaagacgatgcgtttcaggagcttgaaacgatcgaatttcagaacccacgatcactatccatactggtttatgtttacaatcactcgtaatggacaaaaggccaaagacgatcatgtttgttgtagcaaggatatttttcccgtttggatgtatccctttatgtcaacagactcgtttggatgtgagttttgtcgcacattagtagctgcacgatgttgtacgggtcagtcggctgtatactgacgatggtttgatggttgatggacatatggc

SEQ ID NO: 7108 - protein, 369 aa, Zea mays subsp. mays
  peptide (1)..(369): Ceres Seq. ID no. 12365627
  misc_feature (65)..(337): Homolog of NCBI NO: 15240650 NR Description: unknown protein; protein id: At5g50290.1 thaliana] >gi|9759031|dbj|BAB09400.1| gene_id:K6A12.15~unknown
  misc_feature (42)..(319): Homolog of NCBI NO: 15229029 NR Description: unknown protein; protein id: At3g17350.1 thaliana] >gi|11994552|dbj|BAB02739.1|
  misc_feature (60)..(319): Homolog of NCBI NO: 18391149 NR Description: Expressed protein; protein id: At1g10380.1, by cDNA: 156978., supported by cDNA: gi_16323146 [Arabidopsis >gi|16323147|gb|AAL15308.1| At1g10380/F14N23_32 [Arabidopsis
  misc_feature (60)..(319): Homolog of NCBI NO: 25372857 NR Description: protein F14N23.27 [imported] - Arabidopsis >gi|4914341|gb|AAD32889.1|AC005489_27 F14N23.27 [Arabidopsis
  misc_feature (68)..(319): Homolog of NCBI NO: 18391330 NR Description: Expressed protein; protein id: At1g11915.1, by cDNA: gi_13507566, supported by cDNA: gi_15293302 [Arabidopsis
NRPPRPSVGVQFLPLPASTLASCSHRGKAMAPPRRYLAALLALLCACTTTTAPAGSVVAAANVPITTCRSFCGNITVDYPFALHEGCGHAGLRDLLFCINGALMLHLPSGSYRVVDVDYAYRGLTLHDPAMSDCRALDLAPAGRGNGFVIEPWREPYLSPDSDNVFLLLGCRATSPLFQGFPDRHLPCRNVSGMGCGDYLGCLAWDDYYAGGGGRRGPSSGDAAGQPPECCALPWGAIRAVNVSRLECEGYSSAYSLAPVRAEGAAAGWAYGIRVSWTLPESNRGFCGACRATGGACGHDTESHADLCLCGDWNSTSNCDSSADASTVGRRHAARCRRASLGHPRLRIDVTMVLRVDDIKYVMDGGFML

SEQ ID NO: 7109 - protein, 340 aa, Zea mays subsp. mays
  peptide (1)..(340): Ceres Seq. ID no. 12365628
  misc_feature (36)..(308): Homolog of NCBI NO: 15240650 NR Description: unknown protein; protein id: At5g50290.1 thaliana] >gi|9759031|dbj|BAB09400.1| gene_id:K6A12.15~unknown
  misc_feature (13)..(290): Homolog of NCBI NO: 15229029 NR Description: unknown protein; protein id: At3g17350.1 thaliana] >gi|11994552|dbj|BAB02739.1|
  misc_feature (31)..(290): Homolog of NCBI NO: 18391149 NR Description: Expressed protein; protein id: At1g10380.1, by cDNA: 156978., supported by cDNA: gi_16323146 [Arabidopsis >gi|16323147|gb|AAL15308.1| At1g10380/F14N23_32 [Arabidopsis
  misc_feature (31)..(290): Homolog of NCBI NO: 25372857 NR Description: protein F14N23.27 [imported] - Arabidopsis >gi|4914341|gb|AAD32889.1|AC005489_27 F14N23.27 [Arabidopsis
  misc_feature (39)..(290): Homolog of NCBI NO: 18391330 NR Description: Expressed protein; protein id: At1g11915.1, by cDNA: gi_13507566, supported by cDNA: gi_15293302 [Arabidopsis
MAPPRRYLAALLALLCACTTTTAPAGSVVAAANVPITTCRSFCGNITVDYPFALHEGCGHAGLRDLLFCINGALMLHLPSGSYRVVDVDYAYRGLTLHDPAMSDCRALDLAPAGRGNGFVIEPWREPYLSPDSDNVFLLLGCRATSPLFQGFPDRHLPCRNVSGMGCGDYLGCLAWDDYYAGGGGRRGPSSGDAAGQPPECCALPWGAIRAVNVSRLECEGYSSAYSLAPVRAEGAAAGWAYGIRVSWTLPESNRGFCGACRATGGACGHDTESHADLCLCGDWNSTSNCDSSADASTVGRRHAARCRRASLGHPRLRIDVTMVLRVDDIKYVMDGGFML

SEQ ID NO: 7110 - protein, 299 aa, Zea mays subsp. mays
  peptide (1)..(299): Ceres Seq. ID no. 12365629
QPAPKALCRCSIPATPRFHFGILLAPGQGNGAAASLPGRVARPAMRVHHHDGAGGLRRRGRERTDHYVPVVLRQHHGGLPVRAARGVRPRGAAGPALLHQRRADAPPPLGLLPRGRRRLRVPGPDPARPGHVRLPRAGPRPGWAGQRLRHRAVAGAVPVAGLGQRVPPPGLPRHLAAVPGLPRPPPPLPERVWDGVRRLPRLPRLGRLLRRRRRAAGPVVGRRRGATARVLRAALGCHPGGERQPARVRGVQQRVQPRARARRGRRRGLGVRDPGVVDAARVQPRILRRVPRHGRGVWP

SEQ ID NO: 7111 - DNA, 1186 bp, Zea mays subsp. mays
  misc_feature (1)..(1186): Ceres Seq. ID no. 12408921
  misc_feature: MA Experiment ID: 108522 Result: Down-regulated in Transcription
  misc_feature: MA Experiment 108522 PARAMETER Experiment Name: Zm_42deg_Heat_P Parameter: Age (day) Value: 8
  misc_feature: MA Experiment 108522 PARAMETER Experiment Name: Zm_42deg_Heat_P Parameter: Organism Value: Zea mays
  misc_feature: MA Experiment 108522 PARAMETER Experiment Name: Zm_42deg_Heat_P Parameter: Plant Line Value: 35A19
  misc_feature: MA Experiment 108522 PARAMETER Experiment Name: Zm_42deg_Heat_P Parameter: Temperature (deg C) Value: 42 vs. 22
  misc_feature: MA Experiment 108522 PARAMETER Experiment Name: Zm_42deg_Heat_P Parameter: Timepoint (hr) Value: 1
  misc_feature: MA Experiment 108522 PARAMETER Experiment Name: Zm_42deg_Heat_P Parameter: Tissue Value: Aerial
  misc_feature: MA Experiment ID: 108530 Result: Down-regulated in Transcription
  misc_feature: MA Experiment 108530 PARAMETER Experiment Name: Zm_Imbibed_Seeds_P Parameter: Age (day) Value: 6 vs. 2
  misc_feature: MA Experiment 108530 PARAMETER Experiment Name: Zm_Imbibed_Seeds_P Parameter: Organism Value: Zea mays
  misc_feature: MA Experiment 108530 PARAMETER Experiment Name: Zm_Imbibed_Seeds_P Parameter: Plant Line Value: 35A19
  misc_feature: MA Experiment 108530 PARAMETER Experiment Name: Zm_Imbibed_Seeds_P Parameter: Tissue Value: Aerial vs. Embryo
  misc_feature: MA Experiment ID: 108535 Result: Up-regulated in Transcription
  misc_feature: MA Experiment 108535 PARAMETER Experiment Name: Zm_Meristem_P Parameter: Age (day) Value: 8
  misc_feature: MA Experiment 108535 PARAMETER Experiment Name: Zm_Meristem_P Parameter: Organism Value: Zea mays
  misc_feature: MA Experiment 108535 PARAMETER Experiment Name: Zm_Meristem_P Parameter: Plant Line Value: 35A19
  misc_feature: MA Experiment 108535 PARAMETER Experiment Name: Zm_Meristem_P Parameter: Tissue Value: Root Meristem vs. Above Root Meristem
  misc_feature: MA Experiment ID: 108544 Result: Down-regulated in Transcription
  misc_feature: MA Experiment ID: 20000487 Result: Up-regulated in Transcription
  misc_feature: MA Experiment 20000487 PARAMETER Experiment Name: Zm_50mM_NH4NO3_L_to_H_P Parameter: Organism Value: Zea mays
  misc_feature: MA Experiment 20000487 PARAMETER Experiment Name: Zm_50mM_NH4NO3_L_to_H_P Parameter: Timepoint (hr) Value: 4
  misc_feature: MA Experiment 20000487 PARAMETER Experiment Name: Zm_50mM_NH4NO3_L_to_H_P Parameter: Tissue Value: Leaves
  misc_feature: MA Experiment 20000487 PARAMETER Experiment Name: Zm_50mM_NH4NO3_L_to_H_P Parameter: Treatment Value: 50mM NH4NO3 vs. 100mM Mannitol
  misc_feature: MA Experiment ID: 20000488 Result: Up-regulated in Transcription
  misc_feature: MA Experiment 20000488 PARAMETER Experiment Name: Zm_50mM_NH4NO3_L_to_H_P Parameter: Organism Value: Zea mays
  misc_feature: MA Experiment 20000488 PARAMETER Experiment Name: Zm_50mM_NH4NO3_L_to_H_P Parameter: Timepoint (hr) Value: 8
  misc_feature: MA Experiment 20000488 PARAMETER Experiment Name: Zm_50mM_NH4NO3_L_to_H_P Parameter: Tissue Value: Leaves
  misc_feature: MA Experiment 20000488 PARAMETER Experiment Name: Zm_50mM_NH4NO3_L_to_H_P Parameter: Treatment Value: 50mM NH4NO3 vs. 100mM Mannitol
  misc_feature: MA Experiment ID: 20000492 Result: Up-regulated in Transcription
  misc_feature: MA Experiment 20000492 PARAMETER Experiment Name: Zm_Hybrid_Seed_Dev_P Parameter: DAP Value: 12
  misc_feature: MA Experiment 20000492 PARAMETER Experiment Name: Zm_Hybrid_Seed_Dev_P Parameter: Organism Value: Zea mays
  misc_feature: MA Experiment 20000492 PARAMETER Experiment Name: Zm_Hybrid_Seed_Dev_P Parameter: Plant Line Value: 35A19
  misc_feature: MA Experiment 20000492 PARAMETER Experiment Name: Zm_Hybrid_Seed_Dev_P Parameter: Tissue Value: Fert Kernel vs. Unfert Floret
  misc_feature: MA Experiment ID: 20000626 Result: Up-regulated in Transcription
  misc_feature: MA Experiment 20000626 PARAMETER Experiment Name: Zm_Herbicide-Treatments_P Parameter: Timepoint (hr) Value: 12
  misc_feature: MA Experiment 20000626 PARAMETER Experiment Name: Zm_Herbicide-Treatments_P Parameter: Tissue Value: Aerial
  misc_feature: MA Experiment 20000626 PARAMETER Experiment Name: Zm_Herbicide-Treatments_P Parameter: Treatment Value: Roundup vs. No Treatment
ctcttcttctcgcgcagcatcgcctcccaagtccacaaaccacaacttacgccgccgctcgctccaccgcgcaagagtctgctgctgccgctcacccacccccgctcgcgcagaaggccgccgcagctctcactactggtgccctaaacgccgatatccctcttcgcctccctttccccacccaaaaccccggccttcagggttccggcaccatgccgcagggagatcacatcgagctgcaccagaagcgccatggcaagcgcctggaccacgaagagcgcaagcgcaagcgcgaggcccgcgaggtgcacaggcgctcgaaggatgcccgcaatttgattggtgctaagggcaagaggttcgccaagaaacgctatgctgagaaggcacagatgaagaagaccctgaaaatgcacgacgaatcaaataaacgacagaaggttgatgatgatgtccaagagggtgctcttcctccgtatctgctggatcgtgatcagacacagcgcgctaaggttctcagcaacacaataaagcaaaagaggaaggaaaaggctggcaaatgggatgttcctctgccaaaggtcaggcctgtagctgaagaagaaatgttcaaggttctacgaactggcaagcgaaaaaccaagcagtggaagagaatggttactaaagccacctttgttggagctggatttacaaggaaaccaccaaagtatgaacggttcattcggccaactggtctgcgtttcaccaaagctcatgtgactcacccagagctgaagtgcactttcaaccttgacataatttctgtgaagaaaaacccaaatggtccaatgtacacttctcttggtgttatgacaaggggaacgatcattgaggtaaatgtcagtgagcttggtctggtaactcccgctggaaaagttgtttgggggaaatatgctcaagttacaaacaacccggagaacgatggctgtatcaatgcagttttgctagtgtagagccatagtgagattttgttgatggtggttaatcgtcccatttgtatctgctccgatatgctattttttgaccatgtcatggctaatcccagtagtttgttgtgcaccatgggcataatgagcattctgtattctcgctgtgtgctacaaacatatatggagtaatataaattagcagtatttttttcgcg

SEQ ID NO: 7112 - protein, 330 aa, Zea mays subsp. mays
  peptide (1)..(330): Ceres Seq. ID no. 12408922
  misc_feature (71)..(307): Pfam Name: Ribosomal protein S8e Pfam Description: Ribosomal protein S8e
  misc_feature (71)..(330): Homolog of NCBI NO: 33146852 NR Description: putative TGF(transfoming growth factor) beta
  misc_feature (71)..(330): Homolog of NCBI NO: 15240023 NR Description: putative protein; protein id: At5g06360.1, by cDNA: 15229., supported by cDNA: gi_16604560, supported by gi_21280888 [Arabidopsis thaliana] >gi|9758416|dbj|BAB08958.1|
  misc_feature (71)..(330): Homolog of NCBI NO: 21553587 NR Description: unknown [Arabidopsis thaliana]
  misc_feature (71)..(330): Homolog of NCBI NO: 28278483 NR Description: Similar to RIKEN cDNA 5730427N09 gene [Danio
  misc_feature (71)..(330): Homolog of NCBI NO: 7662677 NR Description: hypothetical protein YR-29; TGF beta inducible protein 1; hairy cell leukemia protein 1 [Homo sapiens] hypothetical protein [Homo sapiens]
  misc_feature (71)..(330): Homolog of NCBI NO: 34925411 NR Description: TGF beta-inducible nuclear protein 1 (L-name LNR42) >gi|12849836|dbj|BAB28500.1| unnamed protein product [Mus >gi|12852013|dbj|BAB29237.1| unnamed protein product [Mus
  misc_feature (71)..(330): Homolog of NCBI NO: 34924868 NR Description: TGF beta-inducible nuclear protein 1 (CDK105
  misc_feature (71)..(330): Homolog of NCBI NO: 12856931 NR Description: unnamed protein product [Mus musculus]
  misc_feature (71)..(330): Homolog of NCBI NO: 9438133 NR Description: unknown [Ochlerotatus triseriatus]
  misc_feature (73)..(330): Homolog of NCBI NO: 34881321 NR Description: similar to TGF beta-inducible nuclear protein 1;
LLLAQHRLPSPQTTTYAAARSTAQESAAAAHPPPLAQKAAAALTTGALNADIPLRLPFPTQNPGLQGSGTMPQGDHIELHQKRHGKRLDHEERKRKREAREVHRRSKDARNLIGAKGKRFAKKRYAEKAQMKKTLKMHDESNKRQKVDDDVQEGALPPYLLDRDQTQRAKVLSNTIKQKRKEKAGKWDVPLPKVRPVAEEEMFKVLRTGKRKTKQWKRMVTKATFVGAGFTRKPPKYERFIRPTGLRFTKAHVTHPELKCTFNLDIISVKKNPNGPMYTSLGVMTRGTIIEVNVSELGLVTPAGKVVWGKYAQVTNNPENDGCINAVLLV

SEQ ID NO: 7113 - protein, 260 aa, Zea mays subsp. mays
  peptide (1)..(260): Ceres Seq. ID no. 12408923
  misc_feature (1)..(237): Pfam Name: Ribosomal protein S8e Pfam Description: Ribosomal protein S8e
  misc_feature (1)..(260): Homolog of NCBI NO: 33146852 NR Description: putative TGF(transfoming growth factor) beta
  misc_feature (1)..(260): Homolog of NCBI NO: 15240023 NR Description: putative protein; protein id: At5g06360.1, by cDNA: 15229., supported by cDNA: gi_16604560, supported by gi_21280888 [Arabidopsis thaliana] >gi|9758416|dbj|BAB08958.1|
  misc_feature (1)..(260): Homolog of NCBI NO: 21553587 NR Description: unknown [Arabidopsis thaliana]
  misc_feature (1)..(260): Homolog of NCBI NO: 28278483 NR Description: Similar to RIKEN cDNA 5730427N09 gene [Danio
  misc_feature (1)..(260): Homolog of NCBI NO: 7662677 NR Description: hypothetical protein YR-29; TGF beta inducible protein 1; hairy cell leukemia protein 1 [Homo sapiens] hypothetical protein [Homo sapiens]
  misc_feature (1)..(260): Homolog of NCBI NO: 34925411 NR Description: TGF beta-inducible nuclear protein 1 (L-name LNR42) >gi|12849836|dbj|BAB28500.1| unnamed protein product [Mus >gi|12852013|dbj|BAB29237.1| unnamed protein product [Mus
  misc_feature (1)..(260): Homolog of NCBI NO: 34924868 NR Description: TGF beta-inducible nuclear protein 1 (CDK105
  misc_feature (1)..(260): Homolog of NCBI NO: 12856931 NR Description: unnamed protein product [Mus musculus]
  misc_feature (1)..(260): Homolog of NCBI NO: 9438133 NR Description: unknown [Ochlerotatus triseriatus]
  misc_feature (3)..(260): Homolog of NCBI NO: 34881321 NR Description: similar to TGF beta-inducible nuclear protein 1;
MPQGDHIELHQKRHGKRLDHEERKRKREAREVHRRSKDARNLIGAKGKRFAKKRYAEKAQMKKTLKMHDESNKRQKVDDDVQEGALPPYLLDRDQTQRAKVLSNTIKQKRKEKAGKWDVPLPKVRPVAEEEMFKVLRTGKRKTKQWKRMVTKATFVGAGFTRKPPKYERFIRPTGLRFTKAHVTHPELKCTFNLDIISVKKNPNGPMYTSLGVMTRGTIIEVNVSELGLVTPAGKVVWGKYAQVTNNPENDGCINAVLLV

SEQ ID NO: 7114 - protein, 200 aa, Zea mays subsp. mays
  peptide (1)..(200): Ceres Seq. ID no. 12408924
  misc_feature (1)..(177): Pfam Name: Ribosomal protein S8e Pfam Description: Ribosomal protein S8e
  misc_feature (1)..(200): Homolog of NCBI NO: 33146852 NR Description: putative TGF(transfoming growth factor) beta
  misc_feature (1)..(200): Homolog of NCBI NO: 15240023 NR Description: putative protein; protein id: At5g06360.1, by cDNA: 15229., supported by cDNA: gi_16604560, supported by gi_21280888 [Arabidopsis thaliana] >gi|9758416|dbj|BAB08958.1|
  misc_feature (1)..(200): Homolog of NCBI NO: 21553587 NR Description: unknown [Arabidopsis thaliana]
  misc_feature (1)..(200): Homolog of NCBI NO: 28278483 NR Description: Similar to RIKEN cDNA 5730427N09 gene [Danio
  misc_feature (1)..(200): Homolog of NCBI NO: 7662677 NR Description: hypothetical protein YR-29; TGF beta inducible protein 1; hairy cell leukemia protein 1 [Homo sapiens] hypothetical protein [Homo sapiens]
  misc_feature (1)..(200): Homolog of NCBI NO: 34925411 NR Description: TGF beta-inducible nuclear protein 1 (L-name LNR42) >gi|12849836|dbj|BAB28500.1| unnamed protein product [Mus >gi|12852013|dbj|BAB29237.1| unnamed protein product [Mus
  misc_feature (1)..(200): Homolog of NCBI NO: 34924868 NR Description: TGF beta-inducible nuclear protein 1 (CDK105
  misc_feature (1)..(200): Homolog of NCBI NO: 12856931 NR Description: unnamed protein product [Mus musculus]
  misc_feature (1)..(200): Homolog of NCBI NO: 9438133 NR Description: unknown [Ochlerotatus triseriatus]
  misc_feature (1)..(200): Homolog of NCBI NO: 34881321 NR Description: similar to TGF beta-inducible nuclear protein 1;
MKKTLKMHDESNKRQKVDDDVQEGALPPYLLDRDQTQRAKVLSNTIKQKRKEKAGKWDVPLPKVRPVAEEEMFKVLRTGKRKTKQWKRMVTKATFVGAGFTRKPPKYERFIRPTGLRFTKAHVTHPELKCTFNLDIISVKKNPNGPMYTSLGVMTRGTIIEVNVSELGLVTPAGKVVWGKYAQVTNNPENDGCINAVLLV

SEQ ID NO: 7115 - DNA, 1319 bp, Zea mays subsp. mays
  misc_feature (1)..(1319): Ceres Seq. ID no. 12435002
  misc_feature: MA Experiment ID: 108535 Result: Up-regulated in Transcription
  misc_feature: MA Experiment 108535 PARAMETER Experiment Name: Zm_Meristem_P Parameter: Age (day) Value: 8
  misc_feature: MA Experiment 108535 PARAMETER Experiment Name: Zm_Meristem_P Parameter: Organism Value: Zea mays
  misc_feature: MA Experiment 108535 PARAMETER Experiment Name: Zm_Meristem_P Parameter: Plant Line Value: 35A19
  misc_feature: MA Experiment 108535 PARAMETER Experiment Name: Zm_Meristem_P Parameter: Tissue Value: Root Meristem vs. Above Root Meristem
  misc_feature: MA Experiment ID: 108536 Result: Down-regulated in Transcription
  misc_feature: MA Experiment 108536 PARAMETER Experiment Name: Zm_Meristem_P Parameter: Age (day) Value: 8
  misc_feature: MA Experiment 108536 PARAMETER Experiment Name: Zm_Meristem_P Parameter: Organism Value: Zea mays
  misc_feature: MA Experiment 108536 PARAMETER Experiment Name: Zm_Meristem_P Parameter: Plant Line Value: 35A19
  misc_feature: MA Experiment 108536 PARAMETER Experiment Name: Zm_Meristem_P Parameter: Tissue Value: Shoot Meristem vs. Above Shoot Meristem
agcgccaccgccgttcgcctcctctccacactccgccagatcccatccctctcgcccaccgcgcgggtatcggagtcggagcatggcgtctgcagtggtggtggacgccggcgacgcgccggagcccacggttcgtaacctcctggaccaggagtccctcaagtgggtcttcgtcggcgggaagggcggcgtcggcaagactacctgcagctccatcctctccgtcctcctcgccggggtccgcccgtccgtgctcgtcatctccaccgaccccgcgcacaacctcagcgacgccttccagcagcgcttcaccaagttccccactctcgtccgcggattcaccaacctctacgccatggaaattgacccaaaggtagaaaatgatgatttatccaatgaaggaatggaaggattcctgtcagaactgacaaatgcgattccaggagtagatgaagctatgagttttgctgaaatgctaaaattagtccaaacaatggattactctgttgttgtttttgatactgctcctacagggcatacattacggttgcttcagttcccagcaaccctagagaagggtcttgagaaaatgatggagttgaaaaatagatttggcggtctgttgaatcaggccagtcgcttgtttggtcttggtgatgagctgaacgaggatgcaatgcttgggaaacttgagggtatgaaggatgtgatcgaacaagtgaacaggcaatttaaagatccagacttgacaacttttgtatgtgtttgtatcccggaatttctttcattgtatgaaacagaaagattggtgcaagagttagcgaagtttgagattgattcacacaatattattattaatcaagttatatttgatgaggaagctgtcgagtcaaaactgctaaaagcacggatgaaaatgcaacaaaaatacattgatcagttccatatgttatacgatgacttcaacatcaccaagcttcccttgctttcagaagaggtttgtggtgttcaagctctccaaaacttttcccagcacttccttacaccatacaagtctactcttaaaaggggcaccgtcgaggagctcgaacagagaataactatattaaaatctgcactgcaagaagctgagacagagttagatagggttaggaaagggaagcagtcagtgtgattttttttccacaggtcaagtgtgtaaaaccagagagacgatcaattttttcgtgtcattacactcttgttgatttcactatcatgtttcctcatcgaggagtttagacttgtaatagctatcggtagagaagtgtttgattcac

SEQ ID NO: 7116 - protein, 390 aa, Zea mays subsp. mays
  peptide (1)..(390): Ceres Seq. ID no. 12435003
  misc_feature (53)..(348): Pfam Name: Anion-transporting ATPase Pfam Description: Anion-transporting ATPase
  misc_feature (36)..(386): Homolog of NCBI NO: 18378897 NR Description: arsA homolog (hASNA-I), putative; protein id:
  misc_feature (36)..(386): Homolog of NCBI NO: 25290846 NR Description: hypothetical protein F22M8.4 [imported] - thaliana >gi|8570442|gb|AAF76469.1|AC020622_3 Contains similarity
  misc_feature (41)..(350): Homolog of NCBI NO: 24586297 NR Description: CG1598-PA [Drosophila melanogaster]
  misc_feature (36)..(350): Homolog of NCBI NO: 19717679 NR Description: arsenite transport subunit A [Dictyostelium
  misc_feature (41)..(350): Homolog of NCBI NO: 17945070 NR Description: RE07422p [Drosophila melanogaster]
  misc_feature (35)..(351): Homolog of NCBI NO: 6647417 NR Description: Arsenical pump-driving ATPase
  misc_feature (35)..(351): Homolog of NCBI NO: 12025542 NR Description: arsA (bacterial) arsenite transporter,
  misc_feature (35)..(351): Homolog of NCBI NO: 2905657 NR Description: arsenite translocating ATPase [Homo sapiens]
  misc_feature (41)..(351): Homolog of NCBI NO: 4757796 NR Description: arsA arsenite transporter, ATP-binding, homolog
  misc_feature (139)..(340): Homolog of NCBI NO: 30697424 NR Description: ATPase - like protein [Arabidopsis thaliana]
APPPFASSPHSARSHPSRPPRGYRSRSMASAVVVDAGDAPEPTVRNLLDQESLKWVFVGGKGGVGKTTCSSILSVLLAGVRPSVLVISTDPAHNLSDAFQQRFTKFPTLVRGFTNLYAMEIDPKVENDDLSNEGMEGFLSELTNAIPGVDEAMSFAEMLKLVQTMDYSVVVFDTAPTGHTLRLLQFPATLEKGLEKMMELKNRFGGLLNQASRLFGLGDELNEDAMLGKLEGMKDVIEQVNRQFKDPDLTTFVCVCIPEFLSLYETERLVQELAKFEIDSHNIIINQVIFDEEAVESKLLKARMKMQQKYIDQFHMLYDDFNITKLPLLSEEVCGVQALQNFSQHFLTPYKSTLKRGTVEELEQRITILKSALQEAETELDRVRKGKQSV

SEQ ID NO: 7117 - protein, 363 aa, Zea mays subsp. mays
  peptide (1)..(363): Ceres Seq. ID no. 12435004
  misc_feature (26)..(321): Pfam Name: Anion-transporting ATPase Pfam Description: Anion-transporting ATPase
  misc_feature (9)..(359): Homolog of NCBI NO: 18378897 NR Description: arsA homolog (hASNA-I), putative; protein id:
  misc_feature (9)..(359): Homolog of NCBI NO: 25290846 NR Description: hypothetical protein F22M8.4 [imported] - thaliana >gi|8570442|gb|AAF76469.1|AC020622_3 Contains similarity
  misc_feature (14)..(323): Homolog of NCBI NO: 24586297 NR Description: CG1598-PA [Drosophila melanogaster]
  misc_feature (9)..(323): Homolog of NCBI NO: 19717679 NR Description: arsenite transport subunit A [Dictyostelium
  misc_feature (14)..(323): Homolog of NCBI NO: 17945070 NR Description: RE07422p [Drosophila melanogaster]
  misc_feature (8)..(324): Homolog of NCBI NO: 6647417 NR Description: Arsenical pump-driving ATPase
  misc_feature (8)..(324): Homolog of NCBI NO: 12025542 NR Description: arsA (bacterial) arsenite transporter,
  misc_feature (8)..(324): Homolog of NCBI NO: 2905657 NR Description: arsenite translocating ATPase [Homo sapiens]
  misc_feature (14)..(324): Homolog of NCBI NO: 4757796 NR Description: arsA arsenite transporter, ATP-binding, homolog
  misc_feature (112)..(313): Homolog of NCBI NO: 30697424 NR Description: ATPase - like protein [Arabidopsis thaliana]
MASAVVVDAGDAPEPTVRNLLDQESLKWVFVGGKGGVGKTTCSSILSVLLAGVRPSVLVISTDPAHNLSDAFQQRFTKFPTLVRGFTNLYAMEIDPKVENDDLSNEGMEGFLSELTNAIPGVDEAMSFAEMLKLVQTMDYSVVVFDTAPTGHTLRLLQFPATLEKGLEKMMELKNRFGGLLNQASRLFGLGDELNEDAMLGKLEGMKDVIEQVNRQFKDPDLTTFVCVCIPEFLSLYETERLVQELAKFEIDSHNIIINQVIFDEEAVESKLLKARMKMQQKYIDQFHMLYDDFNITKLPLLSEEVCGVQALQNFSQHFLTPYKSTLKRGTVEELEQRITILKSALQEAETELDRVRKGKQSV

SEQ ID NO: 7118 - protein, 272 aa, Zea mays subsp. mays
  peptide (1)..(272): Ceres Seq. ID no. 12435005
  misc_feature (1)..(230): Pfam Name: Anion-transporting ATPase Pfam Description: Anion-transporting ATPase
  misc_feature (1)..(268): Homolog of NCBI NO: 18378897 NR Description: arsA homolog (hASNA-I), putative; protein id:
  misc_feature (1)..(268): Homolog of NCBI NO: 25290846 NR Description: hypothetical protein F22M8.4 [imported] - thaliana >gi|8570442|gb|AAF76469.1|AC020622_3 Contains similarity
  misc_feature (1)..(232): Homolog of NCBI NO: 24586297 NR Description: CG1598-PA [Drosophila melanogaster]
  misc_feature (1)..(232): Homolog of NCBI NO: 19717679 NR Description: arsenite transport subunit A [Dictyostelium
  misc_feature (1)..(232): Homolog of NCBI NO: 17945070 NR Description: RE07422p [Drosophila melanogaster]
  misc_feature (1)..(233): Homolog of NCBI NO: 6647417 NR Description: Arsenical pump-driving ATPase
  misc_feature (1)..(233): Homolog of NCBI NO: 12025542 NR Description: arsA (bacterial) arsenite transporter,
  misc_feature (1)..(233): Homolog of NCBI NO: 2905657 NR Description: arsenite translocating ATPase [Homo sapiens]
  misc_feature (1)..(233): Homolog of NCBI NO: 4757796 NR Description: arsA arsenite transporter, ATP-binding, homolog
  misc_feature (21)..(222): Homolog of NCBI NO: 30697424 NR Description: ATPase - like protein [Arabidopsis thaliana]
MEIDPKVENDDLSNEGMEGFLSELTNAIPGVDEAMSFAEMLKLVQTMDYSVVVFDTAPTGHTLRLLQFPATLEKGLEKMMELKNRFGGLLNQASRLFGLGDELNEDAMLGKLEGMKDVIEQVNRQFKDPDLTTFVCVCIPEFLSLYETERLVQELAKFEIDSHNIIINQVIFDEEAVESKLLKARMKMQQKYIDQFHMLYDDFNITKLPLLSEEVCGVQALQNFSQHFLTPYKSTLKRGTVEELEQRITILKSALQEAETELDRVRKGKQSV

SEQ ID NO: 7119 - DNA, 1153 bp, Zea mays subsp. mays
  misc_feature (1)..(1153): Ceres Seq. ID no. 12408917
  misc_feature: MA Experiment ID: 108527 Result: Up-regulated in Transcription
  misc_feature: MA Experiment 108527 PARAMETER Experiment Name: Zm_5mM_NO_P Parameter: Age (day) Value: 8
  misc_feature: MA Experiment 108527 PARAMETER Experiment Name: Zm_5mM_NO_P Parameter: Organism Value: Zea mays
  misc_feature: MA Experiment 108527 PARAMETER Experiment Name: Zm_5mM_NO_P Parameter: Plant Line Value: 35A19
  misc_feature: MA Experiment 108527 PARAMETER Experiment Name: Zm_5mM_NO_P Parameter: Timepoint (hr) Value: 6
  misc_feature: MA Experiment 108527 PARAMETER Experiment Name: Zm_5mM_NO_P Parameter: Tissue Value: Aerial
  misc_feature: MA Experiment 108527 PARAMETER Experiment Name: Zm_5mM_NO_P Parameter: Treatment Value: 5mM NO vs. No Treatment
  misc_feature: MA Experiment ID: 108535 Result: Down-regulated in Transcription
  misc_feature: MA Experiment 108535 PARAMETER Experiment Name: Zm_Meristem_P Parameter: Age (day) Value: 8
  misc_feature: MA Experiment 108535 PARAMETER Experiment Name: Zm_Meristem_P Parameter: Organism Value: Zea mays
  misc_feature: MA Experiment 108535 PARAMETER Experiment Name: Zm_Meristem_P Parameter: Plant Line Value: 35A19
  misc_feature: MA Experiment 108535 PARAMETER Experiment Name: Zm_Meristem_P Parameter: Tissue Value: Root Meristem vs. Above Root Meristem
  misc_feature: MA Experiment ID: 108556 Result: Up-regulated in Transcription
  misc_feature: MA Experiment 108556 PARAMETER Experiment Name: Zm_Drought_P Parameter: Age (day) Value: 9
  misc_feature: MA Experiment 108556 PARAMETER Experiment Name: Zm_Drought_P Parameter: Organism Value: Zea mays
  misc_feature: MA Experiment 108556 PARAMETER Experiment Name: Zm_Drought_P Parameter: Plant Line Value: 35A19
  misc_feature: MA Experiment 108556 PARAMETER Experiment Name: Zm_Drought_P Parameter: Timepoint (hr) Value: 24
  misc_feature: MA Experiment 108556 PARAMETER Experiment Name: Zm_Drought_P Parameter: Tissue Value: Aerial
  misc_feature: MA Experiment 108556 PARAMETER Experiment Name: Zm_Drought_P Parameter: Treatment Value: Drought vs. No Drought
  misc_feature: MA Experiment ID: 108559 Result: Up-regulated in Transcription
  misc_feature: MA Experiment 108559 PARAMETER Experiment Name: Zm_5mM_NO_P Parameter: Age (day) Value: 8
  misc_feature: MA Experiment 108559 PARAMETER Experiment Name: Zm_5mM_NO_P Parameter: Organism Value: Zea mays
  misc_feature: MA Experiment 108559 PARAMETER Experiment Name: Zm_5mM_NO_P Parameter: Plant Line Value: 35A19
  misc_feature: MA Experiment 108559 PARAMETER Experiment Name: Zm_5mM_NO_P Parameter: Timepoint (hr) Value: 12
  misc_feature: MA Experiment 108559 PARAMETER Experiment Name: Zm_5mM_NO_P Parameter: Tissue Value: Aerial
  misc_feature: MA Experiment 108559 PARAMETER Experiment Name: Zm_5mM_NO_P Parameter: Treatment Value: 5mM NO vs. No Treatment
  misc_feature: MA Experiment ID: 20000477 Result: Up-regulated in Transcription
  misc_feature: MA Experiment 20000477 PARAMETER Experiment Name: Zm_5mM_SA_P Parameter: Age (day) Value: 10
  misc_feature: MA Experiment 20000477 PARAMETER Experiment Name: Zm_5mM_SA_P Parameter: Organism Value: Zea mays
  misc_feature: MA Experiment 20000477 PARAMETER Experiment Name: Zm_5mM_SA_P Parameter: Plant Line Value: 35A19
  misc_feature: MA Experiment 20000477 PARAMETER Experiment Name: Zm_5mM_SA_P Parameter: Timepoint (hr) Value: 48
  misc_feature: MA Experiment 20000477 PARAMETER Experiment Name: Zm_5mM_SA_P Parameter: Tissue Value: Aerial
  misc_feature: MA Experiment 20000477 PARAMETER Experiment Name: Zm_5mM_SA_P Parameter: Treatment Value: 5mM SA vs. No Treatment
  misc_feature: MA Experiment ID: 20000478 Result: Up-regulated in Transcription
  misc_feature: MA Experiment 20000478 PARAMETER Experiment Name: Zm_5mM_SA_P Parameter: Age (day) Value: 11
  misc_feature: MA Experiment 20000478 PARAMETER Experiment Name: Zm_5mM_SA_P Parameter: Organism Value: Zea mays
  misc_feature: MA Experiment 20000478 PARAMETER Experiment Name: Zm_5mM_SA_P Parameter: Plant Line Value: 35A19
  misc_feature: MA Experiment 20000478 PARAMETER Experiment Name: Zm_5mM_SA_P Parameter: Timepoint (hr) Value: 72
  misc_feature: MA Experiment 20000478 PARAMETER Experiment Name: Zm_5mM_SA_P Parameter: Tissue Value: Aerial
  misc_feature: MA Experiment 20000478 PARAMETER Experiment Name: Zm_5mM_SA_P Parameter: Treatment Value: 5mM SA vs. No Treatment
  misc_feature: MA Experiment ID: 20000479 Result: Up-regulated in Transcription
  misc_feature: MA Experiment 20000479 PARAMETER Experiment Name: Zm_Drought_P Parameter: Age (day) Value: 10
  misc_feature: MA Experiment 20000479 PARAMETER Experiment Name: Zm_Drought_P Parameter: Organism Value: Zea mays
  misc_feature: MA Experiment 20000479 PARAMETER Experiment Name: Zm_Drought_P Parameter: Plant Line Value: 35A19
  misc_feature: MA Experiment 20000479 PARAMETER Experiment Name: Zm_Drought_P Parameter: Timepoint (hr) Value: 48
  misc_feature: MA Experiment 20000479 PARAMETER Experiment Name: Zm_Drought_P Parameter: Tissue Value: Aerial
  misc_feature: MA Experiment 20000479 PARAMETER Experiment Name: Zm_Drought_P Parameter: Treatment Value: Drought vs. No Drought
  misc_feature: MA Experiment ID: 20000626 Result: Up-regulated in Transcription
  misc_feature: MA Experiment 20000626 PARAMETER Experiment Name: Zm_Herbicide-Treatments_P Parameter: Timepoint (hr) Value: 12
  misc_feature: MA Experiment 20000626 PARAMETER Experiment Name: Zm_Herbicide-Treatments_P Parameter: Tissue Value: Aerial
  misc_feature: MA Experiment 20000626 PARAMETER Experiment Name: Zm_Herbicide-Treatments_P Parameter: Treatment Value: Roundup vs. No Treatment
  misc_feature: MA Experiment ID: 20000627 Result: Up-regulated in Transcription
  misc_feature: MA Experiment 20000627 PARAMETER Experiment Name: Zm_Herbicide-Treatments_P Parameter: Timepoint (hr) Value: 12
  misc_feature: MA Experiment 20000627 PARAMETER Experiment Name: Zm_Herbicide-Treatments_P Parameter: Tissue Value: Aerial
  misc_feature: MA Experiment 20000627 PARAMETER Experiment Name: Zm_Herbicide-Treatments_P Parameter: Treatment Value: Finale vs. No Treatment
gaccaaccccacccactggaccggcccgcgcccgcttggtccagcgccggccctgcctgcagccagccaccgttgtccgttccctcccgcgatccactcctctcgagctctaggggacggaaggaatccggcgggggtggggtgcgagcagggggagggagaagagcagccgcccgccccgcgagggggcaacagctgcccaagaacctgaccggaagagttgtgggagcggcggcggaaagatggggcaggccctgcgcaggctcttcgactccttcttctccaccagggagatgagggttgtgatgcttggtctggatgcagctggtaaaacaacaatactgtacaggcttcacatgggagaggttctttcaacagtccctacagtcggttttaatgtcgagaaggttcagtataagaatgtggcattcactgtgtgggatgtgggtgggcaagaaaaactcaggtcactgtggaagatgtacctgagtaattctgatgcactgatctatgtcgttgattctctggacagagaaaggatcagagacgcgaggcaagagttccagaccattatcaaggaccctttgatggcaaacagcataatcttggtatttgcaaacaaacaggacctgagaggcacgatgagcacggacgaggtcagcgaagggctggggctgcacgacctcaggaacaggatctggcacatacaggggacctgcgcgctccgcggcgagggcctctacgacgggctcgactggcttgcgtccaccctgaagcagctgcaagaatcgggccacgcgacttcggtcgctggcccttccatctgatccagcgcaagtgagctcagtgcctcagccaactgacagcaagcccacaagaatatgctccagcgcgagcgcattcctttggtgggtgtggctgcccgctggtggtggtggagttccttcggtcggtgttgccgtgttggtatcatatgagccagttgttcatccggcagggactcgcgtacttttttttctctcctgagattgtttgtaaattgttgaacggatgcaatgccggcgatgttgatcttgtgtgctggtggtgcacgtggttgttttgtctacttttttttacaataaaaaagagatcgtctgcggttctggtgatt

SEQ ID NO: 7120 - protein, 194 aa, Zea mays subsp. mays
  peptide (1)..(194): Ceres Seq. ID no. 12408918
  misc_feature (4)..(177): Pfam Name: ADP-ribosylation factor family Pfam Description: ADP-ribosylation factor family
  misc_feature (1)..(190): Homolog of NCBI NO: 37537196 NR Description: putative ADP-ribosylation factor [Oryza sativa
  misc_feature (1)..(189): Homolog of NCBI NO: 15237901 NR Description: ADP-ribosylation factor -like protein; protein At5g17060.1, supported by cDNA: 26844., supported by cDNA:
  misc_feature (1)..(193): Homolog of NCBI NO: 15228464 NR Description: putative ADP-ribosylation factor; protein id:
  misc_feature (1)..(189): Homolog of NCBI NO: 34897926 NR Description: Similar to Drosophila melanogaster
  misc_feature (1)..(178): Homolog of NCBI NO: 3182915 NR Description: ADP-RIBOSYLATION FACTOR
  misc_feature (1)..(177): Homolog of NCBI NO: 34909214 NR Description: putative ADP-ribosylation factor [Oryza sativa
  misc_feature (1)..(179): Homolog of NCBI NO: 7025460 NR Description: ADP ribosylation factor 1 [Toxoplasma gondii]
  misc_feature (1)..(178): Homolog of NCBI NO: 17551730 NR Description: ADP-Ribosylation Factor related ARF-1 (20.5 kD)
  misc_feature (1)..(178): Homolog of NCBI NO: 17136866 NR Description: ADP ribosylation factor 79F CG8385-PB
  misc_feature (1)..(178): Homolog of NCBI NO: 39584902 NR Description: Hypothetical protein CBG09004 [Caenorhabditis
MGQALRRLFDSFFSTREMRVVMLGLDAAGKTTILYRLHMGEVLSTVPTVGFNVEKVQYKNVAFTVWDVGGQEKLRSLWKMYLSNSDALIYVVDSLDRERIRDARQEFQTIIKDPLMANSIILVFANKQDLRGTMSTDEVSEGLGLHDLRNRIWHIQGTCALRGEGLYDGLDWLASTLKQLQESGHATSVAGPSI

SEQ ID NO: 7121 - protein, 177 aa, Zea mays subsp. mays
  peptide (1)..(177): Ceres Seq. ID no. 12408919
  misc_feature (1)..(160): Pfam Name: ADP-ribosylation factor family Pfam Description: ADP-ribosylation factor family
  misc_feature (1)..(173): Homolog of NCBI NO: 37537196 NR Description: putative ADP-ribosylation factor [Oryza sativa
  misc_feature (1)..(172): Homolog of NCBI NO: 15237901 NR Description: ADP-ribosylation factor -like protein; protein At5g17060.1, supported by cDNA: 26844., supported by cDNA:
  misc_feature (1)..(176): Homolog of NCBI NO: 15228464 NR Description: putative ADP-ribosylation factor; protein id:
  misc_feature (1)..(172): Homolog of NCBI NO: 34897926 NR Description: Similar to Drosophila melanogaster
  misc_feature (1)..(161): Homolog of NCBI NO: 3182915 NR Description: ADP-RIBOSYLATION FACTOR
  misc_feature (1)..(160): Homolog of NCBI NO: 34909214 NR Description: putative ADP-ribosylation factor [Oryza sativa
  misc_feature (1)..(162): Homolog of NCBI NO: 7025460 NR Description: ADP ribosylation factor 1 [Toxoplasma gondii]
  misc_feature (1)..(161): Homolog of NCBI NO: 17551730 NR Description: ADP-Ribosylation Factor related ARF-1 (20.5 kD)
  misc_feature (1)..(161): Homolog of NCBI NO: 17136866 NR Description: ADP ribosylation factor 79F CG8385-PB
  misc_feature (1)..(161): Homolog of NCBI NO: 39584902 NR Description: Hypothetical protein CBG09004 [Caenorhabditis
MRVVMLGLDAAGKTTILYRLHMGEVLSTVPTVGFNVEKVQYKNVAFTVWDVGGQEKLRSLWKMYLSNSDALIYVVDSLDRERIRDARQEFQTIIKDPLMANSIILVFANKQDLRGTMSTDEVSEGLGLHDLRNRIWHIQGTCALRGEGLYDGLDWLASTLKQLQESGHATSVAGPSI

SEQ ID NO: 7122 - protein, 173 aa, Zea mays subsp. mays
  peptide (1)..(173): Ceres Seq. ID no. 12408920
  misc_feature (1)..(156): Pfam Name: ADP-ribosylation factor family Pfam Description: ADP-ribosylation factor family
  misc_feature (1)..(169): Homolog of NCBI NO: 37537196 NR Description: putative ADP-ribosylation factor [Oryza sativa
  misc_feature (1)..(168): Homolog of NCBI NO: 15237901 NR Description: ADP-ribosylation factor -like protein; protein At5g17060.1, supported by cDNA: 26844., supported by cDNA:
  misc_feature (1)..(172): Homolog of NCBI NO: 15228464 NR Description: putative ADP-ribosylation factor; protein id:
  misc_feature (1)..(168): Homolog of NCBI NO: 34897926 NR Description: Similar to Drosophila melanogaster
  misc_feature (1)..(157): Homolog of NCBI NO: 3182915 NR Description: ADP-RIBOSYLATION FACTOR
  misc_feature (1)..(156): Homolog of NCBI NO: 34909214 NR Description: putative ADP-ribosylation factor [Oryza sativa
  misc_feature (1)..(158): Homolog of NCBI NO: 7025460 NR Description: ADP ribosylation factor 1 [Toxoplasma gondii]
  misc_feature (1)..(157): Homolog of NCBI NO: 17551730 NR Description: ADP-Ribosylation Factor related ARF-1 (20.5 kD)
  misc_feature (1)..(157): Homolog of NCBI NO: 17136866 NR Description: ADP ribosylation factor 79F CG8385-PB
  misc_feature (1)..(157): Homolog of NCBI NO: 39584902 NR Description: Hypothetical protein CBG09004 [Caenorhabditis
MLGLDAAGKTTILYRLHMGEVLSTVPTVGFNVEKVQYKNVAFTVWDVGGQEKLRSLWKMYLSNSDALIYVVDSLDRERIRDARQEFQTIIKDPLMANSIILVFANKQDLRGTMSTDEVSEGLGLHDLRNRIWHIQGTCALRGEGLYDGLDWLASTLKQLQESGHATSVAGPSI

SEQ ID NO: 7123 - DNA, 1315 bp, Zea mays subsp. mays
  misc_feature (1)..(1315): Ceres Seq. ID no. 12408914
  misc_feature: MA Experiment ID: 108522 Result: Up-regulated in Transcription
  misc_feature: MA Experiment 108522 PARAMETER Experiment Name: Zm_42deg_Heat_P Parameter: Age (day) Value: 8
  misc_feature: MA Experiment 108522 PARAMETER Experiment Name: Zm_42deg_Heat_P Parameter: Organism Value: Zea mays
  misc_feature: MA Experiment 108522 PARAMETER Experiment Name: Zm_42deg_Heat_P Parameter: Plant Line Value: 35A19
  misc_feature: MA Experiment 108522 PARAMETER Experiment Name: Zm_42deg_Heat_P Parameter: Temperature (deg C) Value: 42 vs. 22
  misc_feature: MA Experiment 108522 PARAMETER Experiment Name: Zm_42deg_Heat_P Parameter: Timepoint (hr) Value: 1
  misc_feature: MA Experiment 108522 PARAMETER Experiment Name: Zm_42deg_Heat_P Parameter: Tissue Value: Aerial
  misc_feature: MA Experiment ID: 108689 Result: Up-regulated in Transcription
  misc_feature: MA Experiment 108689 PARAMETER Experiment Name: Zm_Drought_Roots_P Parameter: Age (day) Value: 9
  misc_feature: MA Experiment 108689 PARAMETER Experiment Name: Zm_Drought_Roots_P Parameter: Organism Value: Zea mays
  misc_feature: MA Experiment 108689 PARAMETER Experiment Name: Zm_Drought_Roots_P Parameter: Plant Line Value: 35A19
  misc_feature: MA Experiment 108689 PARAMETER Experiment Name: Zm_Drought_Roots_P Parameter: Timepoint (hr) Value: 24
  misc_feature: MA Experiment 108689 PARAMETER Experiment Name: Zm_Drought_Roots_P Parameter: Tissue Value: Roots
  misc_feature: MA Experiment 108689 PARAMETER Experiment Name: Zm_Drought_Roots_P Parameter: Treatment Value: Drought vs. No Drought
  misc_feature: MA Experiment ID: 20000535 Result: Up-regulated in Transcription
  misc_feature: MA Experiment 20000535 PARAMETER Experiment Name: Zm_Hybrid_Seed_Dev_P Parameter: DAP Value: 30 vs. 12
  misc_feature: MA Experiment 20000535 PARAMETER Experiment Name: Zm_Hybrid_Seed_Dev_P Parameter: Organism Value: Zea mays
  misc_feature: MA Experiment 20000535 PARAMETER Experiment Name: Zm_Hybrid_Seed_Dev_P Parameter: Plant Line Value: 35A19
  misc_feature: MA Experiment 20000535 PARAMETER Experiment Name: Zm_Hybrid_Seed_Dev_P Parameter: Tissue Value: Embryo vs. Unfert Floret
gtatagccagcggttgacctggcttcttcacatacactattatacgtacattgatatatacgaaccgtcctggttcttgcaccaccgccgcaccgattcgcgcgaaagcgaactccgtgccttagggccgaatcatcaccgtcgtccgatcgatccgggaccgggactcgggaagcatgttgttaaatggcgacagcaggcgggccgcggcgacagcagcagcgctgctggctctcgccgcctgcttctgcgcagctactggagacggggatatggcgggcctgcggccgctcgtcctcgtggttgaccagtccggcaagggcgaccacaggaggattcaggacgccatcgatgcggcgccggcgagcaaccgctccgccggcggccgcggcagcgtcgtcatccggatcaagcccggagtgtacagagagaaagtggtggtggacaagccttgcataactctcgtcggcgcgaccgccgccagctcgaccgtcgtcatcacctggaacgagtcctgggtcgccgccgacagcccgacagtctccgtgctggcctccgacttcgtcgcgaagcgcatagcgttccagaacacgttcgggactagcgggccggcggtcgccgtgagggtggccggagacagggcggcgttctacgggtgcaggttcacgtcgttccaggacacgctcctggacgacacgggtcgccactactaccgtggctgctacgtccagggaggcaccgacttcgtcttcggcaatggcaaggctctgttcgataagtgccacctccactccgtctcgccggccggcggcgcgttcacggcgcacagacggtcgtcggagtcggaggacactgggttcagcttcgtcgggtgcaagctgacggggctcggggccggcacgtccgtcctcgggagaccctggggtccctactcccgcgtcgtctttgcgctcagctacatgtccggcacggtgaggccccagggctggggacgactgggagcgactcctccagacagagcaggagcaggacagcgttctacgggcagtaccagtgctacggggaaggctccagaactgacgggagagttgcgtggtctcacgacctgtcgcaggctgaagccgcgccgttcatcaccaaagtttgggtcgggggacaggagtggcttcggtaggaaacactagctagctgtgtgtgctctgtttggttcgtcaacagtgacgctgggaataataagctagagctgcagacgcgttatggccggttggtgccgagaatacgcttgccctgaaaaaggcgagcaatgcaagcaatg

SEQ ID NO: 7124 - protein, 335 aa, Zea mays subsp. mays
  peptide (1)..(335): Ceres Seq. ID no. 12408915
  misc_feature (40)..(295): Pfam Name: Pectinesterase Pfam Description: Pectinesterase
  misc_feature (39)..(295): Homolog of NCBI NO: 34913006 NR Description: pectin methylesterase-like protein [Oryza sativa
  misc_feature (39)..(275): Homolog of NCBI NO: 15226598 NR Description: pectinesterase family; protein id: At2g21610.1
  misc_feature (40)..(271): Homolog of NCBI NO: 15240781 NR Description: pectinesterase family; protein id: At5g07420.1,
  misc_feature (40)..(271): Homolog of NCBI NO: 15238111 NR Description: pectinesterase family; protein id: At5g47500.1, by cDNA: gi_20856814 [Arabidopsis thaliana] AT5g47500/MNJ7_9 [Arabidopsis thaliana]
  misc_feature (39)..(275): Homolog of NCBI NO: 15228022 NR Description: pectinesterase family; protein id: At2g36700.1
  misc_feature (39)..(281): Homolog of NCBI NO: 15228023 NR Description: pectinesterase family; protein id: At2g36710.1
  misc_feature (39)..(281): Homolog of NCBI NO: 27754550 NR Description: putative pectinesterase family protein
  misc_feature (40)..(271): Homolog of NCBI NO: 9758778 NR Description: pectin methylesterase-like [Arabidopsis thaliana]
  misc_feature (40)..(271): Homolog of NCBI NO: 15240792 NR Description: pectinesterase family; protein id: At5g07430.1
  misc_feature (41)..(271): Homolog of NCBI NO: 38345478 NR Description: OSJNBa0010H02.16 [Oryza sativa (japonica
MLLNGDSRRAAATAAALLALAACFCAATGDGDMAGLRPLVLVVDQSGKGDHRRIQDAIDAAPASNRSAGGRGSVVIRIKPGVYREKVVVDKPCITLVGATAASSTVVITWNESWVAADSPTVSVLASDFVAKRIAFQNTFGTSGPAVAVRVAGDRAAFYGCRFTSFQDTLLDDTGRHYYRGCYVQGGTDFVFGNGKALFDKCHLHSVSPAGGAFTAHRRSSESEDTGFSFVGCKLTGLGAGTSVLGRPWGPYSRVVFALSYMSGTVRPQGWGRLGATPPDRAGAGQRSTGSTSATGKAPELTGELRGLTTCRRLKPRRSSPKFGSGDRSGFGRKH

SEQ ID NO: 7125 - protein, 303 aa, Zea mays subsp. mays
  peptide (1)..(303): Ceres Seq. ID no. 12408916
  misc_feature (8)..(263): Pfam Name: Pectinesterase Pfam Description: Pectinesterase
  misc_feature (7)..(263): Homolog of NCBI NO: 34913006 NR Description: pectin methylesterase-like protein [Oryza sativa
  misc_feature (7)..(243): Homolog of NCBI NO: 15226598 NR Description: pectinesterase family; protein id: At2g21610.1
  misc_feature (8)..(239): Homolog of NCBI NO: 15240781 NR Description: pectinesterase family; protein id: At5g07420.1,
  misc_feature (8)..(239): Homolog of NCBI NO: 15238111 NR Description: pectinesterase family; protein id: At5g47500.1, by cDNA: gi_20856814 [Arabidopsis thaliana] AT5g47500/MNJ7_9 [Arabidopsis thaliana]
  misc_feature (7)..(243): Homolog of NCBI NO: 15228022 NR Description: pectinesterase family; protein id: At2g36700.1
  misc_feature (7)..(249): Homolog of NCBI NO: 15228023 NR Description: pectinesterase family; protein id: At2g36710.1
  misc_feature (7)..(249): Homolog of NCBI NO: 27754550 NR Description: putative pectinesterase family protein
  misc_feature (8)..(239): Homolog of NCBI NO: 9758778 NR Description: pectin methylesterase-like [Arabidopsis thaliana]
  misc_feature (8)..(239): Homolog of NCBI NO: 15240792 NR Description: pectinesterase family; protein id: At5g07430.1
  misc_feature (9)..(239): Homolog of NCBI NO: 38345478 NR Description: OSJNBa0010H02.16 [Oryza sativa (japonica
MAGLRPLVLVVDQSGKGDHRRIQDAIDAAPASNRSAGGRGSVVIRIKPGVYREKVVVDKPCITLVGATAASSTVVITWNESWVAADSPTVSVLASDFVAKRIAFQNTFGTSGPAVAVRVAGDRAAFYGCRFTSFQDTLLDDTGRHYYRGCYVQGGTDFVFGNGKALFDKCHLHSVSPAGGAFTAHRRSSESEDTGFSFVGCKLTGLGAGTSVLGRPWGPYSRVVFALSYMSGTVRPQGWGRLGATPPDRAGAGQRSTGSTSATGKAPELTGELRGLTTCRRLKPRRSSPKFGSGDRSGFGRKH

SEQ ID NO: 7126 - DNA, 1037 bp, Zea mays subsp. mays
  misc_feature (1)..(1037): Ceres Seq. ID no. 12357350
  misc_feature: MA Experiment ID: 108543 Result: Up-regulated in Transcription
  misc_feature: MA Experiment ID: 108544 Result: Up-regulated in Transcription
  misc_feature: MA Experiment ID: 108556 Result: Up-regulated in Transcription
  misc_feature: MA Experiment 108556 PARAMETER Experiment Name: Zm_Drought_P Parameter: Age (day) Value: 9
  misc_feature: MA Experiment 108556 PARAMETER Experiment Name: Zm_Drought_P Parameter: Organism Value: Zea mays
  misc_feature: MA Experiment 108556 PARAMETER Experiment Name: Zm_Drought_P Parameter: Plant Line Value: 35A19
  misc_feature: MA Experiment 108556 PARAMETER Experiment Name: Zm_Drought_P Parameter: Timepoint (hr) Value: 24
  misc_feature: MA Experiment 108556 PARAMETER Experiment Name: Zm_Drought_P Parameter: Tissue Value: Aerial
  misc_feature: MA Experiment 108556 PARAMETER Experiment Name: Zm_Drought_P Parameter: Treatment Value: Drought vs. No Drought
  misc_feature: MA Experiment ID: 20000479 Result: Up-regulated in Transcription
  misc_feature: MA Experiment 20000479 PARAMETER Experiment Name: Zm_Drought_P Parameter: Age (day) Value: 10
  misc_feature: MA Experiment 20000479 PARAMETER Experiment Name: Zm_Drought_P Parameter: Organism Value: Zea mays
  misc_feature: MA Experiment 20000479 PARAMETER Experiment Name: Zm_Drought_P Parameter: Plant Line Value: 35A19
  misc_feature: MA Experiment 20000479 PARAMETER Experiment Name: Zm_Drought_P Parameter: Timepoint (hr) Value: 48
  misc_feature: MA Experiment 20000479 PARAMETER Experiment Name: Zm_Drought_P Parameter: Tissue Value: Aerial
  misc_feature: MA Experiment 20000479 PARAMETER Experiment Name: Zm_Drought_P Parameter: Treatment Value: Drought vs. No Drought
  misc_feature: MA Experiment ID: 20000492 Result: Down-regulated in Transcription
  misc_feature: MA Experiment 20000492 PARAMETER Experiment Name: Zm_Hybrid_Seed_Dev_P Parameter: DAP Value: 12
  misc_feature: MA Experiment 20000492 PARAMETER Experiment Name: Zm_Hybrid_Seed_Dev_P Parameter: Organism Value: Zea mays
  misc_feature: MA Experiment 20000492 PARAMETER Experiment Name: Zm_Hybrid_Seed_Dev_P Parameter: Plant Line Value: 35A19
  misc_feature: MA Experiment 20000492 PARAMETER Experiment Name: Zm_Hybrid_Seed_Dev_P Parameter: Tissue Value: Fert Kernel vs. Unfert Floret
ccccgttcccctcgtcgacacctgcagtgccaagttgcatcgactcctccccggtcctccaccgcccgccgccgatggatgtggatgtggacgaggccaccgccacccctgcctccgcctctgccaagcccgcttccaacggcgaggccccctccggcgcccgcgaggtggatgtcggcgaggagtacacgctcgccggcgttctgcgcagcttcgtcgacggcgtctggtacccggacgagccgctgctccggcggctccgggcggcgtcctgcgaggccgcgccgcggctgaagggggcgtctcggaactcagcgcgggatctgctcgagtggacaaggcagggcagcggcctccgcgccatcctcgtcatctcggtcgggacaatcatgcctatagcattgactggccttttaatcttcatgttctttctgctaattgccactgctaatgcgatcatcgtctcagccctgatgtcactggccgctgctggcggattcttggctatcttctttgcttgcttggttgcagtgtatattggagcagtaggagttgctatctttgccatttctgccattgtcatctcatcagttgttggagttatgattactactggttgggttgggttcttctggatgatctggttcaccgcaaggaagagcatggacctgacgaagcattccatcagcatgacgagctcggcagtccaatcctattccgcgtcccgccaagtgaagcagaagcatgtcgactgaggctagttggttgcgtcttgcgtcctgtatgaagaagccctcgggtcgatctgggtgaattacggtagacgacatgcttgttttggcagttctgtttttcacggacactaggtgcataaatactagctctgaacttcggcagcgtgtacgtttgtcacggcggccaatgctgttctgtatggtatagtgatcagatgattgtacattgtgcaggtatgcagtatgtacatgccgattcatgagttgataataaaactatcactatattttttttccttttcc

SEQ ID NO: 7127 - protein, 250 aa, Zea mays subsp. mays
  peptide (1)..(250): Ceres Seq. ID no. 12357351
  misc_feature (29)..(250): Homolog of NCBI NO: 34905012 NR Description: P0456B03.14 [Oryza sativa (japonica
  misc_feature (46)..(246): Homolog of NCBI NO: 14423560 NR Description: Unknown protein [Arabidopsis thaliana]
  misc_feature (46)..(246): Homolog of NCBI NO: 18418008 NR Description: expressed protein; protein id: At5g16550.1, by cDNA: gi_14423559, supported by cDNA: gi_20259797 [Arabidopsis >gi|9759139|dbj|BAB09624.1| gene_id:MQK4.30~unknown protein
PFPSSTPAVPSCIDSSPVLHRPPPMDVDVDEATATPASASAKPASNGEAPSGAREVDVGEEYTLAGVLRSFVDGVWYPDEPLLRRLRAASCEAAPRLKGASRNSARDLLEWTRQGSGLRAILVISVGTIMPIALTGLLIFMFFLLIATANAIIVSALMSLAAAGGFLAIFFACLVAVYIGAVGVAIFAISAIVISSVVGVMITTGWVGFFWMIWFTARKSMDLTKHSISMTSSAVQSYSASRQVKQKHVD

SEQ ID NO: 7128 - protein, 226 aa, Zea mays subsp. mays
  peptide (1)..(226): Ceres Seq. ID no. 12357352
  misc_feature (5)..(226): Homolog of NCBI NO: 34905012 NR Description: P0456B03.14 [Oryza sativa (japonica
  misc_feature (22)..(222): Homolog of NCBI NO: 14423560 NR Description: Unknown protein [Arabidopsis thaliana]
  misc_feature (22)..(222): Homolog of NCBI NO: 18418008 NR Description: expressed protein; protein id: At5g16550.1, by cDNA: gi_14423559, supported by cDNA: gi_20259797 [Arabidopsis >gi|9759139|dbj|BAB09624.1| gene_id:MQK4.30~unknown protein
MDVDVDEATATPASASAKPASNGEAPSGAREVDVGEEYTLAGVLRSFVDGVWYPDEPLLRRLRAASCEAAPRLKGASRNSARDLLEWTRQGSGLRAILVISVGTIMPIALTGLLIFMFFLLIATANAIIVSALMSLAAAGGFLAIFFACLVAVYIGAVGVAIFAISAIVISSVVGVMITTGWVGFFWMIWFTARKSMDLTKHSISMTSSAVQSYSASRQVKQKHVD

SEQ ID NO: 7129 - protein, 149 aa, Zea mays subsp. mays
  peptide (1)..(149): Ceres Seq. ID no. 12357353
PVPLVDTCSAKLHRLLPGPPPPAADGCGCGRGHRHPCLRLCQARFQRRGPLRRPRGGCRRGVHARRRSAQLRRRRLVPGRAAAPAAPGGVLRGRAAAEGGVSELSAGSARVDKAGQRPPRHPRHLGRDNHAYSIDWPFNLHVLSANCHC

SEQ ID NO: 7130 - DNA, 990 bp, Zea mays subsp. mays
  misc_feature (1)..(990): Ceres Seq. ID no. 12350350
  misc_feature: MA Experiment ID: 20000534 Result: Down-regulated in Transcription
  misc_feature: MA Experiment 20000534 PARAMETER Experiment Name: Zm_Hybrid_Pollen_P Parameter: Age (day) Value: 8
  misc_feature: MA Experiment 20000534 PARAMETER Experiment Name: Zm_Hybrid_Pollen_P Parameter: Organism Value: Zea mays
  misc_feature: MA Experiment 20000534 PARAMETER Experiment Name: Zm_Hybrid_Pollen_P Parameter: Plant Line Value: 35A19
  misc_feature: MA Experiment 20000534 PARAMETER Experiment Name: Zm_Hybrid_Pollen_P Parameter: Tissue Value: Pollen vs. Aerial
aaaaatcgaatcgagcccatccatctccatttccgccgccgccgccgccgagagaccccaaccccacccatccaccaccatgtggcgccgcctccacaccctagcccccgccttgcgcagggctaccgccgccgccgccggggcccctgcggcgtccgcctcctctgcagcccgcgccgccccgctctcctcggcggccgccgctttccgccgcaccagcccgctcctctcaggggacaagccggcgagtgtggaggacgtcatgcccatcgccacggggctcgagcgggaggagctggaggccgagctcaaggggaagaagcggtttgacatggatcccctggtcggccccttcggtaccaaggaggaaccatctgtagttgagtcctactataacaagcggatagtcggctgccctggtggtgagggagaggatgaacacgatgttgtatggttctggttgaaaaaagatgagccgcatgagtgtccagtctgctcgcaatactttgtgcttaaggtcattggtgatggtggtgatccagatggtcatgacgatgaagatgatggacatcactaaggatgccttgtggttctgaaaataagaatttggtgaggcagatgaatccaatacacttctttttctagaaccagactgctccacggcatccttgtttatgaaaagacagttggccatcaagcaggtggtagttttcacctaggtattttgtccaaacaaaagctgtttgagatttgacccttgcgtttctttaagagcatcgtcgaataaaagatgactgcagtcagattgctttcttttgatacctcatattggcccatcgggtgtgatggacatgtaatattcagtaatggaacagccccatttctatgcttagcgtgctgggaattttgcaaaaggcctcctatatcattgacgagttttaagccagagtttgatgatccaacatgtttatgaccattgttttaatagcc

SEQ ID NO: 7131 - protein, 191 aa, Zea mays subsp. mays
  peptide (1)..(191): Ceres Seq. ID no. 12350351
  misc_feature (75)..(177): Pfam Name: Cytochrome c oxidase subunit Vb Pfam Description: Cytochrome c oxidase subunit Vb
  misc_feature (27)..(191): Homolog of NCBI NO: 34912592 NR Description: cytochrome c oxidase subunit Vb precursor [Oryza
  misc_feature (27)..(191): Homolog of NCBI NO: 5803264 NR Description: ESTs AU057456(S21460),AU057455(S21460) correspond a region of the predicted gene.~Similar to cytochrome c oxidase
  misc_feature (27)..(191): Homolog of NCBI NO: 15232644 NR Description: putative cytochrome c oxidase subunit Vb; protein At3g15640.1, supported by cDNA: 34224., supported by cDNA: supported by cDNA: gi_15777878 [Arabidopsis thaliana]
  misc_feature (27)..(191): Homolog of NCBI NO: 15220092 NR Description: cytochrome c oxidase subunit, putative; protein
  misc_feature (27)..(191): Homolog of NCBI NO: 21592567 NR Description: cytochrome c oxidase subunit, putative
  misc_feature (56)..(171): Homolog of NCBI NO: 6753500 NR Description: cytochrome c oxidase, subunit Vb [Mus musculus]
  misc_feature (41)..(171): Homolog of NCBI NO: 17017988 NR Description: cytochrome c oxidase subunit Vb precursor [Homo >gi|20141332|sp|P10606|COXB_HUMAN Cytochrome c oxidase Vb, mitochondrial precursor >gi|13623259|gb|AAH06229.1|AAH06229
  misc_feature (41)..(171): Homolog of NCBI NO: 30584725 NR Description: Homo sapiens cytochrome c oxidase subunit Vb
  misc_feature (41)..(171): Homolog of NCBI NO: 2144362 NR Description: cytochrome-c oxidase (EC 1.9.3.1) chain Vb - human >gi|180937|gb|AAA52060.1| COX5B >gi|180941|gb|AAA52061.1|
  misc_feature (51)..(171): Homolog of NCBI NO: 12842467 NR Description: unnamed protein product [Mus musculus]
KIESSPSISISAAAAAERPQPHPSTTMWRRLHTLAPALRRATAAAAGAPAASASSAARAAPLSSAAAAFRRTSPLLSGDKPASVEDVMPIATGLEREELEAELKGKKRFDMDPLVGPFGTKEEPSVVESYYNKRIVGCPGGEGEDEHDVVWFWLKKDEPHECPVCSQYFVLKVIGDGGDPDGHDDEDDGHH

SEQ ID NO: 7132 - protein, 165 aa, Zea mays subsp. mays
  peptide (1)..(165): Ceres Seq. ID no. 12350352
  misc_feature (49)..(151): Pfam Name: Cytochrome c oxidase subunit Vb Pfam Description: Cytochrome c oxidase subunit Vb
  misc_feature (1)..(165): Homolog of NCBI NO: 34912592 NR Description: cytochrome c oxidase subunit Vb precursor [Oryza
  misc_feature (1)..(165): Homolog of NCBI NO: 5803264 NR Description: ESTs AU057456(S21460),AU057455(S21460) correspond a region of the predicted gene.~Similar to cytochrome c oxidase
  misc_feature (1)..(165): Homolog of NCBI NO: 15232644 NR Description: putative cytochrome c oxidase subunit Vb; protein At3g15640.1, supported by cDNA: 34224., supported by cDNA: supported by cDNA: gi_15777878 [Arabidopsis thaliana]
  misc_feature (1)..(165): Homolog of NCBI NO: 15220092 NR Description: cytochrome c oxidase subunit, putative; protein
  misc_feature (1)..(165): Homolog of NCBI NO: 21592567 NR Description: cytochrome c oxidase subunit, putative
  misc_feature (30)..(145): Homolog of NCBI NO: 6753500 NR Description: cytochrome c oxidase, subunit Vb [Mus musculus]
  misc_feature (15)..(145): Homolog of NCBI NO: 17017988 NR Description: cytochrome c oxidase subunit Vb precursor [Homo >gi|20141332|sp|P10606|COXB_HUMAN Cytochrome c oxidase Vb, mitochondrial precursor >gi|13623259|gb|AAH06229.1|AAH06229
  misc_feature (15)..(145): Homolog of NCBI NO: 30584725 NR Description: Homo sapiens cytochrome c oxidase subunit Vb
  misc_feature (15)..(145): Homolog of NCBI NO: 2144362 NR Description: cytochrome-c oxidase (EC 1.9.3.1) chain Vb - human >gi|180937|gb|AAA52060.1| COX5B >gi|180941|gb|AAA52061.1|
  misc_feature (25)..(145): Homolog of NCBI NO: 12842467 NR Description: unnamed protein product [Mus musculus]
MWRRLHTLAPALRRATAAAAGAPAASASSAARAAPLSSAAAAFRRTSPLLSGDKPASVEDVMPIATGLEREELEAELKGKKRFDMDPLVGPFGTKEEPSVVESYYNKRIVGCPGGEGEDEHDVVWFWLKKDEPHECPVCSQYFVLKVIGDGGDPDGHDDEDDGHH

SEQ ID NO: 7133 - protein, 109 aa, Zea mays subsp. mays
  peptide (1)..(109): Ceres Seq. ID no. 12350353
KNRIEPIHLHFRRRRRRETPTPPIHHHVAPPPHPSPRLAQGYRRRRRGPCGVRLLCSPRRPALLGGRRFPPHQPAPLRGQAGECGGRHAHRHGARAGGAGGRAQGEEAV

SEQ ID NO: 7134 - DNA, 1706 bp, Zea mays subsp. mays
  misc_feature (1)..(1706): Ceres Seq. ID no. 13498597
  misc_feature: MA Experiment ID: 108503 Result: Up-regulated in Transcription
  misc_feature: MA Experiment 108503 PARAMETER Experiment Name: Zm_Drought_P Parameter: Age (day) Value: 8
  misc_feature: MA Experiment 108503 PARAMETER Experiment Name: Zm_Drought_P Parameter: Organism Value: Zea mays
  misc_feature: MA Experiment 108503 PARAMETER Experiment Name: Zm_Drought_P Parameter: Plant Line Value: 35A19
  misc_feature: MA Experiment 108503 PARAMETER Experiment Name: Zm_Drought_P Parameter: Timepoint (hr) Value: 6
  misc_feature: MA Experiment 108503 PARAMETER Experiment Name: Zm_Drought_P Parameter: Tissue Value: Aerial
  misc_feature: MA Experiment 108503 PARAMETER Experiment Name: Zm_Drought_P Parameter: Treatment Value: Drought vs. No Drought
  misc_feature: MA Experiment ID: 108504 Result: Up-regulated in Transcription
  misc_feature: MA Experiment 108504 PARAMETER Experiment Name: Zm_Drought_P Parameter: Age (day) Value: 8
  misc_feature: MA Experiment 108504 PARAMETER Experiment Name: Zm_Drought_P Parameter: Organism Value: Zea mays
  misc_feature: MA Experiment 108504 PARAMETER Experiment Name: Zm_Drought_P Parameter: Plant Line Value: 35A19
  misc_feature: MA Experiment 108504 PARAMETER Experiment Name: Zm_Drought_P Parameter: Timepoint (hr) Value: 12
  misc_feature: MA Experiment 108504 PARAMETER Experiment Name: Zm_Drought_P Parameter: Tissue Value: Aerial
  misc_feature: MA Experiment 108504 PARAMETER Experiment Name: Zm_Drought_P Parameter: Treatment Value: Drought vs. No Drought
  misc_feature: MA Experiment ID: 108534 Result: Up-regulated in Transcription
  misc_feature: MA Experiment 108534 PARAMETER Experiment Name: Zm_4deg_Cold_P Parameter: Age (hr) Value: 8
  misc_feature: MA Experiment 108534 PARAMETER Experiment Name: Zm_4deg_Cold_P Parameter: Organism Value: Zea mays
  misc_feature: MA Experiment 108534 PARAMETER Experiment Name: Zm_4deg_Cold_P Parameter: Plant Line Value: 35A19
  misc_feature: MA Experiment 108534 PARAMETER Experiment Name: Zm_4deg_Cold_P Parameter: Temperature (deg C) Value: 4 vs. 22
  misc_feature: MA Experiment 108534 PARAMETER Experiment Name: Zm_4deg_Cold_P Parameter: Timepoint (hr) Value: 6
  misc_feature: MA Experiment 108534 PARAMETER Experiment Name: Zm_4deg_Cold_P Parameter: Tissue Value: Aerial
  misc_feature: MA Experiment ID: 108535 Result: Down-regulated in Transcription
  misc_feature: MA Experiment 108535 PARAMETER Experiment Name: Zm_Meristem_P Parameter: Age (day) Value: 8
  misc_feature: MA Experiment 108535 PARAMETER Experiment Name: Zm_Meristem_P Parameter: Organism Value: Zea mays
  misc_feature: MA Experiment 108535 PARAMETER Experiment Name: Zm_Meristem_P Parameter: Plant Line Value: 35A19
  misc_feature: MA Experiment 108535 PARAMETER Experiment Name: Zm_Meristem_P Parameter: Tissue Value: Root Meristem vs. Above Root Meristem
  misc_feature: MA Experiment ID: 108539 Result: Up-regulated in Transcription
  misc_feature: MA Experiment 108539 PARAMETER Experiment Name: Zm_20percent_PEG_P Parameter: Age (day) Value: 8
  misc_feature: MA Experiment 108539 PARAMETER Experiment Name: Zm_20percent_PEG_P Parameter: Organism Value: Zea mays
  misc_feature: MA Experiment 108539 PARAMETER Experiment Name: Zm_20percent_PEG_P Parameter: Plant Line Value: 35A19
  misc_feature: MA Experiment 108539 PARAMETER Experiment Name: Zm_20percent_PEG_P Parameter: Timepoint (hr) Value: 1
  misc_feature: MA Experiment 108539 PARAMETER Experiment Name: Zm_20percent_PEG_P Parameter: Tissue Value: Aerial
  misc_feature: MA Experiment 108539 PARAMETER Experiment Name: Zm_20percent_PEG_P Parameter: Treatment Value: 20percent PEG vs. No Treatment
  misc_feature: MA Experiment ID: 108540 Result: Up-regulated in Transcription
  misc_feature: MA Experiment 108540 PARAMETER Experiment Name: Zm_20percent_PEG_P Parameter: Age (day) Value: 8
  misc_feature: MA Experiment 108540 PARAMETER Experiment Name: Zm_20percent_PEG_P Parameter: Organism Value: Zea mays
  misc_feature: MA Experiment 108540 PARAMETER Experiment Name: Zm_20percent_PEG_P Parameter: Plant Line Value: 35A19
  misc_feature: MA Experiment 108540 PARAMETER Experiment Name: Zm_20percent_PEG_P Parameter: Timepoint (hr) Value: 6
  misc_feature: MA Experiment 108540 PARAMETER Experiment Name: Zm_20percent_PEG_P Parameter: Tissue Value: Aerial
  misc_feature: MA Experiment 108540 PARAMETER Experiment Name: Zm_20percent_PEG_P Parameter: Treatment Value: 20percent PEG vs. No Treatment
  misc_feature: MA Experiment ID: 108542 Result: Up-regulated in Transcription
  misc_feature: MA Experiment 108542 PARAMETER Experiment Name: Zm_150mM_NaCl_P Parameter: Age (day) Value: 8
  misc_feature: MA Experiment 108542 PARAMETER Experiment Name: Zm_150mM_NaCl_P Parameter: Organism Value: Zea mays
  misc_feature: MA Experiment 108542 PARAMETER Experiment Name: Zm_150mM_NaCl_P Parameter: Plant Line Value: 35A19
  misc_feature: MA Experiment 108542 PARAMETER Experiment Name: Zm_150mM_NaCl_P Parameter: Timepoint (hr) Value: 6
  misc_feature: MA Experiment 108542 PARAMETER Experiment Name: Zm_150mM_NaCl_P Parameter: Tissue Value: Aerial
  misc_feature: MA Experiment 108542 PARAMETER Experiment Name: Zm_150mM_NaCl_P Parameter: Treatment Value: 150mM NaCl vs. No Treatment
  misc_feature: MA Experiment ID: 108543 Result: Up-regulated in Transcription
  misc_feature: MA Experiment ID: 108597 Result: Up-regulated in Transcription
  misc_feature: MA Experiment 108597 PARAMETER Experiment Name: Zm_100uM_ABA_P Parameter: Age (day) Value: 9
  misc_feature: MA Experiment 108597 PARAMETER Experiment Name: Zm_100uM_ABA_P Parameter: Organism Value: Zea mays
  misc_feature: MA Experiment 108597 PARAMETER Experiment Name: Zm_100uM_ABA_P Parameter: Plant Line Value: 35A19
  misc_feature: MA Experiment 108597 PARAMETER Experiment Name: Zm_100uM_ABA_P Parameter: Timepoint (hr) Value: 24
  misc_feature: MA Experiment 108597 PARAMETER Experiment Name: Zm_100uM_ABA_P Parameter: Tissue Value: Aerial
  misc_feature: MA Experiment 108597 PARAMETER Experiment Name: Zm_100uM_ABA_P Parameter: Treatment Value: 100uM ABA vs. No Treatment
  misc_feature: MA Experiment ID: 20000478 Result: Up-regulated in Transcription
  misc_feature: MA Experiment 20000478 PARAMETER Experiment Name: Zm_5mM_SA_P Parameter: Age (day) Value: 11
  misc_feature: MA Experiment 20000478 PARAMETER Experiment Name: Zm_5mM_SA_P Parameter: Organism Value: Zea mays
  misc_feature: MA Experiment 20000478 PARAMETER Experiment Name: Zm_5mM_SA_P Parameter: Plant Line Value: 35A19
  misc_feature: MA Experiment 20000478 PARAMETER Experiment Name: Zm_5mM_SA_P Parameter: Timepoint (hr) Value: 72
  misc_feature: MA Experiment 20000478 PARAMETER Experiment Name: Zm_5mM_SA_P Parameter: Tissue Value: Aerial
  misc_feature: MA Experiment 20000478 PARAMETER Experiment Name: Zm_5mM_SA_P Parameter: Treatment Value: 5mM SA vs. No Treatment
  misc_feature: MA Experiment ID: 20000480 Result: Up-regulated in Transcription
  misc_feature: MA Experiment 20000480 PARAMETER Experiment Name: Zm_Drought_P Parameter: Age (day) Value: 11
  misc_feature: MA Experiment 20000480 PARAMETER Experiment Name: Zm_Drought_P Parameter: Organism Value: Zea mays
  misc_feature: MA Experiment 20000480 PARAMETER Experiment Name: Zm_Drought_P Parameter: Plant Line Value: 35A19
  misc_feature: MA Experiment 20000480 PARAMETER Experiment Name: Zm_Drought_P Parameter: Timepoint (hr) Value: 72
  misc_feature: MA Experiment 20000480 PARAMETER Experiment Name: Zm_Drought_P Parameter: Tissue Value: Aerial
  misc_feature: MA Experiment 20000480 PARAMETER Experiment Name: Zm_Drought_P Parameter: Treatment Value: Drought vs. No Drought
  misc_feature: MA Experiment ID: 20000487 Result: Down-regulated in Transcription
  misc_feature: MA Experiment 20000487 PARAMETER Experiment Name: Zm_50mM_NH4NO3_L_to_H_P Parameter: Organism Value: Zea mays
  misc_feature: MA Experiment 20000487 PARAMETER Experiment Name: Zm_50mM_NH4NO3_L_to_H_P Parameter: Timepoint (hr) Value: 4
  misc_feature: MA Experiment 20000487 PARAMETER Experiment Name: Zm_50mM_NH4NO3_L_to_H_P Parameter: Tissue Value: Leaves
  misc_feature: MA Experiment 20000487 PARAMETER Experiment Name: Zm_50mM_NH4NO3_L_to_H_P Parameter: Treatment Value: 50mM NH4NO3 vs. 100mM Mannitol
  misc_feature: MA Experiment ID: 20000533 Result: Up-regulated in Transcription
  misc_feature: MA Experiment 20000533 PARAMETER Experiment Name: Zm_0.001percent_MeJA_P Parameter: Age (day) Value: 11
  misc_feature: MA Experiment 20000533 PARAMETER Experiment Name: Zm_0.001percent_MeJA_P Parameter: Organism Value: Zea mays
  misc_feature: MA Experiment 20000533 PARAMETER Experiment Name: Zm_0.001percent_MeJA_P Parameter: Plant Line Value: 35A19
  misc_feature: MA Experiment 20000533 PARAMETER Experiment Name: Zm_0.001percent_MeJA_P Parameter: Timepoint (hr) Value: 72
  misc_feature: MA Experiment 20000533 PARAMETER Experiment Name: Zm_0.001percent_MeJA_P Parameter: Tissue Value: Aerial
  misc_feature: MA Experiment 20000533 PARAMETER Experiment Name: Zm_0.001percent_MeJA_P Parameter: Treatment Value: 0.001percent MeJA vs. No Treatment
  misc_feature: MA Experiment ID: 20000535 Result: Down-regulated in Transcription
  misc_feature: MA Experiment 20000535 PARAMETER Experiment Name: Zm_Hybrid_Seed_Dev_P Parameter: DAP Value: 30 vs. 12
  misc_feature: MA Experiment 20000535 PARAMETER Experiment Name: Zm_Hybrid_Seed_Dev_P Parameter: Organism Value: Zea mays
  misc_feature: MA Experiment 20000535 PARAMETER Experiment Name: Zm_Hybrid_Seed_Dev_P Parameter: Plant Line Value: 35A19
  misc_feature: MA Experiment 20000535 PARAMETER Experiment Name: Zm_Hybrid_Seed_Dev_P Parameter: Tissue Value: Embryo vs. Unfert Floret
  misc_feature: MA Experiment ID: 20000626 Result: Up-regulated in Transcription
  misc_feature: MA Experiment 20000626 PARAMETER Experiment Name: Zm_Herbicide-Treatments_P Parameter: Timepoint (hr) Value: 12
  misc_feature: MA Experiment 20000626 PARAMETER Experiment Name: Zm_Herbicide-Treatments_P Parameter: Tissue Value: Aerial
  misc_feature: MA Experiment 20000626 PARAMETER Experiment Name: Zm_Herbicide-Treatments_P Parameter: Treatment Value: Roundup vs. No Treatment
  misc_feature: MA Experiment ID: 20001610 Result: Down-regulated in Transcription
  misc_feature: MA Experiment 20001610 PARAMETER Experiment Name: Zm_50ppm_KNO3_L-to-H_P Parameter: Age (day) Value: 19
  misc_feature: MA Experiment 20001610 PARAMETER Experiment Name: Zm_50ppm_KNO3_L-to-H_P Parameter: Organism Value: Zea mays
  misc_feature: MA Experiment 20001610 PARAMETER Experiment Name: Zm_50ppm_KNO3_L-to-H_P Parameter: Plant Line Value: 35A19
  misc_feature: MA Experiment 20001610 PARAMETER Experiment Name: Zm_50ppm_KNO3_L-to-H_P Parameter: Timepoint (hr) Value: 2
  misc_feature: MA Experiment 20001610 PARAMETER Experiment Name: Zm_50ppm_KNO3_L-to-H_P Parameter: Tissue Value: Roots
  misc_feature: MA Experiment 20001610 PARAMETER Experiment Name: Zm_50ppm_KNO3_L-to-H_P Parameter: Treatment Value: 50ppm KNO3 vs. 50ppm KCl
agccagacgcagaccccctgcctgttgccctgtcgcagtctagcatcaggcatccatcggcgagagcgagagcgagagcgtttcgcagcaagcctacctcacctcaccttgcctgcctgtctgtctgtctccagagctgctcttgtccggagacggagccgactgaacatggccggagacccgggggacgcgccggaggtgggaggcggcggcatacgctccgtgctcaccacggcctcgctcgtcgctccctccggggacgaggttcagtttcgggagatcgacggcaagatcatcggcctctacttcgcggcaaactggtatccgaaatgcgaggctttcaccccggtgctggccgcggcgtacgagcagctcaaggagcgcggcgccggcttcgaggtcgtgctggtgtcgtgcgacgaggaccggccgtcgttcgagcggttccacggaaccatgccgtggccagcggtgcctttcggcgacctcagctgcaagaagcgcctcagcgagaggttccaggtggagggcatcccgcgcctggtggtgctcgctccggacggcggcgcggtggtacacccggacgccgccgacctcgtgcaccgctacggcgagagggcgttcccgttcacggccgcgagggtggcggagctggaggcggatgaccagcgcaagtacgcgtcccagacgctggagaagctcttctccgtcagcgggaaagagtacgtgatgaacagtggtaataatgaaaaggttccggtctcgagcctggtggggaagacggtggggctctacttctcggctaaccattgcgcgccgtgtatcaagttcacgacgaagctggcggccatctacagcagcctcaggggcaaggcggaggacttcgagatcgtgtacgtccccatggacagggaggaggacgggtacctgcgctcctgcggcgacatgccgtggctggcgctcccctacgacggcgcgccgtcgcgcgcgctggcgaggtacttcgacgtgcgggagatcccgacgctggtggtggtcgggcccgacggcaggacggtgacgcgggacggccggaacctggtgaacctctacttcgacatggccttcccgttcacggacgcgcagatcaggctgctgcaggaggcggaggacgaggcggccaaggagtacccgcggtcgctgcgccaccggggccaccgccacgagctcagcatcgtgtcggagaagtccgggggagggccctacatctgctgcgagtgcgaggagcagggactcggctgggcgtaccagtgcatcgcctgcggctacgagatacacctcaggtgcggccagaatgcggagggcggcagcgcaggaactgcttagctagctaggcgacggcagcataacagcatcactggagtactggtgtctacctactagactgctgcatgcgtattggacttgtgcatggtctgtgtttgatcccaacaaacgtcagcttgctaagtctgatgctaaagtagtcaaatagatagatgagaaatgcatggccttccttgtaaggcttagtaggtggttagatgagtgaacaacaaaatgaagctgcagcaatcaatctactgtggcaggtgttatgcaaatcttgctgcactgcccaaccaaactactgcattttccagtgcgccttcttcgagcctaatttgacaccactgaaattaggcttt

SEQ ID NO: 7135 - protein, 454 aa, Zea mays subsp. mays
  peptide (1)..(454): Ceres Seq. ID no. 13498598
  misc_feature (99)..(135): Pfam Name: Thioredoxin Pfam Description: Thioredoxin
  misc_feature (59)..(410): Homolog of NCBI NO: 38567893 NR Description: OSJNBa0060N03.13 [Oryza sativa (japonica
  misc_feature (252)..(448): Homolog of NCBI NO: 34908848 NR Description: PDI-like protein [Oryza sativa (japonica
  misc_feature (72)..(445): Homolog of NCBI NO: 21592996 NR Description: PDI-like protein [Arabidopsis thaliana]
  misc_feature (88)..(254): Homolog of NCBI NO: 34908844 NR Description: PDI-like protein [Oryza sativa (japonica
  misc_feature (63)..(411): Homolog of NCBI NO: 4056568 NR Description: PDI-like protein [Zea mays]
  misc_feature (81)..(389): Homolog of NCBI NO: 23304737 NR Description: PDI-like protein [Quercus suber]
  misc_feature (65)..(447): Homolog of NCBI NO: 18417767 NR Description: receptor kinase -related [Arabidopsis thaliana] unknown protein [Arabidopsis thaliana]
  misc_feature (72)..(447): Homolog of NCBI NO: 4056568 NR Description: PDI-like protein [Zea mays]
  misc_feature (69)..(447): Homolog of NCBI NO: 18406743 NR Description: expressed protein [Arabidopsis thaliana]
  misc_feature (81)..(411): Homolog of NCBI NO: 18406743 NR Description: expressed protein [Arabidopsis thaliana]
SQTQTPCLLPCRSLASGIHRRERERERFAASLPHLTLPACLSVSRAALVRRRSRLNMAGDPGDAPEVGGGGIRSVLTTASLVAPSGDEVQFREIDGKIIGLYFAANWYPKCEAFTPVLAAAYEQLKERGAGFEVVLVSCDEDRPSFERFHGTMPWPAVPFGDLSCKKRLSERFQVEGIPRLVVLAPDGGAVVHPDAADLVHRYGERAFPFTAARVAELEADDQRKYASQTLEKLFSVSGKEYVMNSGNNEKVPVSSLVGKTVGLYFSANHCAPCIKFTTKLAAIYSSLRGKAEDFEIVYVPMDREEDGYLRSCGDMPWLALPYDGAPSRALARYFDVREIPTLVVVGPDGRTVTRDGRNLVNLYFDMAFPFTDAQIRLLQEAEDEAAKEYPRSLRHRGHRHELSIVSEKSGGGPYICCECEEQGLGWAYQCIACGYEIHLRCGQNAEGGSAGTA

SEQ ID NO: 7136 - protein, 398 aa, Zea mays subsp. mays
  peptide (1)..(398): Ceres Seq. ID no. 13498599
  misc_feature (43)..(79): Pfam Name: Thioredoxin Pfam Description: Thioredoxin
  misc_feature (196)..(392): Homolog of NCBI NO: 34908848 NR Description: PDI-like protein [Oryza sativa (japonica
  misc_feature (13)..(391): Homolog of NCBI NO: 18406743 NR Description: expressed protein [Arabidopsis thaliana]
  misc_feature (16)..(389): Homolog of NCBI NO: 21592996 NR Description: PDI-like protein [Arabidopsis thaliana]
  misc_feature (16)..(391): Homolog of NCBI NO: 4056568 NR Description: PDI-like protein [Zea mays]
  misc_feature (32)..(198): Homolog of NCBI NO: 34908844 NR Description: PDI-like protein [Oryza sativa (japonica
  misc_feature (9)..(391): Homolog of NCBI NO: 18417767 NR Description: receptor kinase -related [Arabidopsis thaliana] unknown protein [Arabidopsis thaliana]
  misc_feature (7)..(355): Homolog of NCBI NO: 4056568 NR Description: PDI-like protein [Zea mays]
  misc_feature (25)..(333): Homolog of NCBI NO: 23304737 NR Description: PDI-like protein [Quercus suber]
  misc_feature (3)..(354): Homolog of NCBI NO: 38567893 NR Description: OSJNBa0060N03.13 [Oryza sativa (japonica
  misc_feature (25)..(355): Homolog of NCBI NO: 18406743 NR Description: expressed protein [Arabidopsis thaliana]
MAGDPGDAPEVGGGGIRSVLTTASLVAPSGDEVQFREIDGKIIGLYFAANWYPKCEAFTPVLAAAYEQLKERGAGFEVVLVSCDEDRPSFERFHGTMPWPAVPFGDLSCKKRLSERFQVEGIPRLVVLAPDGGAVVHPDAADLVHRYGERAFPFTAARVAELEADDQRKYASQTLEKLFSVSGKEYVMNSGNNEKVPVSSLVGKTVGLYFSANHCAPCIKFTTKLAAIYSSLRGKAEDFEIVYVPMDREEDGYLRSCGDMPWLALPYDGAPSRALARYFDVREIPTLVVVGPDGRTVTRDGRNLVNLYFDMAFPFTDAQIRLLQEAEDEAAKEYPRSLRHRGHRHELSIVSEKSGGGPYICCECEEQGLGWAYQCIACGYEIHLRCGQNAEGGSAGTA

SEQ ID NO: 7137 - protein, 302 aa, Zea mays subsp. mays
  peptide (1)..(302): Ceres Seq. ID no. 13498600
  misc_feature (110)..(147): Pfam Name: Thioredoxin Pfam Description: Thioredoxin
  misc_feature (100)..(296): Homolog of NCBI NO: 34908848 NR Description: PDI-like protein [Oryza sativa (japonica
  misc_feature (1)..(295): Homolog of NCBI NO: 18406743 NR Description: expressed protein [Arabidopsis thaliana]
  misc_feature (1)..(293): Homolog of NCBI NO: 21592996 NR Description: PDI-like protein [Arabidopsis thaliana]
  misc_feature (1)..(295): Homolog of NCBI NO: 4056568 NR Description: PDI-like protein [Zea mays]
  misc_feature (1)..(102): Homolog of NCBI NO: 34908844 NR Description: PDI-like protein [Oryza sativa (japonica
  misc_feature (1)..(295): Homolog of NCBI NO: 18417767 NR Description: receptor kinase -related [Arabidopsis thaliana] unknown protein [Arabidopsis thaliana]
  misc_feature (1)..(259): Homolog of NCBI NO: 4056568 NR Description: PDI-like protein [Zea mays]
  misc_feature (1)..(237): Homolog of NCBI NO: 23304737 NR Description: PDI-like protein [Quercus suber]
  misc_feature (1)..(258): Homolog of NCBI NO: 38567893 NR Description: OSJNBa0060N03.13 [Oryza sativa (japonica
  misc_feature (1)..(259): Homolog of NCBI NO: 18406743 NR Description: expressed protein [Arabidopsis thaliana]
MPWPAVPFGDLSCKKRLSERFQVEGIPRLVVLAPDGGAVVHPDAADLVHRYGERAFPFTAARVAELEADDQRKYASQTLEKLFSVSGKEYVMNSGNNEKVPVSSLVGKTVGLYFSANHCAPCIKFTTKLAAIYSSLRGKAEDFEIVYVPMDREEDGYLRSCGDMPWLALPYDGAPSRALARYFDVREIPTLVVVGPDGRTVTRDGRNLVNLYFDMAFPFTDAQIRLLQEAEDEAAKEYPRSLRHRGHRHELSIVSEKSGGGPYICCECEEQGLGWAYQCIACGYEIHLRCGQNAEGGSAGTA

SEQ ID NO: 7138 - DNA, 929 bp, Zea mays subsp. mays
  misc_feature (1)..(929): Ceres Seq. ID no. 12345359
  misc_feature: MA Experiment ID: 108529 Result: Up-regulated in Transcription
  misc_feature: MA Experiment 108529 PARAMETER Experiment Name: Zm_Imbibed_Seeds_P Parameter: Age (day) Value: 5 vs. 2
  misc_feature: MA Experiment 108529 PARAMETER Experiment Name: Zm_Imbibed_Seeds_P Parameter: Organism Value: Zea mays
  misc_feature: MA Experiment 108529 PARAMETER Experiment Name: Zm_Imbibed_Seeds_P Parameter: Plant Line Value: 35A19
  misc_feature: MA Experiment 108529 PARAMETER Experiment Name: Zm_Imbibed_Seeds_P Parameter: Tissue Value: Roots vs. Embryo
  misc_feature: MA Experiment ID: 108535 Result: Down-regulated in Transcription
  misc_feature: MA Experiment 108535 PARAMETER Experiment Name: Zm_Meristem_P Parameter: Age (day) Value: 8
  misc_feature: MA Experiment 108535 PARAMETER Experiment Name: Zm_Meristem_P Parameter: Organism Value: Zea mays
  misc_feature: MA Experiment 108535 PARAMETER Experiment Name: Zm_Meristem_P Parameter: Plant Line Value: 35A19
  misc_feature: MA Experiment 108535 PARAMETER Experiment Name: Zm_Meristem_P Parameter: Tissue Value: Root Meristem vs. Above Root Meristem
  misc_feature: MA Experiment ID: 108543 Result: Up-regulated in Transcription
  misc_feature: MA Experiment ID: 108544 Result: Up-regulated in Transcription
  misc_feature: MA Experiment ID: 108546 Result: Up-regulated in Transcription
  misc_feature: MA Experiment 108546 PARAMETER Experiment Name: Zm_Imbibed_Seeds_P Parameter: Age (day) Value: 3 vs. 2
  misc_feature: MA Experiment 108546 PARAMETER Experiment Name: Zm_Imbibed_Seeds_P Parameter: Organism Value: Zea mays
  misc_feature: MA Experiment 108546 PARAMETER Experiment Name: Zm_Imbibed_Seeds_P Parameter: Plant Line Value: 35A19
  misc_feature: MA Experiment 108546 PARAMETER Experiment Name: Zm_Imbibed_Seeds_P Parameter: Tissue Value: Roots vs. Embryo
  misc_feature: MA Experiment ID: 20000108 Result: Down-regulated in Transcription
  misc_feature: MA Experiment 20000108 PARAMETER Experiment Name: Zm_Root-Tips_P Parameter: Age (day) Value: 12
  misc_feature: MA Experiment 20000108 PARAMETER Experiment Name: Zm_Root-Tips_P Parameter: Organism Value: Zea mays
  misc_feature: MA Experiment 20000108 PARAMETER Experiment Name: Zm_Root-Tips_P Parameter: Tissue Value: Root tips vs. Root mid region    35
  misc_feature: MA Experiment 20000108 PARAMETER Experiment Name: Zm_Root-Tips_P Parameter: Tissue Value: Root tips vs. Root mid region   Sequence Listing-Misc Features (4)
  misc_feature: MA Experiment ID: 20000477 Result: Up-regulated in Transcription
  misc_feature: MA Experiment 20000477 PARAMETER Experiment Name: Zm_5mM_SA_P Parameter: Age (day) Value: 10
  misc_feature: MA Experiment 20000477 PARAMETER Experiment Name: Zm_5mM_SA_P Parameter: Organism Value: Zea mays
  misc_feature: MA Experiment 20000477 PARAMETER Experiment Name: Zm_5mM_SA_P Parameter: Plant Line Value: 35A19
  misc_feature: MA Experiment 20000477 PARAMETER Experiment Name: Zm_5mM_SA_P Parameter: Timepoint (hr) Value: 48
  misc_feature: MA Experiment 20000477 PARAMETER Experiment Name: Zm_5mM_SA_P Parameter: Tissue Value: Aerial
  misc_feature: MA Experiment 20000477 PARAMETER Experiment Name: Zm_5mM_SA_P Parameter: Treatment Value: 5mM SA vs. No Treatment
  misc_feature: MA Experiment ID: 20000478 Result: Up-regulated in Transcription
  misc_feature: MA Experiment 20000478 PARAMETER Experiment Name: Zm_5mM_SA_P Parameter: Age (day) Value: 11
  misc_feature: MA Experiment 20000478 PARAMETER Experiment Name: Zm_5mM_SA_P Parameter: Organism Value: Zea mays
  misc_feature: MA Experiment 20000478 PARAMETER Experiment Name: Zm_5mM_SA_P Parameter: Plant Line Value: 35A19
  misc_feature: MA Experiment 20000478 PARAMETER Experiment Name: Zm_5mM_SA_P Parameter: Timepoint (hr) Value: 72
  misc_feature: MA Experiment 20000478 PARAMETER Experiment Name: Zm_5mM_SA_P Parameter: Tissue Value: Aerial
  misc_feature: MA Experiment 20000478 PARAMETER Experiment Name: Zm_5mM_SA_P Parameter: Treatment Value: 5mM SA vs. No Treatment
  misc_feature: MA Experiment ID: 20000492 Result: Down-regulated in Transcription
  misc_feature: MA Experiment 20000492 PARAMETER Experiment Name: Zm_Hybrid_Seed_Dev_P Parameter: DAP Value: 12
  misc_feature: MA Experiment 20000492 PARAMETER Experiment Name: Zm_Hybrid_Seed_Dev_P Parameter: Organism Value: Zea mays
  misc_feature: MA Experiment 20000492 PARAMETER Experiment Name: Zm_Hybrid_Seed_Dev_P Parameter: Plant Line Value: 35A19
  misc_feature: MA Experiment 20000492 PARAMETER Experiment Name: Zm_Hybrid_Seed_Dev_P Parameter: Tissue Value: Fert Kernel vs. Unfert Floret
  misc_feature: MA Experiment ID: 20000534 Result: Down-regulated in Transcription
  misc_feature: MA Experiment 20000534 PARAMETER Experiment Name: Zm_Hybrid_Pollen_P Parameter: Age (day) Value: 8
  misc_feature: MA Experiment 20000534 PARAMETER Experiment Name: Zm_Hybrid_Pollen_P Parameter: Organism Value: Zea mays
  misc_feature: MA Experiment 20000534 PARAMETER Experiment Name: Zm_Hybrid_Pollen_P Parameter: Plant Line Value: 35A19
  misc_feature: MA Experiment 20000534 PARAMETER Experiment Name: Zm_Hybrid_Pollen_P Parameter: Tissue Value: Pollen vs. Aerial
atactcaaggcaaggaattaggagcagaccggagacttgggggcttcacctgctgtatctcattaccatctgcatctggttgcccgttgattgagaaggaggagctgagggccatggcgaccgagaagcccatcctgtacaacgcctggatcagctcctgctcccaccgtgttcgcatcgcactcaacctcaaaggtgtggattacgagtacaagtcggtaaaccctaggacagatccagattatgaaaaaatcaatccaatcaaatatattccagcattagtagatggggacatagtcgtttctgattctcttgccatctcattgtatttggaagataagtatcctgagcatccactcctgcctaaagatctcaagaggaaagctcttaatcttcagattgcaaacattgtttgttcaagcattcaacctcttcaaggctatgctgttattggtctgcacgagggtaggatgagcccagatgagggccttcatattgttcaaagttatattgacaagggattcagagcgatcgaaaagctgttggaaggatgtgagagtaaatatgctactggagatgatgtccaattggcagatgtgttccttgaaccacagatacatgccggcataaatcgcttccaaatcgatatgtcgatgtacccaatcttggagaggctccatgatgcatacatgcaaattcccgcattccaagccgcgcttcctaaaaatcaaccagacgcaccttcatcataatcatcaagattatctcaataatttgcatgtcattttgtaataatttggatagggagccactgcttcctccatcccgttgtggatcaaaagggtgaacgattggcacttacctgcatggtccaatacctattatatttcttaaacagatactatttacggctattgtaatttaagccc

SEQ ID NO: 7139 - protein, 249 aa, Zea mays subsp. mays
  peptide (1)..(249): Ceres Seq. ID no. 12345360
  misc_feature (38)..(249): Homolog of NCBI NO: 11385487 NR Description: glutathione S-transferase GST 18 [Zea mays]
  misc_feature (38)..(248): Homolog of NCBI NO: 15430707 NR Description: putative glutathione S-transferase OsGSTZ2 [Oryza
  misc_feature (38)..(249): Homolog of NCBI NO: 11132027 NR Description: Glutathione S-transferase (GST class-zeta)
  misc_feature (35)..(249): Homolog of NCBI NO: 11177839 NR Description: putative glutathione S-transferase OsGSTZ1 [Oryza
  misc_feature (45)..(249): Homolog of NCBI NO: 29420155 NR Description: glutathione S-transferase Z1 [Malva pusilla]
  misc_feature (44)..(249): Homolog of NCBI NO: 11385485 NR Description: glutathione S-transferase GST 17 [Zea mays]
  misc_feature (45)..(248): Homolog of NCBI NO: 11132235 NR Description: Glutathione S-transferase zeta class
  misc_feature (41)..(249): Homolog of NCBI NO: 15226952 NR Description: glutathione transferase, putative; protein id: supported by cDNA: gi_11095997, supported by cDNA: gi_15450462, by cDNA: gi_16974448 [Arabidopsis thaliana]
  misc_feature (41)..(249): Homolog of NCBI NO: 28932694 NR Description: glutathione S-transferase zeta [Brassica napus]
  misc_feature (40)..(248): Homolog of NCBI NO: 24061762 NR Description: glutathione S-transferase [Capsicum annuum]
TQGKELGADRRLGGFTCCISLPSASGCPLIEKEELRAMATEKPILYNAWISSCSHRVRIALNLKGVDYEYKSVNPRTDPDYEKINPIKYIPALVDGDIVVSDSLAISLYLEDKYPEHPLLPKDLKRKALNLQIANIVCSSIQPLQGYAVIGLHEGRMSPDEGLHIVQSYIDKGFRAIEKLLEGCESKYATGDDVQLADVFLEPQIHAGINRFQIDMSMYPILERLHDAYMQIPAFQAALPKNQPDAPSS

SEQ ID NO: 7140 - protein, 212 aa, Zea mays subsp. mays
  peptide (1)..(212): Ceres Seq. ID no. 12345361
  misc_feature (1)..(212): Homolog of NCBI NO: 11385487 NR Description: glutathione S-transferase GST 18 [Zea mays]
  misc_feature (1)..(211): Homolog of NCBI NO: 15430707 NR Description: putative glutathione S-transferase OsGSTZ2 [Oryza
  misc_feature (1)..(212): Homolog of NCBI NO: 11132027 NR Description: Glutathione S-transferase (GST class-zeta)
  misc_feature (1)..(212): Homolog of NCBI NO: 11177839 NR Description: putative glutathione S-transferase OsGSTZ1 [Oryza
  misc_feature (8)..(212): Homolog of NCBI NO: 29420155 NR Description: glutathione S-transferase Z1 [Malva pusilla]
  misc_feature (7)..(212): Homolog of NCBI NO: 11385485 NR Description: glutathione S-transferase GST 17 [Zea mays]
  misc_feature (8)..(211): Homolog of NCBI NO: 11132235 NR Description: Glutathione S-transferase zeta class
  misc_feature (4)..(212): Homolog of NCBI NO: 15226952 NR Description: glutathione transferase, putative; protein id: supported by cDNA: gi_11095997, supported by cDNA: gi_15450462, by cDNA: gi_16974448 [Arabidopsis thaliana]
  misc_feature (4)..(212): Homolog of NCBI NO: 28932694 NR Description: glutathione S-transferase zeta [Brassica napus]
  misc_feature (3)..(211): Homolog of NCBI NO: 24061762 NR Description: glutathione S-transferase [Capsicum annuum]
MATEKPILYNAWISSCSHRVRIALNLKGVDYEYKSVNPRTDPDYEKINPIKYIPALVDGDIVVSDSLAISLYLEDKYPEHPLLPKDLKRKALNLQIANIVCSSIQPLQGYAVIGLHEGRMSPDEGLHIVQSYIDKGFRAIEKLLEGCESKYATGDDVQLADVFLEPQIHAGINRFQIDMSMYPILERLHDAYMQIPAFQAALPKNQPDAPSS

SEQ ID NO: 7141 - DNA, 994 bp, Zea mays subsp. mays
  misc_feature (1)..(994): Ceres Seq. ID no. 12435085
  misc_feature: MA Experiment ID: 108522 Result: Up-regulated in Transcription
  misc_feature: MA Experiment 108522 PARAMETER Experiment Name: Zm_42deg_Heat_P Parameter: Age (day) Value: 8
  misc_feature: MA Experiment 108522 PARAMETER Experiment Name: Zm_42deg_Heat_P Parameter: Organism Value: Zea mays
  misc_feature: MA Experiment 108522 PARAMETER Experiment Name: Zm_42deg_Heat_P Parameter: Plant Line Value: 35A19
  misc_feature: MA Experiment 108522 PARAMETER Experiment Name: Zm_42deg_Heat_P Parameter: Temperature (deg C) Value: 42 vs. 22
  misc_feature: MA Experiment 108522 PARAMETER Experiment Name: Zm_42deg_Heat_P Parameter: Timepoint (hr) Value: 1
  misc_feature: MA Experiment 108522 PARAMETER Experiment Name: Zm_42deg_Heat_P Parameter: Tissue Value: Aerial
  misc_feature: MA Experiment ID: 108528 Result: Down-regulated in Transcription
  misc_feature: MA Experiment 108528 PARAMETER Experiment Name: Zm_Imbibed_Seeds_P Parameter: Age (day) Value: 5 vs. 2
  misc_feature: MA Experiment 108528 PARAMETER Experiment Name: Zm_Imbibed_Seeds_P Parameter: Organism Value: Zea mays
  misc_feature: MA Experiment 108528 PARAMETER Experiment Name: Zm_Imbibed_Seeds_P Parameter: Plant Line Value: 35A19
  misc_feature: MA Experiment 108528 PARAMETER Experiment Name: Zm_Imbibed_Seeds_P Parameter: Tissue Value: Aerial vs. Embryo
  misc_feature: MA Experiment ID: 108530 Result: Down-regulated in Transcription
  misc_feature: MA Experiment 108530 PARAMETER Experiment Name: Zm_Imbibed_Seeds_P Parameter: Age (day) Value: 6 vs. 2
  misc_feature: MA Experiment 108530 PARAMETER Experiment Name: Zm_Imbibed_Seeds_P Parameter: Organism Value: Zea mays
  misc_feature: MA Experiment 108530 PARAMETER Experiment Name: Zm_Imbibed_Seeds_P Parameter: Plant Line Value: 35A19
  misc_feature: MA Experiment 108530 PARAMETER Experiment Name: Zm_Imbibed_Seeds_P Parameter: Tissue Value: Aerial vs. Embryo
  misc_feature: MA Experiment ID: 108535 Result: Down-regulated in Transcription
  misc_feature: MA Experiment 108535 PARAMETER Experiment Name: Zm_Meristem_P Parameter: Age (day) Value: 8
  misc_feature: MA Experiment 108535 PARAMETER Experiment Name: Zm_Meristem_P Parameter: Organism Value: Zea mays
  misc_feature: MA Experiment 108535 PARAMETER Experiment Name: Zm_Meristem_P Parameter: Plant Line Value: 35A19
  misc_feature: MA Experiment 108535 PARAMETER Experiment Name: Zm_Meristem_P Parameter: Tissue Value: Root Meristem vs. Above Root Meristem
  misc_feature: MA Experiment ID: 108536 Result: Up-regulated in Transcription
  misc_feature: MA Experiment 108536 PARAMETER Experiment Name: Zm_Meristem_P Parameter: Age (day) Value: 8
  misc_feature: MA Experiment 108536 PARAMETER Experiment Name: Zm_Meristem_P Parameter: Organism Value: Zea mays
  misc_feature: MA Experiment 108536 PARAMETER Experiment Name: Zm_Meristem_P Parameter: Plant Line Value: 35A19
  misc_feature: MA Experiment 108536 PARAMETER Experiment Name: Zm_Meristem_P Parameter: Tissue Value: Shoot Meristem vs. Above Shoot Meristem
  misc_feature: MA Experiment ID: 108547 Result: Down-regulated in Transcription
  misc_feature: MA Experiment 108547 PARAMETER Experiment Name: Zm_Imbibed_Seeds_P Parameter: Age (day) Value: 4 vs. 2
  misc_feature: MA Experiment 108547 PARAMETER Experiment Name: Zm_Imbibed_Seeds_P Parameter: Organism Value: Zea mays
  misc_feature: MA Experiment 108547 PARAMETER Experiment Name: Zm_Imbibed_Seeds_P Parameter: Plant Line Value: 35A19
  misc_feature: MA Experiment 108547 PARAMETER Experiment Name: Zm_Imbibed_Seeds_P Parameter: Tissue Value: Aerial vs. Embryo
  misc_feature: MA Experiment ID: 20000108 Result: Down-regulated in Transcription
  misc_feature: MA Experiment 20000108 PARAMETER Experiment Name: Zm_Root-Tips_P Parameter: Age (day) Value: 12
  misc_feature: MA Experiment 20000108 PARAMETER Experiment Name: Zm_Root-Tips_P Parameter: Organism Value: Zea mays
  misc_feature: MA Experiment 20000108 PARAMETER Experiment Name: Zm_Root-Tips_P Parameter: Tissue Value: Root tips vs. Root mid region    35
  misc_feature: MA Experiment 20000108 PARAMETER Experiment Name: Zm_Root-Tips_P Parameter: Tissue Value: Root tips vs. Root mid region   Sequence Listing-Misc Features (4)
  misc_feature: MA Experiment ID: 20001606 Result: Up-regulated in Transcription
  misc_feature: MA Experiment 20001606 PARAMETER Experiment Name: Zm_50ppm_KNO3_L-to-H_P Parameter: Age (day) Value: 19
  misc_feature: MA Experiment 20001606 PARAMETER Experiment Name: Zm_50ppm_KNO3_L-to-H_P Parameter: Organism Value: Zea mays
  misc_feature: MA Experiment 20001606 PARAMETER Experiment Name: Zm_50ppm_KNO3_L-to-H_P Parameter: Plant Line Value: 35A19
  misc_feature: MA Experiment 20001606 PARAMETER Experiment Name: Zm_50ppm_KNO3_L-to-H_P Parameter: Timepoint (hr) Value: 8
  misc_feature: MA Experiment 20001606 PARAMETER Experiment Name: Zm_50ppm_KNO3_L-to-H_P Parameter: Tissue Value: Shoots
  misc_feature: MA Experiment 20001606 PARAMETER Experiment Name: Zm_50ppm_KNO3_L-to-H_P Parameter: Treatment Value: 50ppm KNO3 vs. 50ppm KCl
  misc_feature: MA Experiment ID: 20001610 Result: Up-regulated in Transcription
  misc_feature: MA Experiment 20001610 PARAMETER Experiment Name: Zm_50ppm_KNO3_L-to-H_P Parameter: Age (day) Value: 19
  misc_feature: MA Experiment 20001610 PARAMETER Experiment Name: Zm_50ppm_KNO3_L-to-H_P Parameter: Organism Value: Zea mays
  misc_feature: MA Experiment 20001610 PARAMETER Experiment Name: Zm_50ppm_KNO3_L-to-H_P Parameter: Plant Line Value: 35A19
  misc_feature: MA Experiment 20001610 PARAMETER Experiment Name: Zm_50ppm_KNO3_L-to-H_P Parameter: Timepoint (hr) Value: 2
  misc_feature: MA Experiment 20001610 PARAMETER Experiment Name: Zm_50ppm_KNO3_L-to-H_P Parameter: Tissue Value: Roots
  misc_feature: MA Experiment 20001610 PARAMETER Experiment Name: Zm_50ppm_KNO3_L-to-H_P Parameter: Treatment Value: 50ppm KNO3 vs. 50ppm KCl
  misc_feature: MA Experiment ID: 20001612 Result: Up-regulated in Transcription
  misc_feature: MA Experiment 20001612 PARAMETER Experiment Name: Zm_50ppm_KNO3_L-to-H_P Parameter: Age (day) Value: 19
  misc_feature: MA Experiment 20001612 PARAMETER Experiment Name: Zm_50ppm_KNO3_L-to-H_P Parameter: Organism Value: Zea mays
  misc_feature: MA Experiment 20001612 PARAMETER Experiment Name: Zm_50ppm_KNO3_L-to-H_P Parameter: Plant Line Value: 35A19
  misc_feature: MA Experiment 20001612 PARAMETER Experiment Name: Zm_50ppm_KNO3_L-to-H_P Parameter: Timepoint (hr) Value: 8
  misc_feature: MA Experiment 20001612 PARAMETER Experiment Name: Zm_50ppm_KNO3_L-to-H_P Parameter: Tissue Value: Roots
  misc_feature: MA Experiment 20001612 PARAMETER Experiment Name: Zm_50ppm_KNO3_L-to-H_P Parameter: Treatment Value: 50ppm KNO3 vs. 50ppm KCl
atctacacacgccgttcccaagtcccaaccgaacacacacagcaacagcggccacctgccgctcagtgcgtgcgccgtgccatgaccatgaagctcgatgccccggcgaggcagaagagccaggacgcagagcagaacggcaggacagcggccgcgggcgtcctcggcattgacgagccgtggagccagccgaaactccgtctcaccggccacgcgcaggccgacgccgacgccctggtgccgccgctcaacttcgccatggtcgacgacggcatcttccgctcgggcctcccggacgccggcagcttccgcttcctgctctccctcaatctgcgctccgtcgtgtacctgtgcccggagccgtacccggaggagaacgcgcggttcctgcagcagaacgggatccagcttcaccagttcggcatcgaagggagcaagagtggttcgacagtgccggatgccatggtggtgcaggaaccattcgtctacatccctgaagagaccatccgagaggcgctcaaagttattcttgacgcaagaaaccagccggtgctcatccactgcaagagaggcaagcatcgcactggctgcgtcgtcgggtgcctgaggaagctgcagaagtggtgcctgtcttcggtgttcgacgagtacctgcacttcgcggcggcgaaggcgaggagcactgaccagaggttcatggagctgttcgacgcttcgagcttgacgcacctggcggcctcacagtattgagcgctgaccagagcgagtggctcccgaccggtcccgatcctgcaaccatgctgcatcaagcaagcgattttcccctgctgtttccgaagcaactcggccgagaataatgctgctggaaccatgagtgtgtccgcgagaattgataggcaatggccttaggttttgttgtgtgagtgctgtggttgcttcgtgtgcaactgatttcagattctgaattggtgatggctgtgattggtgatggccg

SEQ ID NO: 7142 - protein, 249 aa, Zea mays subsp. mays
  peptide (1)..(249): Ceres Seq. ID no. 12435086
  misc_feature (79)..(247): Pfam Name: Tyrosine phosphatase family Pfam Description: Tyrosine phosphatase family
  misc_feature (79)..(247): Homolog of NCBI NO: 15220383 NR Description: unkown protein; protein id: At1g05000.1
  misc_feature (24)..(147): Homolog of NCBI NO: 30102538 NR Description: At2g32960 [Arabidopsis thaliana]
  misc_feature (132)..(247): Homolog of NCBI NO: 30102538 NR Description: At2g32960 [Arabidopsis thaliana]
  misc_feature (79)..(247): Homolog of NCBI NO: 15225761 NR Description: unknown protein; protein id: At2g32960.1
  misc_feature (77)..(247): Homolog of NCBI NO: 18412419 NR Description: putative protein; protein id: At4g03960.1, by cDNA: 26983., supported by cDNA: gi_15810021, supported by gi_17981660 [Arabidopsis thaliana] >gi|15810022|gb|AAL06938.1|
  misc_feature (75)..(241): Homolog of NCBI NO: 15232985 NR Description: unknown protein; protein id: At3g02800.1 thaliana] >gi|6728982|gb|AAF26980.1|AC018363_25 unknown protein
  misc_feature (77)..(174): Homolog of NCBI NO: 7487406 NR Description: hypothetical protein T24M8.4 - Arabidopsis
  misc_feature (192)..(247): Homolog of NCBI NO: 7487406 NR Description: hypothetical protein T24M8.4 - Arabidopsis
  misc_feature (75)..(241): Homolog of NCBI NO: 21553927 NR Description: unknown [Arabidopsis thaliana]
  misc_feature (75)..(241): Homolog of NCBI NO: 15237359 NR Description: putative protein; protein id: At5g16480.1, by cDNA: 18232. [Arabidopsis thaliana] contains similarity to tyrosine phosphatase~gene_id:MQK4.21
IYTRRSQVPTEHTQQQRPPAAQCVRRAMTMKLDAPARQKSQDAEQNGRTAAAGVLGIDEPWSQPKLRLTGHAQADADALVPPLNFAMVDDGIFRSGLPDAGSFRFLLSLNLRSVVYLCPEPYPEENARFLQQNGIQLHQFGIEGSKSGSTVPDAMVVQEPFVYIPEETIREALKVILDARNQPVLIHCKRGKHRTGCVVGCLRKLQKWCLSSVFDEYLHFAAAKARSTDQRFMELFDASSLTHLAASQY

SEQ ID NO: 7143 - protein, 222 aa, Zea mays subsp. mays
  peptide (1)..(222): Ceres Seq. ID no. 12435087
  misc_feature (52)..(220): Pfam Name: Tyrosine phosphatase family Pfam Description: Tyrosine phosphatase family
  misc_feature (52)..(220): Homolog of NCBI NO: 15220383 NR Description: unkown protein; protein id: At1g05000.1
  misc_feature (1)..(120): Homolog of NCBI NO: 30102538 NR Description: At2g32960 [Arabidopsis thaliana]
  misc_feature (105)..(220): Homolog of NCBI NO: 30102538 NR Description: At2g32960 [Arabidopsis thaliana]
  misc_feature (52)..(220): Homolog of NCBI NO: 15225761 NR Description: unknown protein; protein id: At2g32960.1
  misc_feature (50)..(220): Homolog of NCBI NO: 18412419 NR Description: putative protein; protein id: At4g03960.1, by cDNA: 26983., supported by cDNA: gi_15810021, supported by gi_17981660 [Arabidopsis thaliana] >gi|15810022|gb|AAL06938.1|
  misc_feature (48)..(214): Homolog of NCBI NO: 15232985 NR Description: unknown protein; protein id: At3g02800.1 thaliana] >gi|6728982|gb|AAF26980.1|AC018363_25 unknown protein
  misc_feature (50)..(147): Homolog of NCBI NO: 7487406 NR Description: hypothetical protein T24M8.4 - Arabidopsis
  misc_feature (165)..(220): Homolog of NCBI NO: 7487406 NR Description: hypothetical protein T24M8.4 - Arabidopsis
  misc_feature (48)..(214): Homolog of NCBI NO: 21553927 NR Description: unknown [Arabidopsis thaliana]
  misc_feature (48)..(214): Homolog of NCBI NO: 15237359 NR Description: putative protein; protein id: At5g16480.1, by cDNA: 18232. [Arabidopsis thaliana] contains similarity to tyrosine phosphatase~gene_id:MQK4.21
MTMKLDAPARQKSQDAEQNGRTAAAGVLGIDEPWSQPKLRLTGHAQADADALVPPLNFAMVDDGIFRSGLPDAGSFRFLLSLNLRSVVYLCPEPYPEENARFLQQNGIQLHQFGIEGSKSGSTVPDAMVVQEPFVYIPEETIREALKVILDARNQPVLIHCKRGKHRTGCVVGCLRKLQKWCLSSVFDEYLHFAAAKARSTDQRFMELFDASSLTHLAASQY

SEQ ID NO: 7144 - protein, 220 aa, Zea mays subsp. mays
  peptide (1)..(220): Ceres Seq. ID no. 12435088
  misc_feature (50)..(218): Pfam Name: Tyrosine phosphatase family Pfam Description: Tyrosine phosphatase family
  misc_feature (50)..(218): Homolog of NCBI NO: 15220383 NR Description: unkown protein; protein id: At1g05000.1
  misc_feature (1)..(118): Homolog of NCBI NO: 30102538 NR Description: At2g32960 [Arabidopsis thaliana]
  misc_feature (103)..(218): Homolog of NCBI NO: 30102538 NR Description: At2g32960 [Arabidopsis thaliana]
  misc_feature (50)..(218): Homolog of NCBI NO: 15225761 NR Description: unknown protein; protein id: At2g32960.1
  misc_feature (48)..(218): Homolog of NCBI NO: 18412419 NR Description: putative protein; protein id: At4g03960.1, by cDNA: 26983., supported by cDNA: gi_15810021, supported by gi_17981660 [Arabidopsis thaliana] >gi|15810022|gb|AAL06938.1|
  misc_feature (46)..(212): Homolog of NCBI NO: 15232985 NR Description: unknown protein; protein id: At3g02800.1 thaliana] >gi|6728982|gb|AAF26980.1|AC018363_25 unknown protein
  misc_feature (48)..(145): Homolog of NCBI NO: 7487406 NR Description: hypothetical protein T24M8.4 - Arabidopsis
  misc_feature (163)..(218): Homolog of NCBI NO: 7487406 NR Description: hypothetical protein T24M8.4 - Arabidopsis
  misc_feature (46)..(212): Homolog of NCBI NO: 21553927 NR Description: unknown [Arabidopsis thaliana]
  misc_feature (46)..(212): Homolog of NCBI NO: 15237359 NR Description: putative protein; protein id: At5g16480.1, by cDNA: 18232. [Arabidopsis thaliana] contains similarity to tyrosine phosphatase~gene_id:MQK4.21
MKLDAPARQKSQDAEQNGRTAAAGVLGIDEPWSQPKLRLTGHAQADADALVPPLNFAMVDDGIFRSGLPDAGSFRFLLSLNLRSVVYLCPEPYPEENARFLQQNGIQLHQFGIEGSKSGSTVPDAMVVQEPFVYIPEETIREALKVILDARNQPVLIHCKRGKHRTGCVVGCLRKLQKWCLSSVFDEYLHFAAAKARSTDQRFMELFDASSLTHLAASQY

SEQ ID NO: 7145 - DNA, 1453 bp, Zea mays subsp. mays
  misc_feature (1)..(1453): Ceres Seq. ID no. 12407236
  misc_feature: MA Experiment ID: 108547 Result: Up-regulated in Transcription
  misc_feature: MA Experiment 108547 PARAMETER Experiment Name: Zm_Imbibed_Seeds_P Parameter: Age (day) Value: 4 vs. 2
  misc_feature: MA Experiment 108547 PARAMETER Experiment Name: Zm_Imbibed_Seeds_P Parameter: Organism Value: Zea mays
  misc_feature: MA Experiment 108547 PARAMETER Experiment Name: Zm_Imbibed_Seeds_P Parameter: Plant Line Value: 35A19
  misc_feature: MA Experiment 108547 PARAMETER Experiment Name: Zm_Imbibed_Seeds_P Parameter: Tissue Value: Aerial vs. Embryo
gcacgagaccattacctagaacatcctaatcgaaaaaagaaacattgagaacaacgagctgccctctctgcctgcagctacacgcactggaatcatcgtgcggcgcagcgagcgagaggagtggagaggatgacggcgcccaagcctggcgggggagcggcggccgcggcgagggcggcggcggcggggcccaggacggtgctcatcacgggggtcagcagggggctgggccgggccctggcgctcgagctcgcgcgtcgcgggcactcggtggtcggctgcggccgctccgccgagcacctccgctcccttgaggaagagatcacgtcgccatcgcgccacttcttcaccgtcgccgacgttaggtctgacagcagtgtggccgagctggcaaagactgttgtagaaaagaagcaagttccagatattatagtaaacaacgctggtacgataaacaagaataacaagacatggaatgttccagcggaagattttgatatggtggtcgatacaaatatcaagggaacagcaaatgtgcttcgccattttgtaccacttatgatagagaagagacatgggattataatcaatctatcctctggttggggaagatctgctgctgcagaggttgctccatattgtgcttcgaagtgggcgattgagggcttgacacgctcgttagctaaagagctacctcctggattggcagccattgctcttagccctggtgttgtgaatactgacatgcttaattcatgctttggaagctctgccgcattatatcaaacaactgaaacatgggcacccaaggcagctacaatgatactaagcctttcactggacgataacggtgcttccttgactgtatgaagtcgtgaaattctgtgctcaactgattgctgatgggttatcttcatctcttgtagcctgatgtgtagatttttgcgagattatggtgatgtaaaatagtactgataatgcgtgcctgcactctgatgtccctagctgctgtctgaacgttgttgtttagcattacctctatggcctattcatatgctcatatggtgagaactgaggagtgaggacaggagcggtaggtatgccatccgctgagcagtagaaattaaaaggttggctgcaccagaatcagcatgcgcggcggtggagatagagcagaggcaatgcatttgttgaaggttaaatggtggactggacacagagctgtcacgtcagattttgaataagtttaggttaggagcagtcgtggtcgaggatggtgtgaaagcgacaatgacgcatcgggagccgagaagggtgggtgccagtggcgaaaggccgcagcgaagatgagagggggagaagactaggcacgtggagagaaaaggaaacatgtactacccattgtctagtaatatactttttactgatatttatttaaaacaatattattatt

SEQ ID NO: 7146 - protein, 246 aa, Zea mays subsp. mays
  peptide (1)..(246): Ceres Seq. ID no. 12407237
  misc_feature (1)..(246): Homolog of NCBI NO: 18391139 NR Description: expressed protein; protein id: At1g10310.1, by cDNA: 40058. [Arabidopsis thaliana] >gi|25283116|pir||C86237
  misc_feature (6)..(246): Homolog of NCBI NO: 21593553 NR Description: unknown [Arabidopsis thaliana]
  misc_feature (22)..(246): Homolog of NCBI NO: 17229376 NR Description: probable short-chain dehydrogenase [Nostoc sp.
  misc_feature (22)..(246): Homolog of NCBI NO: 23042686 NR Description: hypothetical protein [Trichodesmium erythraeum
  misc_feature (22)..(245): Homolog of NCBI NO: 30020410 NR Description: Short chain dehydrogenase [Bacillus cereus ATCC >gi|29895961|gb|AAP09242.1| Short chain dehydrogenase [Bacillus
  misc_feature (22)..(209): Homolog of NCBI NO: 27467824 NR Description: 3-oxoacyl-(acyl-carrier protein) reductase
  misc_feature (22)..(209): Homolog of NCBI NO: 28209901 NR Description: 3-oxoacyl-[acyl-carrier protein] reductase
  misc_feature (22)..(206): Homolog of NCBI NO: 23056407 NR Description: hypothetical protein [Geobacter metallireducens]
  misc_feature (22)..(209): Homolog of NCBI NO: 18310052 NR Description: 3-oxoacyl-[acyl-carrier-protein] reductase
  misc_feature (22)..(217): Homolog of NCBI NO: 20091507 NR Description: 3-oxoacyl-[acyl-carrier protein] reductase
MTAPKPGGGAAAAARAAAAGPRTVLITGVSRGLGRALALELARRGHSVVGCGRSAEHLRSLEEEITSPSRHFFTVADVRSDSSVAELAKTVVEKKQVPDIIVNNAGTINKNNKTWNVPAEDFDMVVDTNIKGTANVLRHFVPLMIEKRHGIIINLSSGWGRSAAAEVAPYCASKWAIEGLTRSLAKELPPGLAAIALSPGVVNTDMLNSCFGSSAALYQTTETWAPKAATMILSLSLDDNGASLTV

SEQ ID NO: 7147 - protein, 123 aa, Zea mays subsp. mays
  peptide (1)..(123): Ceres Seq. ID no. 12407238
  misc_feature (1)..(123): Homolog of NCBI NO: 18391139 NR Description: expressed protein; protein id: At1g10310.1, by cDNA: 40058. [Arabidopsis thaliana] >gi|25283116|pir||C86237
  misc_feature (1)..(123): Homolog of NCBI NO: 21593553 NR Description: unknown [Arabidopsis thaliana]
  misc_feature (1)..(123): Homolog of NCBI NO: 17229376 NR Description: probable short-chain dehydrogenase [Nostoc sp.
  misc_feature (1)..(123): Homolog of NCBI NO: 23042686 NR Description: hypothetical protein [Trichodesmium erythraeum
  misc_feature (1)..(122): Homolog of NCBI NO: 30020410 NR Description: Short chain dehydrogenase [Bacillus cereus ATCC >gi|29895961|gb|AAP09242.1| Short chain dehydrogenase [Bacillus
  misc_feature (1)..(86): Homolog of NCBI NO: 27467824 NR Description: 3-oxoacyl-(acyl-carrier protein) reductase
  misc_feature (1)..(86): Homolog of NCBI NO: 28209901 NR Description: 3-oxoacyl-[acyl-carrier protein] reductase
  misc_feature (1)..(83): Homolog of NCBI NO: 23056407 NR Description: hypothetical protein [Geobacter metallireducens]
  misc_feature (1)..(86): Homolog of NCBI NO: 18310052 NR Description: 3-oxoacyl-[acyl-carrier-protein] reductase
  misc_feature (1)..(94): Homolog of NCBI NO: 20091507 NR Description: 3-oxoacyl-[acyl-carrier protein] reductase
MVVDTNIKGTANVLRHFVPLMIEKRHGIIINLSSGWGRSAAAEVAPYCASKWAIEGLTRSLAKELPPGLAAIALSPGVVNTDMLNSCFGSSAALYQTTETWAPKAATMILSLSLDDNGASLTV

SEQ ID NO: 7148 - DNA, 1482 bp, Zea mays subsp. mays
  misc_feature (1)..(1482): Ceres Seq. ID no. 12408899
  misc_feature: MA Experiment ID: 108522 Result: Down-regulated in Transcription
  misc_feature: MA Experiment 108522 PARAMETER Experiment Name: Zm_42deg_Heat_P Parameter: Age (day) Value: 8
  misc_feature: MA Experiment 108522 PARAMETER Experiment Name: Zm_42deg_Heat_P Parameter: Organism Value: Zea mays
  misc_feature: MA Experiment 108522 PARAMETER Experiment Name: Zm_42deg_Heat_P Parameter: Plant Line Value: 35A19
  misc_feature: MA Experiment 108522 PARAMETER Experiment Name: Zm_42deg_Heat_P Parameter: Temperature (deg C) Value: 42 vs. 22
  misc_feature: MA Experiment 108522 PARAMETER Experiment Name: Zm_42deg_Heat_P Parameter: Timepoint (hr) Value: 1
  misc_feature: MA Experiment 108522 PARAMETER Experiment Name: Zm_42deg_Heat_P Parameter: Tissue Value: Aerial
  misc_feature: MA Experiment ID: 108543 Result: Down-regulated in Transcription
  misc_feature: MA Experiment ID: 20000488 Result: Up-regulated in Transcription
  misc_feature: MA Experiment 20000488 PARAMETER Experiment Name: Zm_50mM_NH4NO3_L_to_H_P Parameter: Organism Value: Zea mays
  misc_feature: MA Experiment 20000488 PARAMETER Experiment Name: Zm_50mM_NH4NO3_L_to_H_P Parameter: Timepoint (hr) Value: 8
  misc_feature: MA Experiment 20000488 PARAMETER Experiment Name: Zm_50mM_NH4NO3_L_to_H_P Parameter: Tissue Value: Leaves
  misc_feature: MA Experiment 20000488 PARAMETER Experiment Name: Zm_50mM_NH4NO3_L_to_H_P Parameter: Treatment Value: 50mM NH4NO3 vs. 100mM Mannitol
  misc_feature: MA Experiment ID: 20000492 Result: Up-regulated in Transcription
  misc_feature: MA Experiment 20000492 PARAMETER Experiment Name: Zm_Hybrid_Seed_Dev_P Parameter: DAP Value: 12
  misc_feature: MA Experiment 20000492 PARAMETER Experiment Name: Zm_Hybrid_Seed_Dev_P Parameter: Organism Value: Zea mays
  misc_feature: MA Experiment 20000492 PARAMETER Experiment Name: Zm_Hybrid_Seed_Dev_P Parameter: Plant Line Value: 35A19
  misc_feature: MA Experiment 20000492 PARAMETER Experiment Name: Zm_Hybrid_Seed_Dev_P Parameter: Tissue Value: Fert Kernel vs. Unfert Floret
  misc_feature: MA Experiment ID: 20000626 Result: Up-regulated in Transcription
  misc_feature: MA Experiment 20000626 PARAMETER Experiment Name: Zm_Herbicide-Treatments_P Parameter: Timepoint (hr) Value: 12
  misc_feature: MA Experiment 20000626 PARAMETER Experiment Name: Zm_Herbicide-Treatments_P Parameter: Tissue Value: Aerial
  misc_feature: MA Experiment 20000626 PARAMETER Experiment Name: Zm_Herbicide-Treatments_P Parameter: Treatment Value: Roundup vs. No Treatment
gctccttgctcgcctccacccgcggccaccaccgccctgcggcccccgccgcttgctagcctccaccgcgccgcgagtcacaccgttcatgcaccggctggtcctggagcacgggaggacgagcatgtcctggttcggccccagccccaaggtgaccatcgtcgacccggacctggccaaggacgtgctgtccaacaagttcggccacttcgagaagctcaaggtcccggcgctgtccaagatgctgggctccggcgtggccagccacgagggcgagaagtgggtcaagcaccggaggatcctcaaccatgcgttccatcttgagaagctcaagcgcatgctgccggcgttttctacgtgctgcgaggagctggtgagcaggtgggcggcggagtcccttggctccgacggctcgtgcgagctggacgtctggccggagctgcagaacctgacgggagacatcatttctcgcaccgcgttcagcagcagctacagcgaagggagaaggatcttccagctacaggtcgagcaagcttcgcttgtcatgaccaacattcggaagatcatgatccccggctacatgtacttgcctaccgcgaacaacaggaagatgcgcaggaacaacagggaggtggagtcaatcctgcgagagataatcgggaagaggatccaggcgatggaacaaggcgagggcaccaaagacgacctggtgggtctactgctggagacaaacatgagagacgacatggggatgacgatcgaagacatgatcgaggagtgcaaggtgttctacttcgtcgggatggagaccacgttggtgctgctcatgtggacgatggtggtgctcagcatgcacccggagtggcaggaccgcgcgagggaggaggtgacggctctgttcggcagggacggcaagcccgagtatgacggcctaagccacctcaaagttgtgaccatggtgctctacgaggtgctccgactgtacccgccggccacctccgtcgtccgacaaacgtacaaggagatggaggtcggaggcgtcacctaccccgccggcgtgatcctggagctgcccgtgctgctcatccaccacgacccggacatctggggaggcgacgcgcgtgagtttaggcccgataggttctccgagggcgtgtccagggcctccaaggaccccggcgcgttcctcccgttcggttggggcccgcgcatctgcatcggccagaacttcgcgctgctggaggccaagatggcgctctgcatgatcctccagcggtttgagttcgggctcgcgccatcctatgctcatgcgccgcataccgtgataaccttgcatcctatgcacggtgcgcagcttaagctcagagcaatatgatctcgacatgatgggtgtcccatcgttgatgccattgttatgtataaccttacaattcagataggcattcggccctgttaatgtctgaaataagtatcttcgcgttg

SEQ ID NO: 7149 - protein, 457 aa, Zea mays subsp. mays
  peptide (1)..(457): Ceres Seq. ID no. 12408900
  misc_feature (23)..(457): Homolog of NCBI NO: 21842136 NR Description: cytochrome P450 monooxygenase CYP72A27 [Zea mays
  misc_feature (22)..(457): Homolog of NCBI NO: 21805634 NR Description: cytochrome P450 monooxygenase CYP72A26 [Zea mays
  misc_feature (24)..(457): Homolog of NCBI NO: 34912898 NR Description: putative cytochrome P450 [Oryza sativa (japonica group)] >gi|11761101|dbj|BAB19091.1| putative cytochrome P450
  misc_feature (23)..(457): Homolog of NCBI NO: 34912894 NR Description: putative cytochrome P450 [Oryza sativa (japonica group)] >gi|11761099|dbj|BAB19089.1| putative cytochrome P450
  misc_feature (23)..(457): Homolog of NCBI NO: 19909879 NR Description: cytochrome P450 [Oryza sativa]
  misc_feature (23)..(457): Homolog of NCBI NO: 34912896 NR Description: putative cytochrome P450 [Oryza sativa (japonica group)] >gi|11761100|dbj|BAB19090.1| putative cytochrome P450
  misc_feature (23)..(457): Homolog of NCBI NO: 34912888 NR Description: putative cytochrome P450 [Oryza sativa (japonica group)] >gi|11761096|dbj|BAB19086.1| putative cytochrome P450
  misc_feature (23)..(457): Homolog of NCBI NO: 34912380 NR Description: putative cytochrome P450 [Oryza sativa (japonica group)] >gi|20161041|dbj|BAB89973.1| putative cytochrome P450
  misc_feature (8)..(457): Homolog of NCBI NO: 34912882 NR Description: putative cytochrome P450 [Oryza sativa (japonica group)] >gi|11761093|dbj|BAB19083.1| putative cytochrome P450
  misc_feature (8)..(457): Homolog of NCBI NO: 21805645 NR Description: cytochrome P450 monooxygenase CYP72A5 [Zea mays
LLARLHPRPPPPCGPRRLLASTAPRVTPFMHRLVLEHGRTSMSWFGPSPKVTIVDPDLAKDVLSNKFGHFEKLKVPALSKMLGSGVASHEGEKWVKHRRILNHAFHLEKLKRMLPAFSTCCEELVSRWAAESLGSDGSCELDVWPELQNLTGDIISRTAFSSSYSEGRRIFQLQVEQASLVMTNIRKIMIPGYMYLPTANNRKMRRNNREVESILREIIGKRIQAMEQGEGTKDDLVGLLLETNMRDDMGMTIEDMIEECKVFYFVGMETTLVLLMWTMVVLSMHPEWQDRAREEVTALFGRDGKPEYDGLSHLKVVTMVLYEVLRLYPPATSVVRQTYKEMEVGGVTYPAGVILELPVLLIHHDPDIWGGDAREFRPDRFSEGVSRASKDPGAFLPFGWGPRICIGQNFALLEAKMALCMILQRFEFGLAPSYAHAPHTVITLHPMHGAQLKLRAI

SEQ ID NO: 7150 - protein, 428 aa, Zea mays subsp. mays
  peptide (1)..(428): Ceres Seq. ID no. 12408901
  misc_feature (1)..(428): Homolog of NCBI NO: 21842136 NR Description: cytochrome P450 monooxygenase CYP72A27 [Zea mays
  misc_feature (1)..(428): Homolog of NCBI NO: 21805634 NR Description: cytochrome P450 monooxygenase CYP72A26 [Zea mays
  misc_feature (1)..(428): Homolog of NCBI NO: 34912898 NR Description: putative cytochrome P450 [Oryza sativa (japonica group)] >gi|11761101|dbj|BAB19091.1| putative cytochrome P450
  misc_feature (1)..(428): Homolog of NCBI NO: 34912894 NR Description: putative cytochrome P450 [Oryza sativa (japonica group)] >gi|11761099|dbj|BAB19089.1| putative cytochrome P450
  misc_feature (1)..(428): Homolog of NCBI NO: 19909879 NR Description: cytochrome P450 [Oryza sativa]
  misc_feature (1)..(428): Homolog of NCBI NO: 34912896 NR Description: putative cytochrome P450 [Oryza sativa (japonica group)] >gi|11761100|dbj|BAB19090.1| putative cytochrome P450
  misc_feature (1)..(428): Homolog of NCBI NO: 34912888 NR Description: putative cytochrome P450 [Oryza sativa (japonica group)] >gi|11761096|dbj|BAB19086.1| putative cytochrome P450
  misc_feature (1)..(428): Homolog of NCBI NO: 34912380 NR Description: putative cytochrome P450 [Oryza sativa (japonica group)] >gi|20161041|dbj|BAB89973.1| putative cytochrome P450
  misc_feature (1)..(428): Homolog of NCBI NO: 34912882 NR Description: putative cytochrome P450 [Oryza sativa (japonica group)] >gi|11761093|dbj|BAB19083.1| putative cytochrome P450
  misc_feature (1)..(428): Homolog of NCBI NO: 21805645 NR Description: cytochrome P450 monooxygenase CYP72A5 [Zea mays
MHRLVLEHGRTSMSWFGPSPKVTIVDPDLAKDVLSNKFGHFEKLKVPALSKMLGSGVASHEGEKWVKHRRILNHAFHLEKLKRMLPAFSTCCEELVSRWAAESLGSDGSCELDVWPELQNLTGDIISRTAFSSSYSEGRRIFQLQVEQASLVMTNIRKIMIPGYMYLPTANNRKMRRNNREVESILREIIGKRIQAMEQGEGTKDDLVGLLLETNMRDDMGMTIEDMIEECKVFYFVGMETTLVLLMWTMVVLSMHPEWQDRAREEVTALFGRDGKPEYDGLSHLKVVTMVLYEVLRLYPPATSVVRQTYKEMEVGGVTYPAGVILELPVLLIHHDPDIWGGDAREFRPDRFSEGVSRASKDPGAFLPFGWGPRICIGQNFALLEAKMALCMILQRFEFGLAPSYAHAPHTVITLHPMHGAQLKLRAI

SEQ ID NO: 7151 - protein, 416 aa, Zea mays subsp. mays
  peptide (1)..(416): Ceres Seq. ID no. 12408902
  misc_feature (1)..(416): Homolog of NCBI NO: 21842136 NR Description: cytochrome P450 monooxygenase CYP72A27 [Zea mays
  misc_feature (1)..(416): Homolog of NCBI NO: 21805634 NR Description: cytochrome P450 monooxygenase CYP72A26 [Zea mays
  misc_feature (1)..(416): Homolog of NCBI NO: 34912898 NR Description: putative cytochrome P450 [Oryza sativa (japonica group)] >gi|11761101|dbj|BAB19091.1| putative cytochrome P450
  misc_feature (1)..(416): Homolog of NCBI NO: 34912894 NR Description: putative cytochrome P450 [Oryza sativa (japonica group)] >gi|11761099|dbj|BAB19089.1| putative cytochrome P450
  misc_feature (1)..(416): Homolog of NCBI NO: 19909879 NR Description: cytochrome P450 [Oryza sativa]
  misc_feature (1)..(416): Homolog of NCBI NO: 34912896 NR Description: putative cytochrome P450 [Oryza sativa (japonica group)] >gi|11761100|dbj|BAB19090.1| putative cytochrome P450
  misc_feature (1)..(416): Homolog of NCBI NO: 34912888 NR Description: putative cytochrome P450 [Oryza sativa (japonica group)] >gi|11761096|dbj|BAB19086.1| putative cytochrome P450
  misc_feature (1)..(416): Homolog of NCBI NO: 34912380 NR Description: putative cytochrome P450 [Oryza sativa (japonica group)] >gi|20161041|dbj|BAB89973.1| putative cytochrome P450
  misc_feature (1)..(416): Homolog of NCBI NO: 34912882 NR Description: putative cytochrome P450 [Oryza sativa (japonica group)] >gi|11761093|dbj|BAB19083.1| putative cytochrome P450
  misc_feature (1)..(416): Homolog of NCBI NO: 21805645 NR Description: cytochrome P450 monooxygenase CYP72A5 [Zea mays
MSWFGPSPKVTIVDPDLAKDVLSNKFGHFEKLKVPALSKMLGSGVASHEGEKWVKHRRILNHAFHLEKLKRMLPAFSTCCEELVSRWAAESLGSDGSCELDVWPELQNLTGDIISRTAFSSSYSEGRRIFQLQVEQASLVMTNIRKIMIPGYMYLPTANNRKMRRNNREVESILREIIGKRIQAMEQGEGTKDDLVGLLLETNMRDDMGMTIEDMIEECKVFYFVGMETTLVLLMWTMVVLSMHPEWQDRAREEVTALFGRDGKPEYDGLSHLKVVTMVLYEVLRLYPPATSVVRQTYKEMEVGGVTYPAGVILELPVLLIHHDPDIWGGDAREFRPDRFSEGVSRASKDPGAFLPFGWGPRICIGQNFALLEAKMALCMILQRFEFGLAPSYAHAPHTVITLHPMHGAQLKLRAI

SEQ ID NO: 7152 - DNA, 1422 bp, Zea mays subsp. mays
  misc_feature (1)..(1422): Ceres Seq. ID no. 13493622
  misc_feature: MA Experiment ID: 108529 Result: Up-regulated in Transcription
  misc_feature: MA Experiment 108529 PARAMETER Experiment Name: Zm_Imbibed_Seeds_P Parameter: Age (day) Value: 5 vs. 2
  misc_feature: MA Experiment 108529 PARAMETER Experiment Name: Zm_Imbibed_Seeds_P Parameter: Organism Value: Zea mays
  misc_feature: MA Experiment 108529 PARAMETER Experiment Name: Zm_Imbibed_Seeds_P Parameter: Plant Line Value: 35A19
  misc_feature: MA Experiment 108529 PARAMETER Experiment Name: Zm_Imbibed_Seeds_P Parameter: Tissue Value: Roots vs. Embryo
  misc_feature: MA Experiment ID: 108535 Result: Down-regulated in Transcription
  misc_feature: MA Experiment 108535 PARAMETER Experiment Name: Zm_Meristem_P Parameter: Age (day) Value: 8
  misc_feature: MA Experiment 108535 PARAMETER Experiment Name: Zm_Meristem_P Parameter: Organism Value: Zea mays
  misc_feature: MA Experiment 108535 PARAMETER Experiment Name: Zm_Meristem_P Parameter: Plant Line Value: 35A19
  misc_feature: MA Experiment 108535 PARAMETER Experiment Name: Zm_Meristem_P Parameter: Tissue Value: Root Meristem vs. Above Root Meristem
  misc_feature: MA Experiment ID: 108543 Result: Down-regulated in Transcription
agaccattacctagaacatcctaatcgaaaaagaatctctctttaagagggatacagagtaggaaagagacagagggggcaaagagcgatggacgccgcggtgcggaaggccgcgggcgccggcatcgcgcgcgcgccggcgctggtgctagcgctggtggcggcgggggcgttcctgatctcctacaacttcttcaccatgctgttccacggcggcggcggaataggcgcggcggccgaccgctgggacgagggaccctgtggtggccatgccagcgtggatgcgcgcggcggcggacaccgaggcgcggcggcggcccgttccatgtggcgctcacggccacggacgcgccctacagccggtggcagtgccgggtcatgtacttctggtacaagcggatgcaggcgcggccgggcggagaggccatgggcgggttcacgcgcgtgctgcactcggggaagcccgacgggctcatggacgagatccccaccttcgtcgtcgacccgctgcccgctggcaaggaccacggatatgtggtcctaaataggccgtgggcatttgtgcagtggcttcagaaagcaaagattgaagaagagtatatactaatggcagaaccagaccatatatttgtgaaacctctaccaaatttggcccatgacgatgatccggcagcatttcccttcttttacattacaccatcagaacatgaaaaaattatcaggaaatactatgctaaagaaagaggtcctgtcacagatatcgatccgattgggaattctcctgtgataattaagaagacaattcttgagaagattgcccccacatggatgaatgtgtcaattcaaatgaaagaggatgaagaaacagataaagtttttggatgggtgttggaaatgtatgcatacgctgttgctagcgcattgcatggagttcatcatatccttcgtaaagatttcatgatccagccaccttttgatacaaagctccagaatacatttataatccacttcacttatggatgtgactactcactaaagggtgaactgacctatggtaaagttggtgaatggcgatttgacaaaagatcattcccagataggccaccaccaagaaatcttacattgccccctcctggagtaccagaaagtgtggttactctagtgaaaatggtcaatgaagctagtgcaaaccttcctcggtgggatgatggaatataaactttggatgatatcaattatatcttaggttcctttgatctgcccttgtatatggggaatatcaaagtatcaggtgcagtcggttgtttggtttacatccaaaatagctgcttgcacttgcacaccatacctgatagaagaagatacataattttctcagtgtactttttatgaaaagaaaagaaatgaaagtaaaagttagct

SEQ ID NO: 7153 - protein, 279 aa, Zea mays subsp. mays
  peptide (1)..(279): Ceres Seq. ID no. 13493623
  misc_feature (1)..(276): Homolog of NCBI NO: 15240642 NR Description: expressed protein [Arabidopsis thaliana] expressed protein [Arabidopsis thaliana] putative protein [Arabidopsis thaliana]
  misc_feature (1)..(275): Homolog of NCBI NO: 22327055 NR Description: expressed protein [Arabidopsis thaliana] Unknown protein [Arabidopsis thaliana]
  misc_feature (1)..(276): Homolog of NCBI NO: 24413996 NR Description: hypothetical protein~similar to Arabidopsis
  misc_feature (109)..(276): Homolog of NCBI NO: 30682704 NR Description: expressed protein [Arabidopsis thaliana]
  misc_feature (1)..(52): Homolog of NCBI NO: 30682704 NR Description: expressed protein [Arabidopsis thaliana]
  misc_feature (109)..(273): Homolog of NCBI NO: 25371351 NR Description: hypothetical protein At2g25260 [imported] - thaliana >gi|4567251|gb|AAD23665.1| unknown protein [Arabidopsis
  misc_feature (1)..(52): Homolog of NCBI NO: 25371351 NR Description: hypothetical protein At2g25260 [imported] - thaliana >gi|4567251|gb|AAD23665.1| unknown protein [Arabidopsis
  misc_feature (1)..(76): Homolog of NCBI NO: 34903224 NR Description: unnamed protein product [Oryza sativa (japonica group)] >gi|6815101|dbj|BAA90387.1| unnamed protein product
  misc_feature (1)..(244): Homolog of NCBI NO: 22330795 NR Description: expressed protein [Arabidopsis thaliana] unknown protein [Arabidopsis thaliana]
MYFWYKRMQARPGGEAMGGFTRVLHSGKPDGLMDEIPTFVVDPLPAGKDHGYVVLNRPWAFVQWLQKAKIEEEYILMAEPDHIFVKPLPNLAHDDDPAAFPFFYITPSEHEKIIRKYYAKERGPVTDIDPIGNSPVIIKKTILEKIAPTWMNVSIQMKEDEETDKVFGWVLEMYAYAVASALHGVHHILRKDFMIQPPFDTKLQNTFIIHFTYGCDYSLKGELTYGKVGEWRFDKRSFPDRPPPRNLTLPPPGVPESVVTLVKMVNEASANLPRWDDGI

SEQ ID NO: 7154 - protein, 272 aa, Zea mays subsp. mays
  peptide (1)..(272): Ceres Seq. ID no. 13493624
  misc_feature (1)..(269): Homolog of NCBI NO: 15240642 NR Description: expressed protein [Arabidopsis thaliana] expressed protein [Arabidopsis thaliana] putative protein [Arabidopsis thaliana]
  misc_feature (1)..(268): Homolog of NCBI NO: 22327055 NR Description: expressed protein [Arabidopsis thaliana] Unknown protein [Arabidopsis thaliana]
  misc_feature (1)..(269): Homolog of NCBI NO: 24413996 NR Description: hypothetical protein~similar to Arabidopsis
  misc_feature (102)..(269): Homolog of NCBI NO: 30682704 NR Description: expressed protein [Arabidopsis thaliana]
  misc_feature (1)..(45): Homolog of NCBI NO: 30682704 NR Description: expressed protein [Arabidopsis thaliana]
  misc_feature (102)..(266): Homolog of NCBI NO: 25371351 NR Description: hypothetical protein At2g25260 [imported] - thaliana >gi|4567251|gb|AAD23665.1| unknown protein [Arabidopsis
  misc_feature (1)..(45): Homolog of NCBI NO: 25371351 NR Description: hypothetical protein At2g25260 [imported] - thaliana >gi|4567251|gb|AAD23665.1| unknown protein [Arabidopsis
  misc_feature (1)..(69): Homolog of NCBI NO: 34903224 NR Description: unnamed protein product [Oryza sativa (japonica group)] >gi|6815101|dbj|BAA90387.1| unnamed protein product
  misc_feature (1)..(237): Homolog of NCBI NO: 22330795 NR Description: expressed protein [Arabidopsis thaliana] unknown protein [Arabidopsis thaliana]
MQARPGGEAMGGFTRVLHSGKPDGLMDEIPTFVVDPLPAGKDHGYVVLNRPWAFVQWLQKAKIEEEYILMAEPDHIFVKPLPNLAHDDDPAAFPFFYITPSEHEKIIRKYYAKERGPVTDIDPIGNSPVIIKKTILEKIAPTWMNVSIQMKEDEETDKVFGWVLEMYAYAVASALHGVHHILRKDFMIQPPFDTKLQNTFIIHFTYGCDYSLKGELTYGKVGEWRFDKRSFPDRPPPRNLTLPPPGVPESVVTLVKMVNEASANLPRWDDGI

SEQ ID NO: 7155 - protein, 263 aa, Zea mays subsp. mays
  peptide (1)..(263): Ceres Seq. ID no. 13493625
  misc_feature (1)..(260): Homolog of NCBI NO: 15240642 NR Description: expressed protein [Arabidopsis thaliana] expressed protein [Arabidopsis thaliana] putative protein [Arabidopsis thaliana]
  misc_feature (1)..(259): Homolog of NCBI NO: 22327055 NR Description: expressed protein [Arabidopsis thaliana] Unknown protein [Arabidopsis thaliana]
  misc_feature (1)..(260): Homolog of NCBI NO: 24413996 NR Description: hypothetical protein~similar to Arabidopsis
  misc_feature (93)..(260): Homolog of NCBI NO: 30682704 NR Description: expressed protein [Arabidopsis thaliana]
  misc_feature (1)..(36): Homolog of NCBI NO: 30682704 NR Description: expressed protein [Arabidopsis thaliana]
  misc_feature (93)..(257): Homolog of NCBI NO: 25371351 NR Description: hypothetical protein At2g25260 [imported] - thaliana >gi|4567251|gb|AAD23665.1| unknown protein [Arabidopsis
  misc_feature (1)..(36): Homolog of NCBI NO: 25371351 NR Description: hypothetical protein At2g25260 [imported] - thaliana >gi|4567251|gb|AAD23665.1| unknown protein [Arabidopsis
  misc_feature (1)..(60): Homolog of NCBI NO: 34903224 NR Description: unnamed protein product [Oryza sativa (japonica group)] >gi|6815101|dbj|BAA90387.1| unnamed protein product
  misc_feature (1)..(228): Homolog of NCBI NO: 22330795 NR Description: expressed protein [Arabidopsis thaliana] unknown protein [Arabidopsis thaliana]
MGGFTRVLHSGKPDGLMDEIPTFVVDPLPAGKDHGYVVLNRPWAFVQWLQKAKIEEEYILMAEPDHIFVKPLPNLAHDDDPAAFPFFYITPSEHEKIIRKYYAKERGPVTDIDPIGNSPVIIKKTILEKIAPTWMNVSIQMKEDEETDKVFGWVLEMYAYAVASALHGVHHILRKDFMIQPPFDTKLQNTFIIHFTYGCDYSLKGELTYGKVGEWRFDKRSFPDRPPPRNLTLPPPGVPESVVTLVKMVNEASANLPRWDDGI

SEQ ID NO: 7156 - DNA, 1749 bp, Zea mays subsp. mays
  misc_feature (1)..(1749): Ceres Seq. ID no. 12484025
  misc_feature: MA Experiment ID: 108543 Result: Up-regulated in Transcription
  misc_feature: MA Experiment ID: 108544 Result: Down-regulated in Transcription
  misc_feature: MA Experiment ID: 108556 Result: Down-regulated in Transcription
  misc_feature: MA Experiment 108556 PARAMETER Experiment Name: Zm_Drought_P Parameter: Age (day) Value: 9
  misc_feature: MA Experiment 108556 PARAMETER Experiment Name: Zm_Drought_P Parameter: Organism Value: Zea mays
  misc_feature: MA Experiment 108556 PARAMETER Experiment Name: Zm_Drought_P Parameter: Plant Line Value: 35A19
  misc_feature: MA Experiment 108556 PARAMETER Experiment Name: Zm_Drought_P Parameter: Timepoint (hr) Value: 24
  misc_feature: MA Experiment 108556 PARAMETER Experiment Name: Zm_Drought_P Parameter: Tissue Value: Aerial
  misc_feature: MA Experiment 108556 PARAMETER Experiment Name: Zm_Drought_P Parameter: Treatment Value: Drought vs. No Drought
  misc_feature: MA Experiment ID: 20000477 Result: Down-regulated in Transcription
  misc_feature: MA Experiment 20000477 PARAMETER Experiment Name: Zm_5mM_SA_P Parameter: Age (day) Value: 10
  misc_feature: MA Experiment 20000477 PARAMETER Experiment Name: Zm_5mM_SA_P Parameter: Organism Value: Zea mays
  misc_feature: MA Experiment 20000477 PARAMETER Experiment Name: Zm_5mM_SA_P Parameter: Plant Line Value: 35A19
  misc_feature: MA Experiment 20000477 PARAMETER Experiment Name: Zm_5mM_SA_P Parameter: Timepoint (hr) Value: 48
  misc_feature: MA Experiment 20000477 PARAMETER Experiment Name: Zm_5mM_SA_P Parameter: Tissue Value: Aerial
  misc_feature: MA Experiment 20000477 PARAMETER Experiment Name: Zm_5mM_SA_P Parameter: Treatment Value: 5mM SA vs. No Treatment
  misc_feature: MA Experiment ID: 20000478 Result: Down-regulated in Transcription
  misc_feature: MA Experiment 20000478 PARAMETER Experiment Name: Zm_5mM_SA_P Parameter: Age (day) Value: 11
  misc_feature: MA Experiment 20000478 PARAMETER Experiment Name: Zm_5mM_SA_P Parameter: Organism Value: Zea mays
  misc_feature: MA Experiment 20000478 PARAMETER Experiment Name: Zm_5mM_SA_P Parameter: Plant Line Value: 35A19
  misc_feature: MA Experiment 20000478 PARAMETER Experiment Name: Zm_5mM_SA_P Parameter: Timepoint (hr) Value: 72
  misc_feature: MA Experiment 20000478 PARAMETER Experiment Name: Zm_5mM_SA_P Parameter: Tissue Value: Aerial
  misc_feature: MA Experiment 20000478 PARAMETER Experiment Name: Zm_5mM_SA_P Parameter: Treatment Value: 5mM SA vs. No Treatment
  misc_feature: MA Experiment ID: 20000479 Result: Down-regulated in Transcription
  misc_feature: MA Experiment 20000479 PARAMETER Experiment Name: Zm_Drought_P Parameter: Age (day) Value: 10
  misc_feature: MA Experiment 20000479 PARAMETER Experiment Name: Zm_Drought_P Parameter: Organism Value: Zea mays
  misc_feature: MA Experiment 20000479 PARAMETER Experiment Name: Zm_Drought_P Parameter: Plant Line Value: 35A19
  misc_feature: MA Experiment 20000479 PARAMETER Experiment Name: Zm_Drought_P Parameter: Timepoint (hr) Value: 48
  misc_feature: MA Experiment 20000479 PARAMETER Experiment Name: Zm_Drought_P Parameter: Tissue Value: Aerial
  misc_feature: MA Experiment 20000479 PARAMETER Experiment Name: Zm_Drought_P Parameter: Treatment Value: Drought vs. No Drought
  misc_feature: MA Experiment ID: 20000480 Result: Down-regulated in Transcription
  misc_feature: MA Experiment 20000480 PARAMETER Experiment Name: Zm_Drought_P Parameter: Age (day) Value: 11
  misc_feature: MA Experiment 20000480 PARAMETER Experiment Name: Zm_Drought_P Parameter: Organism Value: Zea mays
  misc_feature: MA Experiment 20000480 PARAMETER Experiment Name: Zm_Drought_P Parameter: Plant Line Value: 35A19
  misc_feature: MA Experiment 20000480 PARAMETER Experiment Name: Zm_Drought_P Parameter: Timepoint (hr) Value: 72
  misc_feature: MA Experiment 20000480 PARAMETER Experiment Name: Zm_Drought_P Parameter: Tissue Value: Aerial
  misc_feature: MA Experiment 20000480 PARAMETER Experiment Name: Zm_Drought_P Parameter: Treatment Value: Drought vs. No Drought
gcacgagaccattacctagaacatcctaatcgaaaactgttctataaagcgagacgagtgggagcaggcgtaaccctaattgagcatcgcagagataggcgtcttcgtactcgcctacctccgcggctcaaacctttcccccttctcccaattccttccgccggccgccgctccacccgtacgacgacaccatgagggagtgcatttcgatccacatcggccaggccggtatccatgtcggaaacgcgtgctgggagctgtactgccttgagcatggcattcaggctgacggtcagatcccggtgacaagaccattgggggaggtgatgatgctttcaacaccttcttcagtgagactggtgctgggaagcacgtgccccgtgctgtttttgttgaccttgaacccactgtcatcgatgaggtgagaactggcacctaccgccagctcttccaccctgagcagctcatcagtgggaaggaggatgcagccaacaactttgcccgtggtcactacaccattggcaaggagattgttgacctgtgccttgatcgcatcaggaagcttgccgacaactgcactggtctccagggcttcctcgtcttcaacgctgttggtggaggaacgggctctggccttggttccctcctcctagagcgcctgtctgttgactacggcaagaaatccaagcttgggttcactgtgtacccttccccccaagtttctacttcggtagttgagccatacaacagtgtactgtccacccactccctcctcgagcacactgatgtggctatactgctggacaatgaggccatctacgacatctgccgccgatcccttgacattgagcgcccaacctacaccaacctcaacaggcttgtgtcccaggtcatctcatcccttactgcctccctgaggttcgatggtgctctgaacgtggatgttaacgagttccagaccaacctggtaccctacccgaggatccacttcatgctttcttcgtacgctccagtcatctctgctgagaaggcctaccacgagcagctctctgtggctgagatcaccaacagtgccttcgagccatcttccatgatggccaagtgcgacccacgccatggcaagtacatggcctgctgcctcatgtaccgtggtgatgtggtccccaaggatgtgaatgctgctgtggccaccatcaagaccaaacgcaccatccagttcgtggattggtgcccgactggcttcaagtgcggcatcaactaccagcctcctagcgttgtgcctggtggcgacctggccaaggtgcagcgtgccgtgtgcatgatctccaactccaccagtgttgtggaggtgttctcccgcatcgaccacaagttcgacctcatgtacgccaagcgtgccttcgtgcactggtacgtcggtgagggtatggaggaaggtgagttctctgaggcccgtgaggacctggcggcgctcgagaaggactacgaggaggtcggtgctgagttcgatgagggcgaggatggcgacgagggtgacgagtactagagaagtttgctgatgacgcagcatcaggccagtgtgctgcccttatcccgtgatctgccgagagttgctcctgctatcgtgttatgtgtgtctgttctgaagtattgtgtggtttacaacacctgatgttgtaagagttgttaattcccctgcattgctaccgggttattgagaataattatggctgtttacgttgttgcttc

SEQ ID NO: 7157 - protein, 184 aa, Zea mays subsp. mays
  peptide (1)..(184): Ceres Seq. ID no. 12484026
  misc_feature (1)..(126): Pfam Name: Tubulin/FtsZ family, C-terminal domain Pfam Description: Tubulin/FtsZ family, C-terminal domain
  misc_feature (1)..(184): Homolog of NCBI NO: 135398 NR Description: Tubulin alpha-1 chain (Alpha-1 tubulin)
  misc_feature (1)..(184): Homolog of NCBI NO: 6094429 NR Description: Tubulin alpha-1 chain (Alpha-1 tubulin)
  misc_feature (1)..(184): Homolog of NCBI NO: 135411 NR Description: Tubulin alpha-2 chain (Alpha-2 tubulin)
  misc_feature (1)..(184): Homolog of NCBI NO: 8928432 NR Description: Tubulin alpha-3 chain >gi|4165488|emb|CAA10663.1|
  misc_feature (1)..(184): Homolog of NCBI NO: 3163946 NR Description: alpha-tubulin 1 [Eleusine indica]
  misc_feature (1)..(184): Homolog of NCBI NO: 8928408 NR Description: Tubulin alpha chain >gi|4098272|gb|AAD10486.1|
  misc_feature (1)..(184): Homolog of NCBI NO: 8928422 NR Description: Tubulin alpha-2 chain >gi|1619297|emb|CAA69724.1|
  misc_feature (1)..(184): Homolog of NCBI NO: 10441016 NR Description: alpha-tubulin [Oryza sativa]
  misc_feature (1)..(184): Homolog of NCBI NO: 17402469 NR Description: alpha-tubulin [Nicotiana tabacum]
  misc_feature (1)..(184): Homolog of NCBI NO: 29124983 NR Description: alpha-tubulin 1 [Populus tremuloides]
MLSSYAPVISAEKAYHEQLSVAEITNSAFEPSSMMAKCDPRHGKYMACCLMYRGDVVPKDVNAAVATIKTKRTIQFVDWCPTGFKCGINYQPPSVVPGGDLAKVQRAVCMISNSTSVVEVFSRIDHKFDLMYAKRAFVHWYVGEGMEEGEFSEAREDLAALEKDYEEVGAEFDEGEDGDEGDEY

SEQ ID NO: 7158 - protein, 151 aa, Zea mays subsp. mays
  peptide (1)..(151): Ceres Seq. ID no. 12484027
  misc_feature (1)..(93): Pfam Name: Tubulin/FtsZ family, C-terminal domain Pfam Description: Tubulin/FtsZ family, C-terminal domain
  misc_feature (1)..(151): Homolog of NCBI NO: 135398 NR Description: Tubulin alpha-1 chain (Alpha-1 tubulin)
  misc_feature (1)..(151): Homolog of NCBI NO: 6094429 NR Description: Tubulin alpha-1 chain (Alpha-1 tubulin)
  misc_feature (1)..(151): Homolog of NCBI NO: 135411 NR Description: Tubulin alpha-2 chain (Alpha-2 tubulin)
  misc_feature (1)..(151): Homolog of NCBI NO: 8928432 NR Description: Tubulin alpha-3 chain >gi|4165488|emb|CAA10663.1|
  misc_feature (1)..(151): Homolog of NCBI NO: 3163946 NR Description: alpha-tubulin 1 [Eleusine indica]
  misc_feature (1)..(151): Homolog of NCBI NO: 8928408 NR Description: Tubulin alpha chain >gi|4098272|gb|AAD10486.1|
  misc_feature (1)..(151): Homolog of NCBI NO: 8928422 NR Description: Tubulin alpha-2 chain >gi|1619297|emb|CAA69724.1|
  misc_feature (1)..(151): Homolog of NCBI NO: 10441016 NR Description: alpha-tubulin [Oryza sativa]
  misc_feature (1)..(151): Homolog of NCBI NO: 17402469 NR Description: alpha-tubulin [Nicotiana tabacum]
  misc_feature (1)..(151): Homolog of NCBI NO: 29124983 NR Description: alpha-tubulin 1 [Populus tremuloides]
MMAKCDPRHGKYMACCLMYRGDVVPKDVNAAVATIKTKRTIQFVDWCPTGFKCGINYQPPSVVPGGDLAKVQRAVCMISNSTSVVEVFSRIDHKFDLMYAKRAFVHWYVGEGMEEGEFSEAREDLAALEKDYEEVGAEFDEGEDGDEGDEY

SEQ ID NO: 7159 - protein, 150 aa, Zea mays subsp. mays
  peptide (1)..(150): Ceres Seq. ID no. 12484028
  misc_feature (1)..(92): Pfam Name: Tubulin/FtsZ family, C-terminal domain Pfam Description: Tubulin/FtsZ family, C-terminal domain
  misc_feature (1)..(150): Homolog of NCBI NO: 135398 NR Description: Tubulin alpha-1 chain (Alpha-1 tubulin)
  misc_feature (1)..(150): Homolog of NCBI NO: 6094429 NR Description: Tubulin alpha-1 chain (Alpha-1 tubulin)
  misc_feature (1)..(150): Homolog of NCBI NO: 135411 NR Description: Tubulin alpha-2 chain (Alpha-2 tubulin)
  misc_feature (1)..(150): Homolog of NCBI NO: 8928432 NR Description: Tubulin alpha-3 chain >gi|4165488|emb|CAA10663.1|
  misc_feature (1)..(150): Homolog of NCBI NO: 3163946 NR Description: alpha-tubulin 1 [Eleusine indica]
  misc_feature (1)..(150): Homolog of NCBI NO: 8928408 NR Description: Tubulin alpha chain >gi|4098272|gb|AAD10486.1|
  misc_feature (1)..(150): Homolog of NCBI NO: 8928422 NR Description: Tubulin alpha-2 chain >gi|1619297|emb|CAA69724.1|
  misc_feature (1)..(150): Homolog of NCBI NO: 10441016 NR Description: alpha-tubulin [Oryza sativa]
  misc_feature (1)..(150): Homolog of NCBI NO: 17402469 NR Description: alpha-tubulin [Nicotiana tabacum]
  misc_feature (1)..(150): Homolog of NCBI NO: 29124983 NR Description: alpha-tubulin 1 [Populus tremuloides]
MAKCDPRHGKYMACCLMYRGDVVPKDVNAAVATIKTKRTIQFVDWCPTGFKCGINYQPPSVVPGGDLAKVQRAVCMISNSTSVVEVFSRIDHKFDLMYAKRAFVHWYVGEGMEEGEFSEAREDLAALEKDYEEVGAEFDEGEDGDEGDEY

SEQ ID NO: 7160 - DNA, 1676 bp, Zea mays subsp. mays
  misc_feature (1)..(1676): Ceres Seq. ID no. 12352494
  misc_feature: MA Experiment ID: 108528 Result: Down-regulated in Transcription
  misc_feature: MA Experiment 108528 PARAMETER Experiment Name: Zm_Imbibed_Seeds_P Parameter: Age (day) Value: 5 vs. 2
  misc_feature: MA Experiment 108528 PARAMETER Experiment Name: Zm_Imbibed_Seeds_P Parameter: Organism Value: Zea mays
  misc_feature: MA Experiment 108528 PARAMETER Experiment Name: Zm_Imbibed_Seeds_P Parameter: Plant Line Value: 35A19
  misc_feature: MA Experiment 108528 PARAMETER Experiment Name: Zm_Imbibed_Seeds_P Parameter: Tissue Value: Aerial vs. Embryo
  misc_feature: MA Experiment ID: 108530 Result: Down-regulated in Transcription
  misc_feature: MA Experiment 108530 PARAMETER Experiment Name: Zm_Imbibed_Seeds_P Parameter: Age (day) Value: 6 vs. 2
  misc_feature: MA Experiment 108530 PARAMETER Experiment Name: Zm_Imbibed_Seeds_P Parameter: Organism Value: Zea mays
  misc_feature: MA Experiment 108530 PARAMETER Experiment Name: Zm_Imbibed_Seeds_P Parameter: Plant Line Value: 35A19
  misc_feature: MA Experiment 108530 PARAMETER Experiment Name: Zm_Imbibed_Seeds_P Parameter: Tissue Value: Aerial vs. Embryo
  misc_feature: MA Experiment ID: 108543 Result: Down-regulated in Transcription
  misc_feature: MA Experiment ID: 108544 Result: Up-regulated in Transcription
  misc_feature: MA Experiment ID: 108547 Result: Down-regulated in Transcription
  misc_feature: MA Experiment 108547 PARAMETER Experiment Name: Zm_Imbibed_Seeds_P Parameter: Age (day) Value: 4 vs. 2
  misc_feature: MA Experiment 108547 PARAMETER Experiment Name: Zm_Imbibed_Seeds_P Parameter: Organism Value: Zea mays
  misc_feature: MA Experiment 108547 PARAMETER Experiment Name: Zm_Imbibed_Seeds_P Parameter: Plant Line Value: 35A19
  misc_feature: MA Experiment 108547 PARAMETER Experiment Name: Zm_Imbibed_Seeds_P Parameter: Tissue Value: Aerial vs. Embryo
  misc_feature: MA Experiment ID: 108689 Result: Up-regulated in Transcription
  misc_feature: MA Experiment 108689 PARAMETER Experiment Name: Zm_Drought_Roots_P Parameter: Age (day) Value: 9
  misc_feature: MA Experiment 108689 PARAMETER Experiment Name: Zm_Drought_Roots_P Parameter: Organism Value: Zea mays
  misc_feature: MA Experiment 108689 PARAMETER Experiment Name: Zm_Drought_Roots_P Parameter: Plant Line Value: 35A19
  misc_feature: MA Experiment 108689 PARAMETER Experiment Name: Zm_Drought_Roots_P Parameter: Timepoint (hr) Value: 24
  misc_feature: MA Experiment 108689 PARAMETER Experiment Name: Zm_Drought_Roots_P Parameter: Tissue Value: Roots
  misc_feature: MA Experiment 108689 PARAMETER Experiment Name: Zm_Drought_Roots_P Parameter: Treatment Value: Drought vs. No Drought
  misc_feature: MA Experiment ID: 20000480 Result: Up-regulated in Transcription
  misc_feature: MA Experiment 20000480 PARAMETER Experiment Name: Zm_Drought_P Parameter: Age (day) Value: 11
  misc_feature: MA Experiment 20000480 PARAMETER Experiment Name: Zm_Drought_P Parameter: Organism Value: Zea mays
  misc_feature: MA Experiment 20000480 PARAMETER Experiment Name: Zm_Drought_P Parameter: Plant Line Value: 35A19
  misc_feature: MA Experiment 20000480 PARAMETER Experiment Name: Zm_Drought_P Parameter: Timepoint (hr) Value: 72
  misc_feature: MA Experiment 20000480 PARAMETER Experiment Name: Zm_Drought_P Parameter: Tissue Value: Aerial
  misc_feature: MA Experiment 20000480 PARAMETER Experiment Name: Zm_Drought_P Parameter: Treatment Value: Drought vs. No Drought
  misc_feature: MA Experiment ID: 20001610 Result: Down-regulated in Transcription
  misc_feature: MA Experiment 20001610 PARAMETER Experiment Name: Zm_50ppm_KNO3_L-to-H_P Parameter: Age (day) Value: 19
  misc_feature: MA Experiment 20001610 PARAMETER Experiment Name: Zm_50ppm_KNO3_L-to-H_P Parameter: Organism Value: Zea mays
  misc_feature: MA Experiment 20001610 PARAMETER Experiment Name: Zm_50ppm_KNO3_L-to-H_P Parameter: Plant Line Value: 35A19
  misc_feature: MA Experiment 20001610 PARAMETER Experiment Name: Zm_50ppm_KNO3_L-to-H_P Parameter: Timepoint (hr) Value: 2
  misc_feature: MA Experiment 20001610 PARAMETER Experiment Name: Zm_50ppm_KNO3_L-to-H_P Parameter: Tissue Value: Roots
  misc_feature: MA Experiment 20001610 PARAMETER Experiment Name: Zm_50ppm_KNO3_L-to-H_P Parameter: Treatment Value: 50ppm KNO3 vs. 50ppm KCl
aactcactgcatatctgacatctcagttgctgaacgcctgaaccgcaagtcatccatgacctcttctattccgaagctgcttctcctcctcttctttctcagccatcgctctcccattgctcgcgcaggcgatgatggcagctacaaggttctgtccatgggctctccgagaactgactccgtctgttcccagtccaaagcggttccttcgtcgtccgccggtgccgccacggtgcccttgcatcaccgtcacggcccatgctcgccgttgccgaccaagaagatgccgacgttggaggagacgctccaccgcgatcagctccgagctgcctacatccagcggaagttctcaggcggcggtggcgctggtggtgacgtccagcgatcggacgccaccgtgccgacggccctgggcacctccctgaacacgctggagtacctgatcaccgtaggcctgggctcgccggccacgtcccagaccatgctcatccgacaccggcagcgacgtgtcgtgggtgcagtgcaagccgtgctcgcagtgccactcccaggcggacccactcttcgaccccagctcgtcgagcacgtactccccgttctcctgcggctccgccgcctgcgcgcagctcggccaggaaggcaacggctgctcctccagctcccagtgccagtacattgtcacgtacggcgacggctccagcaccacggggacctacagctccgacacgctcgcgctgggctccagcgccgtcaagagcttccagttcgggtgcagcaacgtggagtcgggcttcaacgaccagaccgacgggctcatggggctcggcggcggcgcgcagtcgctggtgtcacagacggcggggacgctcggcagggccttctcgtactgcctcccgccgacgccgagctcctccgggttcctcacgctcggcgctgctggcggtagcggaacctcgggcttcgtcaagacgccgatgctcaggagcagccaggtccccacgttctacggcgtgcgcctccaggccatccgggtgggcgggaggcagctcagcatacccgcctcggtcttctccgctgggacggtcatggactcgggcacggtcatcacgcggctgccgccgaccgcctactcggcgctgtcgtcggcgttcaaggccgggatgaagcagtacccgccggcgcagccgagcggcatcctcgacacctgctttgacttcagcggccagtccagcgtcagcataccgtccgtcgcgctagtcttctccgggggcgccgttgtcagcctcgacgccagcggcatcatcctcagcaactgcctcgccttcgcggccaacagcgacgacagctccttgggcatcatcggcaacgtgcagcagcggacgttcgaggtgctgtacgacgttggccggggcgtcgtggggttcagggctggggcgtgctgatcgatcgtgatcggcgcaaggacattgacaataccggccgggagtacgtactgtgctcgtttgggttgcgagtgcaacgtaaatggaagaagtgcaaaacatatacatactacttcgattttaattatctttgcgatagcatgcaataacgtcatgcatgcaagtgtgcaaactactaaaagctaaaagataatcttaatgtcacctgattgatgactataaaagattaatgat

SEQ ID NO: 7161 - protein, 314 aa, Zea mays subsp. mays
  peptide (1)..(314): Ceres Seq. ID no. 12352495
  misc_feature (97)..(163): Pfam Name: Eukaryotic aspartyl protease Pfam Description: Eukaryotic aspartyl protease
  misc_feature (74)..(163): Homolog of NCBI NO: 34912520 NR Description: chloroplast nucleoid DNA-binding protein
THCISDISVAERLNRKSSMTSSIPKLLLLLFFLSHRSPIARAGDDGSYKVLSMGSPRTDSVCSQSKAVPSSSAGAATVPLHHRHGPCSPLPTKKMPTLEETLHRDQLRAAYIQRKFSGGGGAGGDVQRSDATVPTALGTSLNTLEYLITVGLGSPATSQTMLIRHRQRRVVGAVQAVLAVPLPGGPTLRPQLVEHVLPVLLRLRRLRAARPGRQRLLLQLPVPVHCHVRRRLQHHGDLQLRHARAGLQRRQELPVRVQQRGVGLQRPDRRAHGARRRRAVAGVTDGGDARQGLLVLPPADAELLRVPHARRCWR

SEQ ID NO: 7162 - protein, 296 aa, Zea mays subsp. mays
  peptide (1)..(296): Ceres Seq. ID no. 12352496
  misc_feature (79)..(145): Pfam Name: Eukaryotic aspartyl protease Pfam Description: Eukaryotic aspartyl protease
  misc_feature (56)..(145): Homolog of NCBI NO: 34912520 NR Description: chloroplast nucleoid DNA-binding protein
MTSSIPKLLLLLFFLSHRSPIARAGDDGSYKVLSMGSPRTDSVCSQSKAVPSSSAGAATVPLHHRHGPCSPLPTKKMPTLEETLHRDQLRAAYIQRKFSGGGGAGGDVQRSDATVPTALGTSLNTLEYLITVGLGSPATSQTMLIRHRQRRVVGAVQAVLAVPLPGGPTLRPQLVEHVLPVLLRLRRLRAARPGRQRLLLQLPVPVHCHVRRRLQHHGDLQLRHARAGLQRRQELPVRVQQRGVGLQRPDRRAHGARRRRAVAGVTDGGDARQGLLVLPPADAELLRVPHARRCWR

SEQ ID NO: 7163 - protein, 262 aa, Zea mays subsp. mays
  peptide (1)..(262): Ceres Seq. ID no. 12352497
  misc_feature (45)..(111): Pfam Name: Eukaryotic aspartyl protease Pfam Description: Eukaryotic aspartyl protease
  misc_feature (22)..(111): Homolog of NCBI NO: 34912520 NR Description: chloroplast nucleoid DNA-binding protein
MGSPRTDSVCSQSKAVPSSSAGAATVPLHHRHGPCSPLPTKKMPTLEETLHRDQLRAAYIQRKFSGGGGAGGDVQRSDATVPTALGTSLNTLEYLITVGLGSPATSQTMLIRHRQRRVVGAVQAVLAVPLPGGPTLRPQLVEHVLPVLLRLRRLRAARPGRQRLLLQLPVPVHCHVRRRLQHHGDLQLRHARAGLQRRQELPVRVQQRGVGLQRPDRRAHGARRRRAVAGVTDGGDARQGLLVLPPADAELLRVPHARRCWR

SEQ ID NO: 7164 - DNA, 1650 bp, Zea mays subsp. mays
  misc_feature (1)..(1650): Ceres Seq. ID no. 12373548
  misc_feature: MA Experiment ID: 108523 Result: Up-regulated in Transcription
  misc_feature: MA Experiment 108523 PARAMETER Experiment Name: Zm_42deg_Heat_P Parameter: Age (day) Value: 8
  misc_feature: MA Experiment 108523 PARAMETER Experiment Name: Zm_42deg_Heat_P Parameter: Organism Value: Zea mays
  misc_feature: MA Experiment 108523 PARAMETER Experiment Name: Zm_42deg_Heat_P Parameter: Plant Line Value: 35A19
  misc_feature: MA Experiment 108523 PARAMETER Experiment Name: Zm_42deg_Heat_P Parameter: Temperature (deg C) Value: 42 vs. 22
  misc_feature: MA Experiment 108523 PARAMETER Experiment Name: Zm_42deg_Heat_P Parameter: Timepoint (hr) Value: 6
  misc_feature: MA Experiment 108523 PARAMETER Experiment Name: Zm_42deg_Heat_P Parameter: Tissue Value: Aerial
aaagaaaaattagaaaccctagcgatgctgcagatccgcctgagcaagattggctcgtcggactccggcgctgccgccaccggctcggcagccgccgccggtgccgccgccgctgtggggtcggctgcggcgctgggcggcggcatcccggaatcggtcaccgtggcatgccccgaccacctggtgatcgcggacctacccgtcgcgaagagcctcggtgccgtcacgacctccgctgccgccgccacgcgcgccatcggccgtcgctcccgtcgcccgctcggggagcgcgtccacatctgctcccgctgcgagttccccatcgccatctacggccgcctcatcccttgtgaacatgccttttgtttaacctgtgcaagaagtgattccagctgctatctttgtgatgagcgcattcagaagatacaaagtgtgaaaatgatggaggggattttcatctgtgctgcaccgatgtgtctcaagtcattccttaagaaagcagattttgagtttcatgttcccgatgtccatgccaacctcctgcaaactaatctagagaaggaagaagaacgcaatgagccagatgctcctaacatctcccgtgcttctgcaggggatacacaaagacaatctcaaatgcctgaaatgtctactgcacgggctccttcaaggccaggtgtttcacaagatcgtgatgaacgctctcgctaccaccagtccagggagcaaacaccactgaggcccccaaccctttcaaaaccaccttcattccatggtcggcattcgtacccaccaggggatactcaggccgagaacaatccacctcaaggattcgaccgggcctacaactgggcttctcaatcacggcaagagagcccaggtgcggcgactccacttcgccaagaatctgaccaaagtattcaggacaagcagcaattgatggctaatgcaccttttatgtttccgccgattcctcctcaccagggaaactttatgatgcctatgaatatgaatcagcctttgattcctaatgcaccattcaattatcctctccagcaagatggaaaccctcagtacttctctgcccctttccagatgcagctaccagatactggatcagaacaaggttccatgtcaaatgtcccagcctccagctggtcctatgagtttccctgaggggcctcagcgcccatggggtatgaggctgatgagtaatccatttcaatcgatggcccttggtcagggaatgattgatggtgcgggtgatcctcaaggtggtggtggccttgccttcatgcaagctggttttgggggcatgcctgatggctccatgaatacaggcatgcccgatagaggtgatggaaggggtattctagcacagatgcatatgcaaatgcagatgtcacttcccccacctccgcctacacaacctcctccaggttcacagcaaacgtttaacaggacttgatatttttttttgtacgaattgatggcaactcccagaattgcatgtcaattcattgagcaaattgtaattttgtcgtttttggcatgtaacctgtggactagatggctcagttctgttccctggttggataggagcctgtattatgctataactcctgtttgaatgaaatgttccgaaatttc

SEQ ID NO: 7165 - protein, 391 aa, Zea mays subsp. mays
  peptide (1)..(391): Ceres Seq. ID no. 12373549
  misc_feature (9)..(391): Homolog of NCBI NO: 37535662 NR Description: hypothetical protein [Oryza sativa (japonica group)] >gi|22128705|gb|AAM92817.1| hypothetical protein [Oryza
  misc_feature (51)..(266): Homolog of NCBI NO: 15240902 NR Description: putative protein; protein id: At5g01160.1, by cDNA: 105564. [Arabidopsis thaliana] >gi|11285620|pir||T45956
  misc_feature (51)..(266): Homolog of NCBI NO: 21536615 NR Description: unknown [Arabidopsis thaliana]
  misc_feature (94)..(379): Homolog of NCBI NO: 26339810 NR Description: unnamed protein product [Mus musculus]
  misc_feature (94)..(363): Homolog of NCBI NO: 13376204 NR Description: E-cadherin binding protein E7 [Homo sapiens]
  misc_feature (94)..(363): Homolog of NCBI NO: 34785057 NR Description: E-cadherin binding protein E7 [Homo sapiens]
  misc_feature (94)..(363): Homolog of NCBI NO: 34864203 NR Description: similar to Casitas B-lineage lymphoma-like 1
  misc_feature (94)..(363): Homolog of NCBI NO: 9622093 NR Description: E-cadherin binding protein E7 [Mus musculus]
  misc_feature (94)..(363): Homolog of NCBI NO: 19527264 NR Description: E-cadherin binding protein E7 [Mus musculus]
  misc_feature (86)..(229): Homolog of NCBI NO: 28574352 NR Description: CG10263-PD [Drosophila melanogaster]
KEKLETLAMLQIRLSKIGSSDSGAAATGSAAAAGAAAAVGSAAALGGGIPESVTVACPDHLVIADLPVAKSLGAVTTSAAAATRAIGRRSRRPLGERVHICSRCEFPIAIYGRLIPCEHAFCLTCARSDSSCYLCDERIQKIQSVKMMEGIFICAAPMCLKSFLKKADFEFHVPDVHANLLQTNLEKEEERNEPDAPNISRASAGDTQRQSQMPEMSTARAPSRPGVSQDRDERSRYHQSREQTPLRPPTLSKPPSFHGRHSYPPGDTQAENNPPQGFDRAYNWASQSRQESPGAATPLRQESDQSIQDKQQLMANAPFMFPPIPPHQGNFMMPMNMNQPLIPNAPFNYPLQQDGNPQYFSAPFQMQLPDTGSEQGSMSNVPASSWSYEFP

SEQ ID NO: 7166 - protein, 383 aa, Zea mays subsp. mays
  peptide (1)..(383): Ceres Seq. ID no. 12373550
  misc_feature (1)..(383): Homolog of NCBI NO: 37535662 NR Description: hypothetical protein [Oryza sativa (japonica group)] >gi|22128705|gb|AAM92817.1| hypothetical protein [Oryza
  misc_feature (43)..(258): Homolog of NCBI NO: 15240902 NR Description: putative protein; protein id: At5g01160.1, by cDNA: 105564. [Arabidopsis thaliana] >gi|11285620|pir||T45956
  misc_feature (43)..(258): Homolog of NCBI NO: 21536615 NR Description: unknown [Arabidopsis thaliana]
  misc_feature (86)..(371): Homolog of NCBI NO: 26339810 NR Description: unnamed protein product [Mus musculus]
  misc_feature (86)..(355): Homolog of NCBI NO: 13376204 NR Description: E-cadherin binding protein E7 [Homo sapiens]
  misc_feature (86)..(355): Homolog of NCBI NO: 34785057 NR Description: E-cadherin binding protein E7 [Homo sapiens]
  misc_feature (86)..(355): Homolog of NCBI NO: 34864203 NR Description: similar to Casitas B-lineage lymphoma-like 1
  misc_feature (86)..(355): Homolog of NCBI NO: 9622093 NR Description: E-cadherin binding protein E7 [Mus musculus]
  misc_feature (86)..(355): Homolog of NCBI NO: 19527264 NR Description: E-cadherin binding protein E7 [Mus musculus]
  misc_feature (78)..(221): Homolog of NCBI NO: 28574352 NR Description: CG10263-PD [Drosophila melanogaster]
MLQIRLSKIGSSDSGAAATGSAAAAGAAAAVGSAAALGGGIPESVTVACPDHLVIADLPVAKSLGAVTTSAAAATRAIGRRSRRPLGERVHICSRCEFPIAIYGRLIPCEHAFCLTCARSDSSCYLCDERIQKIQSVKMMEGIFICAAPMCLKSFLKKADFEFHVPDVHANLLQTNLEKEEERNEPDAPNISRASAGDTQRQSQMPEMSTARAPSRPGVSQDRDERSRYHQSREQTPLRPPTLSKPPSFHGRHSYPPGDTQAENNPPQGFDRAYNWASQSRQESPGAATPLRQESDQSIQDKQQLMANAPFMFPPIPPHQGNFMMPMNMNQPLIPNAPFNYPLQQDGNPQYFSAPFQMQLPDTGSEQGSMSNVPASSWSYEFP

SEQ ID NO: 7167 - protein, 245 aa, Zea mays subsp. mays
  peptide (1)..(245): Ceres Seq. ID no. 12373551
  misc_feature (1)..(245): Homolog of NCBI NO: 37535662 NR Description: hypothetical protein [Oryza sativa (japonica group)] >gi|22128705|gb|AAM92817.1| hypothetical protein [Oryza
  misc_feature (1)..(120): Homolog of NCBI NO: 15240902 NR Description: putative protein; protein id: At5g01160.1, by cDNA: 105564. [Arabidopsis thaliana] >gi|11285620|pir||T45956
  misc_feature (1)..(120): Homolog of NCBI NO: 21536615 NR Description: unknown [Arabidopsis thaliana]
  misc_feature (1)..(233): Homolog of NCBI NO: 26339810 NR Description: unnamed protein product [Mus musculus]
  misc_feature (1)..(217): Homolog of NCBI NO: 13376204 NR Description: E-cadherin binding protein E7 [Homo sapiens]
  misc_feature (1)..(217): Homolog of NCBI NO: 34785057 NR Description: E-cadherin binding protein E7 [Homo sapiens]
  misc_feature (1)..(217): Homolog of NCBI NO: 34864203 NR Description: similar to Casitas B-lineage lymphoma-like 1
  misc_feature (1)..(217): Homolog of NCBI NO: 9622093 NR Description: E-cadherin binding protein E7 [Mus musculus]
  misc_feature (1)..(217): Homolog of NCBI NO: 19527264 NR Description: E-cadherin binding protein E7 [Mus musculus]
  misc_feature (1)..(83): Homolog of NCBI NO: 28574352 NR Description: CG10263-PD [Drosophila melanogaster]
MMEGIFICAAPMCLKSFLKKADFEFHVPDVHANLLQTNLEKEEERNEPDAPNISRASAGDTQRQSQMPEMSTARAPSRPGVSQDRDERSRYHQSREQTPLRPPTLSKPPSFHGRHSYPPGDTQAENNPPQGFDRAYNWASQSRQESPGAATPLRQESDQSIQDKQQLMANAPFMFPPIPPHQGNFMMPMNMNQPLIPNAPFNYPLQQDGNPQYFSAPFQMQLPDTGSEQGSMSNVPASSWSYEFP

SEQ ID NO: 7168 - DNA, 1346 bp, Zea mays subsp. mays
  misc_feature (1)..(1346): Ceres Seq. ID no. 12412964
  misc_feature: MA Experiment ID: 108529 Result: Down-regulated in Transcription
  misc_feature: MA Experiment 108529 PARAMETER Experiment Name: Zm_Imbibed_Seeds_P Parameter: Age (day) Value: 5 vs. 2
  misc_feature: MA Experiment 108529 PARAMETER Experiment Name: Zm_Imbibed_Seeds_P Parameter: Organism Value: Zea mays
  misc_feature: MA Experiment 108529 PARAMETER Experiment Name: Zm_Imbibed_Seeds_P Parameter: Plant Line Value: 35A19
  misc_feature: MA Experiment 108529 PARAMETER Experiment Name: Zm_Imbibed_Seeds_P Parameter: Tissue Value: Roots vs. Embryo
  misc_feature: MA Experiment ID: 108535 Result: Down-regulated in Transcription
  misc_feature: MA Experiment 108535 PARAMETER Experiment Name: Zm_Meristem_P Parameter: Age (day) Value: 8
  misc_feature: MA Experiment 108535 PARAMETER Experiment Name: Zm_Meristem_P Parameter: Organism Value: Zea mays
  misc_feature: MA Experiment 108535 PARAMETER Experiment Name: Zm_Meristem_P Parameter: Plant Line Value: 35A19
  misc_feature: MA Experiment 108535 PARAMETER Experiment Name: Zm_Meristem_P Parameter: Tissue Value: Root Meristem vs. Above Root Meristem
  misc_feature: MA Experiment ID: 108545 Result: Up-regulated in Transcription
  misc_feature: MA Experiment 108545 PARAMETER Experiment Name: Zm_Imbibed_Seeds_P Parameter: Age (day) Value: 3 vs. 2
  misc_feature: MA Experiment 108545 PARAMETER Experiment Name: Zm_Imbibed_Seeds_P Parameter: Organism Value: Zea mays
  misc_feature: MA Experiment 108545 PARAMETER Experiment Name: Zm_Imbibed_Seeds_P Parameter: Plant Line Value: 35A19
  misc_feature: MA Experiment 108545 PARAMETER Experiment Name: Zm_Imbibed_Seeds_P Parameter: Tissue Value: Aerial vs. Embryo
  misc_feature: MA Experiment ID: 108546 Result: Down-regulated in Transcription
  misc_feature: MA Experiment 108546 PARAMETER Experiment Name: Zm_Imbibed_Seeds_P Parameter: Age (day) Value: 3 vs. 2
  misc_feature: MA Experiment 108546 PARAMETER Experiment Name: Zm_Imbibed_Seeds_P Parameter: Organism Value: Zea mays
  misc_feature: MA Experiment 108546 PARAMETER Experiment Name: Zm_Imbibed_Seeds_P Parameter: Plant Line Value: 35A19
  misc_feature: MA Experiment 108546 PARAMETER Experiment Name: Zm_Imbibed_Seeds_P Parameter: Tissue Value: Roots vs. Embryo
  misc_feature: MA Experiment ID: 108547 Result: Up-regulated in Transcription
  misc_feature: MA Experiment 108547 PARAMETER Experiment Name: Zm_Imbibed_Seeds_P Parameter: Age (day) Value: 4 vs. 2
  misc_feature: MA Experiment 108547 PARAMETER Experiment Name: Zm_Imbibed_Seeds_P Parameter: Organism Value: Zea mays
  misc_feature: MA Experiment 108547 PARAMETER Experiment Name: Zm_Imbibed_Seeds_P Parameter: Plant Line Value: 35A19
  misc_feature: MA Experiment 108547 PARAMETER Experiment Name: Zm_Imbibed_Seeds_P Parameter: Tissue Value: Aerial vs. Embryo
  misc_feature: MA Experiment ID: 108689 Result: Up-regulated in Transcription
  misc_feature: MA Experiment 108689 PARAMETER Experiment Name: Zm_Drought_Roots_P Parameter: Age (day) Value: 9
  misc_feature: MA Experiment 108689 PARAMETER Experiment Name: Zm_Drought_Roots_P Parameter: Organism Value: Zea mays
  misc_feature: MA Experiment 108689 PARAMETER Experiment Name: Zm_Drought_Roots_P Parameter: Plant Line Value: 35A19
  misc_feature: MA Experiment 108689 PARAMETER Experiment Name: Zm_Drought_Roots_P Parameter: Timepoint (hr) Value: 24
  misc_feature: MA Experiment 108689 PARAMETER Experiment Name: Zm_Drought_Roots_P Parameter: Tissue Value: Roots
  misc_feature: MA Experiment 108689 PARAMETER Experiment Name: Zm_Drought_Roots_P Parameter: Treatment Value: Drought vs. No Drought
  misc_feature: MA Experiment ID: 20000479 Result: Down-regulated in Transcription
  misc_feature: MA Experiment 20000479 PARAMETER Experiment Name: Zm_Drought_P Parameter: Age (day) Value: 10
  misc_feature: MA Experiment 20000479 PARAMETER Experiment Name: Zm_Drought_P Parameter: Organism Value: Zea mays
  misc_feature: MA Experiment 20000479 PARAMETER Experiment Name: Zm_Drought_P Parameter: Plant Line Value: 35A19
  misc_feature: MA Experiment 20000479 PARAMETER Experiment Name: Zm_Drought_P Parameter: Timepoint (hr) Value: 48
  misc_feature: MA Experiment 20000479 PARAMETER Experiment Name: Zm_Drought_P Parameter: Tissue Value: Aerial
  misc_feature: MA Experiment 20000479 PARAMETER Experiment Name: Zm_Drought_P Parameter: Treatment Value: Drought vs. No Drought
  misc_feature: MA Experiment ID: 20000480 Result: Down-regulated in Transcription
  misc_feature: MA Experiment 20000480 PARAMETER Experiment Name: Zm_Drought_P Parameter: Age (day) Value: 11
  misc_feature: MA Experiment 20000480 PARAMETER Experiment Name: Zm_Drought_P Parameter: Organism Value: Zea mays
  misc_feature: MA Experiment 20000480 PARAMETER Experiment Name: Zm_Drought_P Parameter: Plant Line Value: 35A19
  misc_feature: MA Experiment 20000480 PARAMETER Experiment Name: Zm_Drought_P Parameter: Timepoint (hr) Value: 72
  misc_feature: MA Experiment 20000480 PARAMETER Experiment Name: Zm_Drought_P Parameter: Tissue Value: Aerial
  misc_feature: MA Experiment 20000480 PARAMETER Experiment Name: Zm_Drought_P Parameter: Treatment Value: Drought vs. No Drought
  misc_feature: MA Experiment ID: 20000626 Result: Down-regulated in Transcription
  misc_feature: MA Experiment 20000626 PARAMETER Experiment Name: Zm_Herbicide-Treatments_P Parameter: Timepoint (hr) Value: 12
  misc_feature: MA Experiment 20000626 PARAMETER Experiment Name: Zm_Herbicide-Treatments_P Parameter: Tissue Value: Aerial
  misc_feature: MA Experiment 20000626 PARAMETER Experiment Name: Zm_Herbicide-Treatments_P Parameter: Treatment Value: Roundup vs. No Treatment
agcgccggcgctgtagtgtgcagccctcgctccttctggatctctgcacccttcgccacacttcgggggcgcgcgcgcggacatggaggtcgaataccacgaggagtacgtgcggagctcgagaggcgtgcagctcttcacctgcggctggctgcccgctgccgcatcgcccaaggcgctcgtcttcctctgccacggctacggcatggagtgcagtggcttcatgagagaatgcggcgtgcggctggcggcggccgggtacggcgtgttcgggatggactacgagggccacggcaagtcgatgggcgcgcgctgctacatccgcagtttccgccgcctcgtcgacgactgcggccatttcttcaagtccgtctgcgagcttgaggagtaccggggcaagagccggttcctgtacggcgagtccatgggtggcgcggtggcgctggctgctgcacaccgaggaccccgccttctgggacggcgccgtcctcgtggcgcccatgtgcaagatatcggagaaggtgaagccgcaccctctggtgatcacgctcctgacgcaggtggaggacgtgatccccaggtggaagatcgtgcccaccaagcaggacgtcatcgacgccgccttcaaggaccccgtcaagcgtgaaaagatcaggaggaaccagctgatctaccaggacaagccgcggctcaagactgcgttggagatgctcaggaccagcatgtacatagaagacagcttgtcacaggtgacgctgccgttcttcgtcctgcacggcgaggccgacacggtgacggacccggaggtgagccgcgcgctgtacgagcgttcggccagcgccgacaagaccatcaagctgtacccggggatgtggcacggcctcaccgccggggagcccgacgagaacgtggaggccatcttctccgacatcgtgtcctggctcaaccaccgcagccggagctgggccgtggaggaacgccatatgaccaggaagctggcgccagctccggccaagtccatcgaaggccacggcaccgtggacggcaaagtgcacacacaacaagggcgccctcggcggcgccagggcttcctctgcgggcttgccggccggacgcatcaccacgcggagatgtgaaagatagaatcgccgtctcggtcccggatcagatgggcgcctgctttcttcaaccatggcaaataaaggaatgatgacctgcggtttgtaatatagaggtcttattatgcttgtcaaagttatgtatgaccaatcattcccgtctggtgcagattcgaactcatgctcagatatatgtaatgtaagattataacgctattagcattctgg

SEQ ID NO: 7169 - protein, 211 aa, Zea mays subsp. mays
  peptide (1)..(211): Ceres Seq. ID no. 12412965
  misc_feature (1)..(142): Pfam Name: alpha/beta hydrolase fold Pfam Description: alpha/beta hydrolase fold
  misc_feature (1)..(211): Homolog of NCBI NO: 34894592 NR Description: phospholipase-like protein [Oryza sativa
  misc_feature (1)..(211): Homolog of NCBI NO: 30695682 NR Description: esterase/lipase/thioesterase family [Arabidopsis
  misc_feature (1)..(204): Homolog of NCBI NO: 18407407 NR Description: putative phospholipase; protein id: At2g47630.1, by cDNA: 33373., supported by cDNA: gi_16323213 [Arabidopsis >gi|16323214|gb|AAL15341.1| At2g47630/F17A22.2 [Arabidopsis
  misc_feature (1)..(204): Homolog of NCBI NO: 21592863 NR Description: putative phospholipase [Arabidopsis thaliana]
  misc_feature (1)..(204): Homolog of NCBI NO: 7487574 NR Description: probable phospholipase [imported] - Arabidopsis
  misc_feature (1)..(151): Homolog of NCBI NO: 7487948 NR Description: lysophospholipase homolog F12L6.8 - Arabidopsis >gi|3355471|gb|AAC27833.1| putative phospholipase [Arabidopsis >gi|13877687|gb|AAK43921.1|AF370602_1 putative phospholipase
  misc_feature (1)..(151): Homolog of NCBI NO: 30687883 NR Description: esterase/lipase/thioesterase family [Arabidopsis >gi|19423964|gb|AAL87258.1| putative phospholipase [Arabidopsis >gi|21689759|gb|AAM67523.1| putative phospholipase [Arabidopsis
  misc_feature (1)..(152): Homolog of NCBI NO: 30687879 NR Description: hydrolase, alpha/beta fold family [Arabidopsis >gi|20197113|gb|AAC27832.2| putative phospholipase; alternative
  misc_feature (1)..(152): Homolog of NCBI NO: 15233200 NR Description: lipase -like protein; protein id: At3g55180.1
  misc_feature (1)..(152): Homolog of NCBI NO: 7487947 NR Description: lysophospholipase homolog F12L6.7 - Arabidopsis
MCKISEKVKPHPLVITLLTQVEDVIPRWKIVPTKQDVIDAAFKDPVKREKIRRNQLIYQDKPRLKTALEMLRTSMYIEDSLSQVTLPFFVLHGEADTVTDPEVSRALYERSASADKTIKLYPGMWHGLTAGEPDENVEAIFSDIVSWLNHRSRSWAVEERHMTRKLAPAPAKSIEGHGTVDGKVHTQQGRPRRRQGFLCGLAGRTHHHAEM

SEQ ID NO: 7170 - protein, 187 aa, Zea mays subsp. mays
  peptide (1)..(187): Ceres Seq. ID no. 12412966
  misc_feature (60)..(128): Pfam Name: alpha/beta hydrolase fold Pfam Description: alpha/beta hydrolase fold
  misc_feature (3)..(128): Homolog of NCBI NO: 15233200 NR Description: lipase -like protein; protein id: At3g55180.1
  misc_feature (7)..(128): Homolog of NCBI NO: 34894592 NR Description: phospholipase-like protein [Oryza sativa
  misc_feature (2)..(128): Homolog of NCBI NO: 18407407 NR Description: putative phospholipase; protein id: At2g47630.1, by cDNA: 33373., supported by cDNA: gi_16323213 [Arabidopsis >gi|16323214|gb|AAL15341.1| At2g47630/F17A22.2 [Arabidopsis
  misc_feature (50)..(128): Homolog of NCBI NO: 7487574 NR Description: probable phospholipase [imported] - Arabidopsis
  misc_feature (3)..(129): Homolog of NCBI NO: 30687883 NR Description: esterase/lipase/thioesterase family [Arabidopsis >gi|19423964|gb|AAL87258.1| putative phospholipase [Arabidopsis >gi|21689759|gb|AAM67523.1| putative phospholipase [Arabidopsis
  misc_feature (2)..(128): Homolog of NCBI NO: 30687879 NR Description: hydrolase, alpha/beta fold family [Arabidopsis >gi|20197113|gb|AAC27832.2| putative phospholipase; alternative
  misc_feature (3)..(129): Homolog of NCBI NO: 7487948 NR Description: lysophospholipase homolog F12L6.8 - Arabidopsis >gi|3355471|gb|AAC27833.1| putative phospholipase [Arabidopsis >gi|13877687|gb|AAK43921.1|AF370602_1 putative phospholipase
  misc_feature (42)..(128): Homolog of NCBI NO: 21592863 NR Description: putative phospholipase [Arabidopsis thaliana]
  misc_feature (4)..(128): Homolog of NCBI NO: 30695682 NR Description: esterase/lipase/thioesterase family [Arabidopsis
  misc_feature (9)..(128): Homolog of NCBI NO: 7487947 NR Description: lysophospholipase homolog F12L6.7 - Arabidopsis
MEVEYHEEYVRSSRGVQLFTCGWLPAAASPKALVFLCHGYGMECSGFMRECGVRLAAAGYGVFGMDYEGHGKSMGARCYIRSFRRLVDDCGHFFKSVCELEEYRGKSRFLYGESMGGAVALAAAHRGPRLLGRRRPRGAHVQDIGEGEAAPSGDHAPDAGGGRDPQVEDRAHQAGRHRRRLQGPRQA

SEQ ID NO: 7171 - protein, 146 aa, Zea mays subsp. mays
  peptide (1)..(146): Ceres Seq. ID no. 12412967
  misc_feature (19)..(87): Pfam Name: alpha/beta hydrolase fold Pfam Description: alpha/beta hydrolase fold
  misc_feature (1)..(87): Homolog of NCBI NO: 34894592 NR Description: phospholipase-like protein [Oryza sativa
  misc_feature (1)..(87): Homolog of NCBI NO: 30695682 NR Description: esterase/lipase/thioesterase family [Arabidopsis
  misc_feature (1)..(87): Homolog of NCBI NO: 18407407 NR Description: putative phospholipase; protein id: At2g47630.1, by cDNA: 33373., supported by cDNA: gi_16323213 [Arabidopsis >gi|16323214|gb|AAL15341.1| At2g47630/F17A22.2 [Arabidopsis
  misc_feature (1)..(87): Homolog of NCBI NO: 21592863 NR Description: putative phospholipase [Arabidopsis thaliana]
  misc_feature (9)..(87): Homolog of NCBI NO: 7487574 NR Description: probable phospholipase [imported] - Arabidopsis
  misc_feature (1)..(88): Homolog of NCBI NO: 7487948 NR Description: lysophospholipase homolog F12L6.8 - Arabidopsis >gi|3355471|gb|AAC27833.1| putative phospholipase [Arabidopsis >gi|13877687|gb|AAK43921.1|AF370602_1 putative phospholipase
  misc_feature (1)..(88): Homolog of NCBI NO: 30687883 NR Description: esterase/lipase/thioesterase family [Arabidopsis >gi|19423964|gb|AAL87258.1| putative phospholipase [Arabidopsis >gi|21689759|gb|AAM67523.1| putative phospholipase [Arabidopsis
  misc_feature (1)..(87): Homolog of NCBI NO: 30687879 NR Description: hydrolase, alpha/beta fold family [Arabidopsis >gi|20197113|gb|AAC27832.2| putative phospholipase; alternative
  misc_feature (1)..(87): Homolog of NCBI NO: 15233200 NR Description: lipase -like protein; protein id: At3g55180.1
  misc_feature (1)..(87): Homolog of NCBI NO: 7487947 NR Description: lysophospholipase homolog F12L6.7 - Arabidopsis
MECSGFMRECGVRLAAAGYGVFGMDYEGHGKSMGARCYIRSFRRLVDDCGHFFKSVCELEEYRGKSRFLYGESMGGAVALAAAHRGPRLLGRRRPRGAHVQDIGEGEAAPSGDHAPDAGGGRDPQVEDRAHQAGRHRRRLQGPRQA

SEQ ID NO: 7172 - DNA, 1463 bp, Zea mays subsp. mays
  misc_feature (1)..(1463): Ceres Seq. ID no. 12405475
  misc_feature: MA Experiment ID: 20000535 Result: Down-regulated in Transcription
  misc_feature: MA Experiment 20000535 PARAMETER Experiment Name: Zm_Hybrid_Seed_Dev_P Parameter: DAP Value: 30 vs. 12
  misc_feature: MA Experiment 20000535 PARAMETER Experiment Name: Zm_Hybrid_Seed_Dev_P Parameter: Organism Value: Zea mays
  misc_feature: MA Experiment 20000535 PARAMETER Experiment Name: Zm_Hybrid_Seed_Dev_P Parameter: Plant Line Value: 35A19
  misc_feature: MA Experiment 20000535 PARAMETER Experiment Name: Zm_Hybrid_Seed_Dev_P Parameter: Tissue Value: Embryo vs. Unfert Floret
agcgtgaggagttcgaaagaaagggagaaaatgttatgcttgcttgccttgagggaagcgtcgccgtctgcccacacccgcaccgcacccaaccgcagcggagccgggagccgaaggccgagggtattcttccttcgccgctaagcacgcctcctctccacaggcagccgacccaggggaagcgtcgccgtctgcccccaccccgaatctgatgcttcatcgattggttctaatcctcactacctccatattcatgcacgagattgcgggtgattaggagcagggaccaatcatattgaactcagatttggagcggagcaggaggggagccattgcccgtgttctgattgctgctagaggtcgagggatggtaggggtgctgtcgaatcgcgtggatcgggacgacctcaaggccggggatcacatctacacttggcgggccgcctacatctacgcccaccacggaatatatgctggagatggcatggttatccattttacaagggcagctggacatgagattggaacaggaacattcttggactggttcctttatagctcctctccggcagcaactgagggtcctccctgccagaaatgtgggcacctagtcaagtccgatggggtcatcacctcttgcctcgattgcttcttagatgggggcagcctgtacctctttgactacgctgtgtcgcctgctttcttcctcgccaaagcacggggaggaacgtgcaccctggctgcctctgaccccagtgacgttgtgatccaccgtgcacggtacctcctggacaatgggtttggcatgtactccctgttcaagaacaactgcgaggacttcgccatatactgcaagactgggctgcttgtggagaccgctttcagtgttggccgtagcgggcaactttcgtctctgactgctgccttcagcgccgtggcctcgtcccccttgcgtttcctgacaaccagtgctggtggcctggcaattgtgaccagcggcatgtactgtttcgggcggtatgtgtcggatattggtgtccggcgtgatgttgtcaaggtccctgtcgaaaggcttgtggagcagaatgttacttggattcctcagtgtgtggctacagagacagatatcgcggcaggagcaccgcagcagcagttggaggttccttgtgcggttgccgaggaagcatccgttatacagcccgcggcaccgtgatccattgctgaaatgtcatcatgtaccaggtgttggcatgagacaggacaactggaactacgtacttgtgtggaattacatgtaatgatgtatctggtggtgttatgcaatccattgctgctgctgctgctaatggtgcaagcaatgatgatgatgatggatgtggttccatgaccactattaattattacagaattgagaagacctgtatttgcccttgatgattaatgatttctgttataccgttgcc

SEQ ID NO: 7173 - protein, 281 aa, Zea mays subsp. mays
  peptide (1)..(281): Ceres Seq. ID no. 12405476
  misc_feature (102)..(183): Pfam Name: NC domain Pfam Description: NC domain
  misc_feature (2)..(237): Homolog of NCBI NO: 18396282 NR Description: expressed protein; protein id: At3g02700.1, by cDNA: 6694. [Arabidopsis thaliana] >gi|6957733|gb|AAF32477.1| protein [Arabidopsis thaliana] >gi|26449424|dbj|BAC41839.1|
  misc_feature (2)..(237): Homolog of NCBI NO: 21594170 NR Description: unknown [Arabidopsis thaliana]
  misc_feature (2)..(239): Homolog of NCBI NO: 18415178 NR Description: putative protein; protein id: At5g06370.1, by cDNA: 117588., supported by cDNA: gi_14190474, supported by gi_15809733 [Arabidopsis thaliana]
  misc_feature (2)..(191): Homolog of NCBI NO: 15237330 NR Description: putative protein; protein id: At5g16360.1 thaliana] >gi|9759118|dbj|BAB09603.1| to unknown protein [Arabidopsis thaliana]
  misc_feature (182)..(237): Homolog of NCBI NO: 15237330 NR Description: putative protein; protein id: At5g16360.1 thaliana] >gi|9759118|dbj|BAB09603.1| to unknown protein [Arabidopsis thaliana]
  misc_feature (2)..(253): Homolog of NCBI NO: 18378812 NR Description: Expressed protein; protein id: At1g01225.1,
  misc_feature (2)..(253): Homolog of NCBI NO: 21592684 NR Description: unknown [Arabidopsis thaliana]
  misc_feature (2)..(236): Homolog of NCBI NO: 22328196 NR Description: unknown protein; protein id: At4g00905.1
  misc_feature (2)..(237): Homolog of NCBI NO: 15237327 NR Description: putative protein; protein id: At5g16330.1 thaliana] >gi|9759115|dbj|BAB09600.1|
  misc_feature (33)..(239): Homolog of NCBI NO: 9758417 NR Description: gb|AAF32477.1~gene_id:MHF15.11~similar to unknown
MVGVLSNRVDRDDLKAGDHIYTWRAAYIYAHHGIYAGDGMVIHFTRAAGHEIGTGTFLDWFLYSSSPAATEGPPCQKCGHLVKSDGVITSCLDCFLDGGSLYLFDYAVSPAFFLAKARGGTCTLAASDPSDVVIHRARYLLDNGFGMYSLFKNNCEDFAIYCKTGLLVETAFSVGRSGQLSSLTAAFSAVASSPLRFLTTSAGGLAIVTSGMYCFGRYVSDIGVRRDVVKVPVERLVEQNVTWIPQCVATETDIAAGAPQQQLEVPCAVAEEASVIQPAAP

SEQ ID NO: 7174 - protein, 242 aa, Zea mays subsp. mays
  peptide (1)..(242): Ceres Seq. ID no. 12405477
  misc_feature (63)..(144): Pfam Name: NC domain Pfam Description: NC domain
  misc_feature (1)..(198): Homolog of NCBI NO: 18396282 NR Description: expressed protein; protein id: At3g02700.1, by cDNA: 6694. [Arabidopsis thaliana] >gi|6957733|gb|AAF32477.1| protein [Arabidopsis thaliana] >gi|26449424|dbj|BAC41839.1|
  misc_feature (1)..(198): Homolog of NCBI NO: 21594170 NR Description: unknown [Arabidopsis thaliana]
  misc_feature (1)..(200): Homolog of NCBI NO: 18415178 NR Description: putative protein; protein id: At5g06370.1, by cDNA: 117588., supported by cDNA: gi_14190474, supported by gi_15809733 [Arabidopsis thaliana]
  misc_feature (1)..(152): Homolog of NCBI NO: 15237330 NR Description: putative protein; protein id: At5g16360.1 thaliana] >gi|9759118|dbj|BAB09603.1| to unknown protein [Arabidopsis thaliana]
  misc_feature (143)..(198): Homolog of NCBI NO: 15237330 NR Description: putative protein; protein id: At5g16360.1 thaliana] >gi|9759118|dbj|BAB09603.1| to unknown protein [Arabidopsis thaliana]
  misc_feature (1)..(214): Homolog of NCBI NO: 18378812 NR Description: Expressed protein; protein id: At1g01225.1,
  misc_feature (1)..(214): Homolog of NCBI NO: 21592684 NR Description: unknown [Arabidopsis thaliana]
  misc_feature (1)..(197): Homolog of NCBI NO: 22328196 NR Description: unknown protein; protein id: At4g00905.1
  misc_feature (1)..(198): Homolog of NCBI NO: 15237327 NR Description: putative protein; protein id: At5g16330.1 thaliana] >gi|9759115|dbj|BAB09600.1|
  misc_feature (1)..(200): Homolog of NCBI NO: 9758417 NR Description: gb|AAF32477.1~gene_id:MHF15.11~similar to unknown
MVIHFTRAAGHEIGTGTFLDWFLYSSSPAATEGPPCQKCGHLVKSDGVITSCLDCFLDGGSLYLFDYAVSPAFFLAKARGGTCTLAASDPSDVVIHRARYLLDNGFGMYSLFKNNCEDFAIYCKTGLLVETAFSVGRSGQLSSLTAAFSAVASSPLRFLTTSAGGLAIVTSGMYCFGRYVSDIGVRRDVVKVPVERLVEQNVTWIPQCVATETDIAAGAPQQQLEVPCAVAEEASVIQPAAP

SEQ ID NO: 7175 - DNA, 1428 bp, Zea mays subsp. mays
  misc_feature (1)..(1428): Ceres Seq. ID no. 12356422
  misc_feature: MA Experiment ID: 108527 Result: Down-regulated in Transcription
  misc_feature: MA Experiment 108527 PARAMETER Experiment Name: Zm_5mM_NO_P Parameter: Age (day) Value: 8
  misc_feature: MA Experiment 108527 PARAMETER Experiment Name: Zm_5mM_NO_P Parameter: Organism Value: Zea mays
  misc_feature: MA Experiment 108527 PARAMETER Experiment Name: Zm_5mM_NO_P Parameter: Plant Line Value: 35A19
  misc_feature: MA Experiment 108527 PARAMETER Experiment Name: Zm_5mM_NO_P Parameter: Timepoint (hr) Value: 6
  misc_feature: MA Experiment 108527 PARAMETER Experiment Name: Zm_5mM_NO_P Parameter: Tissue Value: Aerial
  misc_feature: MA Experiment 108527 PARAMETER Experiment Name: Zm_5mM_NO_P Parameter: Treatment Value: 5mM NO vs. No Treatment
  misc_feature: MA Experiment ID: 108528 Result: Up-regulated in Transcription
  misc_feature: MA Experiment 108528 PARAMETER Experiment Name: Zm_Imbibed_Seeds_P Parameter: Age (day) Value: 5 vs. 2
  misc_feature: MA Experiment 108528 PARAMETER Experiment Name: Zm_Imbibed_Seeds_P Parameter: Organism Value: Zea mays
  misc_feature: MA Experiment 108528 PARAMETER Experiment Name: Zm_Imbibed_Seeds_P Parameter: Plant Line Value: 35A19
  misc_feature: MA Experiment 108528 PARAMETER Experiment Name: Zm_Imbibed_Seeds_P Parameter: Tissue Value: Aerial vs. Embryo
  misc_feature: MA Experiment ID: 108530 Result: Up-regulated in Transcription
  misc_feature: MA Experiment 108530 PARAMETER Experiment Name: Zm_Imbibed_Seeds_P Parameter: Age (day) Value: 6 vs. 2
  misc_feature: MA Experiment 108530 PARAMETER Experiment Name: Zm_Imbibed_Seeds_P Parameter: Organism Value: Zea mays
  misc_feature: MA Experiment 108530 PARAMETER Experiment Name: Zm_Imbibed_Seeds_P Parameter: Plant Line Value: 35A19
  misc_feature: MA Experiment 108530 PARAMETER Experiment Name: Zm_Imbibed_Seeds_P Parameter: Tissue Value: Aerial vs. Embryo
  misc_feature: MA Experiment ID: 108543 Result: Down-regulated in Transcription
  misc_feature: MA Experiment ID: 108545 Result: Up-regulated in Transcription
  misc_feature: MA Experiment 108545 PARAMETER Experiment Name: Zm_Imbibed_Seeds_P Parameter: Age (day) Value: 3 vs. 2
  misc_feature: MA Experiment 108545 PARAMETER Experiment Name: Zm_Imbibed_Seeds_P Parameter: Organism Value: Zea mays
  misc_feature: MA Experiment 108545 PARAMETER Experiment Name: Zm_Imbibed_Seeds_P Parameter: Plant Line Value: 35A19
  misc_feature: MA Experiment 108545 PARAMETER Experiment Name: Zm_Imbibed_Seeds_P Parameter: Tissue Value: Aerial vs. Embryo
  misc_feature: MA Experiment ID: 108547 Result: Up-regulated in Transcription
  misc_feature: MA Experiment 108547 PARAMETER Experiment Name: Zm_Imbibed_Seeds_P Parameter: Age (day) Value: 4 vs. 2
  misc_feature: MA Experiment 108547 PARAMETER Experiment Name: Zm_Imbibed_Seeds_P Parameter: Organism Value: Zea mays
  misc_feature: MA Experiment 108547 PARAMETER Experiment Name: Zm_Imbibed_Seeds_P Parameter: Plant Line Value: 35A19
  misc_feature: MA Experiment 108547 PARAMETER Experiment Name: Zm_Imbibed_Seeds_P Parameter: Tissue Value: Aerial vs. Embryo
  misc_feature: MA Experiment ID: 20000492 Result: Down-regulated in Transcription
  misc_feature: MA Experiment 20000492 PARAMETER Experiment Name: Zm_Hybrid_Seed_Dev_P Parameter: DAP Value: 12
  misc_feature: MA Experiment 20000492 PARAMETER Experiment Name: Zm_Hybrid_Seed_Dev_P Parameter: Organism Value: Zea mays
  misc_feature: MA Experiment 20000492 PARAMETER Experiment Name: Zm_Hybrid_Seed_Dev_P Parameter: Plant Line Value: 35A19
  misc_feature: MA Experiment 20000492 PARAMETER Experiment Name: Zm_Hybrid_Seed_Dev_P Parameter: Tissue Value: Fert Kernel vs. Unfert Floret
acgcagggtggctaggagttgagtcgtgcagaagagacaaaggtcctcacttggctaagctagacacgtacgagtgcaggaaacaagataagtcgcggtttgcgacggcgagaagcgccggatgagtgtccactgtccacaagtccagattccaattccagtccgatcgtgagctcagctcagctccgctagtcctctccccgcacgcaccaccaccagcagcagtccagcaccatgggcggcgccctgctcctcacgctgctcctcgcggccgtgcccctctccttgggcggcggcggcggcgcgcacccgggctactccgacgacgacgagagcgcctgcacggtggacgcgggcgcggagctgctgcggcggatggaggagcgcgggcccgacaggcgcatcatcgacatcacgcacgcggtcgtgccggacctgccggcgttcgccacgggggcggtcgcggggcccatgctgcgcctcagggagtccatggcggacgggtccgagtacaacctgtcggagctgcggatggagtgccacaccggcacgcacgtcgacgcgcctggccacatcaaccaggcccacttcgccgcctgcctcgacgtcgacacgctcgacctccacgtcctcaacggacctgcattgctagttgatgtgccaagaaacacaaatataacagctgaagcgatggaattcctaaacatcccgagaggggttcgccgagttctgttcagaacactgaacactgacaggaagttgatgtggaggaagggaggtgacatgagctacgttgggtttacagaggatggcgcgcagtggttagtcgacaacaccgacataaagctagttggagttgacggtctgtcagtggcatcatttgatcacctgatctctgcccacgtggtctttttcaaaaccccggatataatccctgttgagagcctgaatctggacgacatcgaggcggggatatacatgctgcactgtctacctctcaggctggtcggagccgagggtgcaccgaccagatgcatcctcatcaagtgatcgttcctcggccggcctgctcttgctgccttgctggaggtggcgacactggaccatgccagctgagctggtgctccgtcgtgggtcgcgtggccaatatttggctcgcatgcagtcgtcgatctatatggaacagaacactgcatgcctatgtagatacgcttgtatggacaataaaggaaccgcagtacttctgtcgatgaaatacttttgggtgagccggtaatctaaaacaccaggcctacaggttaagctgggaggccctggaaggctgaggctagcggctggggatggatccagatttttattcgaatgctatttttttggtcatatttctttgattgtaaacaaataacatatatgattttctatatctct

SEQ ID NO: 7176 - protein, 271 aa, Zea mays subsp. mays
  peptide (1)..(271): Ceres Seq. ID no. 12356423
  misc_feature (57)..(257): Pfam Name: Putative cyclase Pfam Description: Putative cyclase
  misc_feature (5)..(271): Homolog of NCBI NO: 35215089 NR Description: hypothetical protein [Oryza sativa (japonica
  misc_feature (54)..(271): Homolog of NCBI NO: 15219416 NR Description: hypothetical protein; protein id: At1g44542.1 thaliana] >gi|13876507|gb|AAK43483.1|AC084807_8 hypothetical
  misc_feature (6)..(270): Homolog of NCBI NO: 18418598 NR Description: putative protein; protein id: At4g35220.1, by cDNA: 1368., supported by cDNA: gi_13937203, supported by gi_18491126 [Arabidopsis thaliana]
  misc_feature (34)..(271): Homolog of NCBI NO: 18418393 NR Description: putative protein; protein id: At4g34180.1, by cDNA: 8686., supported by cDNA: gi_14335097, supported by gi_16226602 [Arabidopsis thaliana] >gi|14335098|gb|AAK59828.1|
  misc_feature (34)..(228): Homolog of NCBI NO: 7486287 NR Description: hypothetical protein F28A23.60 - Arabidopsis >gi|2911044|emb|CAA17554.1| putative protein [Arabidopsis >gi|7270368|emb|CAB80135.1| putative protein [Arabidopsis
  misc_feature (57)..(269): Homolog of NCBI NO: 16330650 NR Description: hypothetical protein [Synechocystis sp. PCC 6803]
  misc_feature (56)..(269): Homolog of NCBI NO: 39998438 NR Description: cyclase, putative [Geobacter sulfurreducens PCA]
  misc_feature (56)..(271): Homolog of NCBI NO: 23016903 NR Description: hypothetical protein [Magnetospirillum
  misc_feature (57)..(269): Homolog of NCBI NO: 23056289 NR Description: hypothetical protein [Geobacter metallireducens]
  misc_feature (6)..(149): Homolog of NCBI NO: 7486023 NR Description: hypothetical protein F23E12.220 - Arabidopsis >gi|3080428|emb|CAA18747.1| putative protein [Arabidopsis >gi|7270474|emb|CAB80239.1| putative protein [Arabidopsis
MGGALLLTLLLAAVPLSLGGGGGAHPGYSDDDESACTVDAGAELLRRMEERGPDRRIIDITHAVVPDLPAFATGAVAGPMLRLRESMADGSEYNLSELRMECHTGTHVDAPGHINQAHFAACLDVDTLDLHVLNGPALLVDVPRNTNITAEAMEFLNIPRGVRRVLFRTLNTDRKLMWRKGGDMSYVGFTEDGAQWLVDNTDIKLVGVDGLSVASFDHLISAHVVFFKTPDIIPVESLNLDDIEAGIYMLHCLPLRLVGAEGAPTRCILIK

SEQ ID NO: 7177 - protein, 224 aa, Zea mays subsp. mays
  peptide (1)..(224): Ceres Seq. ID no. 12356424
  misc_feature (10)..(210): Pfam Name: Putative cyclase Pfam Description: Putative cyclase
  misc_feature (1)..(224): Homolog of NCBI NO: 35215089 NR Description: hypothetical protein [Oryza sativa (japonica
  misc_feature (7)..(224): Homolog of NCBI NO: 15219416 NR Description: hypothetical protein; protein id: At1g44542.1 thaliana] >gi|13876507|gb|AAK43483.1|AC084807_8 hypothetical
  misc_feature (1)..(223): Homolog of NCBI NO: 18418598 NR Description: putative protein; protein id: At4g35220.1, by cDNA: 1368., supported by cDNA: gi_13937203, supported by gi_18491126 [Arabidopsis thaliana]
  misc_feature (1)..(224): Homolog of NCBI NO: 18418393 NR Description: putative protein; protein id: At4g34180.1, by cDNA: 8686., supported by cDNA: gi_14335097, supported by gi_16226602 [Arabidopsis thaliana] >gi|14335098|gb|AAK59828.1|
  misc_feature (1)..(181): Homolog of NCBI NO: 7486287 NR Description: hypothetical protein F28A23.60 - Arabidopsis >gi|2911044|emb|CAA17554.1| putative protein [Arabidopsis >gi|7270368|emb|CAB80135.1| putative protein [Arabidopsis
  misc_feature (10)..(222): Homolog of NCBI NO: 16330650 NR Description: hypothetical protein [Synechocystis sp. PCC 6803]
  misc_feature (9)..(222): Homolog of NCBI NO: 39998438 NR Description: cyclase, putative [Geobacter sulfurreducens PCA]
  misc_feature (9)..(224): Homolog of NCBI NO: 23016903 NR Description: hypothetical protein [Magnetospirillum
  misc_feature (10)..(222): Homolog of NCBI NO: 23056289 NR Description: hypothetical protein [Geobacter metallireducens]
  misc_feature (1)..(102): Homolog of NCBI NO: 7486023 NR Description: hypothetical protein F23E12.220 - Arabidopsis >gi|3080428|emb|CAA18747.1| putative protein [Arabidopsis >gi|7270474|emb|CAB80239.1| putative protein [Arabidopsis
MEERGPDRRIIDITHAVVPDLPAFATGAVAGPMLRLRESMADGSEYNLSELRMECHTGTHVDAPGHINQAHFAACLDVDTLDLHVLNGPALLVDVPRNTNITAEAMEFLNIPRGVRRVLFRTLNTDRKLMWRKGGDMSYVGFTEDGAQWLVDNTDIKLVGVDGLSVASFDHLISAHVVFFKTPDIIPVESLNLDDIEAGIYMLHCLPLRLVGAEGAPTRCILIK

SEQ ID NO: 7178 - protein, 192 aa, Zea mays subsp. mays
  peptide (1)..(192): Ceres Seq. ID no. 12356425
  misc_feature (1)..(178): Pfam Name: Putative cyclase Pfam Description: Putative cyclase
  misc_feature (1)..(192): Homolog of NCBI NO: 35215089 NR Description: hypothetical protein [Oryza sativa (japonica
  misc_feature (1)..(192): Homolog of NCBI NO: 15219416 NR Description: hypothetical protein; protein id: At1g44542.1 thaliana] >gi|13876507|gb|AAK43483.1|AC084807_8 hypothetical
  misc_feature (1)..(191): Homolog of NCBI NO: 18418598 NR Description: putative protein; protein id: At4g35220.1, by cDNA: 1368., supported by cDNA: gi_13937203, supported by gi_18491126 [Arabidopsis thaliana]
  misc_feature (1)..(192): Homolog of NCBI NO: 18418393 NR Description: putative protein; protein id: At4g34180.1, by cDNA: 8686., supported by cDNA: gi_14335097, supported by gi_16226602 [Arabidopsis thaliana] >gi|14335098|gb|AAK59828.1|
  misc_feature (1)..(149): Homolog of NCBI NO: 7486287 NR Description: hypothetical protein F28A23.60 - Arabidopsis >gi|2911044|emb|CAA17554.1| putative protein [Arabidopsis >gi|7270368|emb|CAB80135.1| putative protein [Arabidopsis
  misc_feature (1)..(190): Homolog of NCBI NO: 16330650 NR Description: hypothetical protein [Synechocystis sp. PCC 6803]
  misc_feature (1)..(190): Homolog of NCBI NO: 39998438 NR Description: cyclase, putative [Geobacter sulfurreducens PCA]
  misc_feature (1)..(192): Homolog of NCBI NO: 23016903 NR Description: hypothetical protein [Magnetospirillum
  misc_feature (1)..(190): Homolog of NCBI NO: 23056289 NR Description: hypothetical protein [Geobacter metallireducens]
  misc_feature (1)..(70): Homolog of NCBI NO: 7486023 NR Description: hypothetical protein F23E12.220 - Arabidopsis >gi|3080428|emb|CAA18747.1| putative protein [Arabidopsis >gi|7270474|emb|CAB80239.1| putative protein [Arabidopsis
MLRLRESMADGSEYNLSELRMECHTGTHVDAPGHINQAHFAACLDVDTLDLHVLNGPALLVDVPRNTNITAEAMEFLNIPRGVRRVLFRTLNTDRKLMWRKGGDMSYVGFTEDGAQWLVDNTDIKLVGVDGLSVASFDHLISAHVVFFKTPDIIPVESLNLDDIEAGIYMLHCLPLRLVGAEGAPTRCILIK

SEQ ID NO: 7179 - DNA, 1811 bp, Zea mays subsp. mays
  misc_feature (1)..(1811): Ceres Seq. ID no. 12379731
  misc_feature: MA Experiment ID: 108534 Result: Down-regulated in Transcription
  misc_feature: MA Experiment 108534 PARAMETER Experiment Name: Zm_4deg_Cold_P Parameter: Age (hr) Value: 8
  misc_feature: MA Experiment 108534 PARAMETER Experiment Name: Zm_4deg_Cold_P Parameter: Organism Value: Zea mays
  misc_feature: MA Experiment 108534 PARAMETER Experiment Name: Zm_4deg_Cold_P Parameter: Plant Line Value: 35A19
  misc_feature: MA Experiment 108534 PARAMETER Experiment Name: Zm_4deg_Cold_P Parameter: Temperature (deg C) Value: 4 vs. 22
  misc_feature: MA Experiment 108534 PARAMETER Experiment Name: Zm_4deg_Cold_P Parameter: Timepoint (hr) Value: 6
  misc_feature: MA Experiment 108534 PARAMETER Experiment Name: Zm_4deg_Cold_P Parameter: Tissue Value: Aerial
  misc_feature: MA Experiment ID: 108689 Result: Down-regulated in Transcription
  misc_feature: MA Experiment 108689 PARAMETER Experiment Name: Zm_Drought_Roots_P Parameter: Age (day) Value: 9
  misc_feature: MA Experiment 108689 PARAMETER Experiment Name: Zm_Drought_Roots_P Parameter: Organism Value: Zea mays
  misc_feature: MA Experiment 108689 PARAMETER Experiment Name: Zm_Drought_Roots_P Parameter: Plant Line Value: 35A19
  misc_feature: MA Experiment 108689 PARAMETER Experiment Name: Zm_Drought_Roots_P Parameter: Timepoint (hr) Value: 24
  misc_feature: MA Experiment 108689 PARAMETER Experiment Name: Zm_Drought_Roots_P Parameter: Tissue Value: Roots
  misc_feature: MA Experiment 108689 PARAMETER Experiment Name: Zm_Drought_Roots_P Parameter: Treatment Value: Drought vs. No Drought
  misc_feature: MA Experiment ID: 20000629 Result: Up-regulated in Transcription
  misc_feature: MA Experiment 20000629 PARAMETER Experiment Name: Zm_Herbicide-Treatments_P Parameter: Timepoint (hr) Value: 12
  misc_feature: MA Experiment 20000629 PARAMETER Experiment Name: Zm_Herbicide-Treatments_P Parameter: Tissue Value: Aerial
  misc_feature: MA Experiment 20000629 PARAMETER Experiment Name: Zm_Herbicide-Treatments_P Parameter: Treatment Value: Trimec vs. No Treatment
  misc_feature: MA Experiment ID: 20001613 Result: Down-regulated in Transcription
  misc_feature: MA Experiment 20001613 PARAMETER Experiment Name: Zm_50ppm_KNO3_L-to-H_P Parameter: Age (day) Value: 20
  misc_feature: MA Experiment 20001613 PARAMETER Experiment Name: Zm_50ppm_KNO3_L-to-H_P Parameter: Organism Value: Zea mays
  misc_feature: MA Experiment 20001613 PARAMETER Experiment Name: Zm_50ppm_KNO3_L-to-H_P Parameter: Plant Line Value: 35A19
  misc_feature: MA Experiment 20001613 PARAMETER Experiment Name: Zm_50ppm_KNO3_L-to-H_P Parameter: Timepoint (hr) Value: 24
  misc_feature: MA Experiment 20001613 PARAMETER Experiment Name: Zm_50ppm_KNO3_L-to-H_P Parameter: Tissue Value: Roots
  misc_feature: MA Experiment 20001613 PARAMETER Experiment Name: Zm_50ppm_KNO3_L-to-H_P Parameter: Treatment Value: 50ppm KNO3 vs. 50ppm KCl
gataataaagccctacctctcacatcggcaacaggacgaggccagggcatccacgaccacgacacggacacagggagccgcccgccatgccaccgcacggcggcatgctcgcgtacgccgccctcgcgctcgcggcgctgcggctgctgctgtcctacaagtcggcgctctacgcgctgcgccgcctgtggcggtgcgccgacgagtgggcgcaggcgtaccagtaccacgaggtgccgcgcttcgccggggcccagtgcgggtgcgacggcgcagagaacccgctgttccgcaaggtcgccgcgtacgtggcggcgctgccgtcgctggaggacgccgacgctgcgtgcgtggtgtcgtcggcgtcaaggaccaacggcgggctgtccctgcagctcggcccgggccacaccgcgagggacacgtaccttggcgcgcgcctcgcgtggaccagcgcgggcggcgagcgcctggtgctgcgcgtgcgccgccacgaccgctcccgcgtgctgcgaccttacctgcagcacgtggagtccgtggcagaggagatggagcagcgccgccgcgagctgcgcctcttcgccaacaccgccgtggacgcgaccacgggcgcgccgcgctgggcgtcggcgcccttcacccacccggccacgctcgacgccgtggccatggacccggacctcaaggcccgcgtccgcgccgacctcgagagcttcctcaagggccgcgcctactaccaccgcctcggccgcgtctggcgccggagctacctcctctacggcccgccgggcaccggcaagtccacgttcgcggcggccatggccaggttcctgggctacgacgtctacgacgtcgacctgtctcgcgccgacgccgccggcgacgacctccgcgcgctgctcctgcacaccaccccgcgctcgctcgtcctcgtcgaggacctggaccggtacctgcagggcggcggcggggacgcggaggcgcgcgcggccagggtgctgagcttcatggacggcatcgcgtcgtgctgcggcgaggagcgtgtcatggtgttcaccatgcgcgggggcaaggacgccgtggacgccgcggtggtgcgcccgggccggctggacgtgcacatccagttcacgctctgcgacttcgaggccttcaaggcgctggccagcaactacctggggctcaaggaccacaagctgtacccgcaggtggaggaggggttccacgccgccggcgcccgcctcagcccgggccgagcttggcgagatcatgctggccaaccgcgcgtccccgagccgcgcgctccgcagcgtgatcaccaagctccagcgcgtcgcgtccggaggcgccgcgccgccgcggaacccggcgcacaggcggaacacgagctggtccggcgcctggaccggacagcagtgggaggaccaggcccagccggcgcgagccagcgcggtctccgtggaggtcgacgagacggccgccggggcaccggcgacgtgcggcggggtgttcggaaaggaggcgcccatgagggagttcaagaagctgtacgggctgatcaaggtcaggagccggagggagggcgccggcgccgtgccactggaaggcgacgcgcacgggccgccgacgccgggcaaccatgacagggagcggtgatcgccgtggatggtagaattgtagtggtgtgcaaaaagaaagcatttttatttctttctctttttttttcttgttattgttacagtttatcacactactctactaatgtgtcagtgactgcaagtaggaatggcaatagatgaattggatgg

SEQ ID NO: 7180 - protein, 519 aa, Zea mays subsp. mays
  peptide (1)..(519): Ceres Seq. ID no. 12379732
  misc_feature (228)..(389): Pfam Name: ATPase family associated with various cellular Pfam Description: ATPase family associated with various cellular
  misc_feature (8)..(448): Homolog of NCBI NO: 34902172 NR Description: Hypothetical protein [Oryza sativa (japonica group)] >gi|27476092|gb|AAO17023.1| Hypothetical protein [Oryza
  misc_feature (6)..(503): Homolog of NCBI NO: 37536122 NR Description: hypothetical protein [Oryza sativa (japonica group)] >gi|10122056|gb|AAG13445.1| hypothetical protein [Oryza
  misc_feature (7)..(479): Homolog of NCBI NO: 30690453 NR Description: AAA-type ATPase family [Arabidopsis thaliana]
  misc_feature (33)..(479): Homolog of NCBI NO: 25354579 NR Description: hypothetical protein At2g46620 [imported] - thaliana >gi|4415942|gb|AAD20172.1| hypothetical protein thaliana] >gi|18700084|gb|AAL77654.1| At2g46620/F13A10.15
  misc_feature (130)..(288): Homolog of NCBI NO: 15233037 NR Description: hypothetical protein; protein id: At3g28580.1, by cDNA: gi_18175626 [Arabidopsis thaliana]
  misc_feature (292)..(389): Homolog of NCBI NO: 15233037 NR Description: hypothetical protein; protein id: At3g28580.1, by cDNA: gi_18175626 [Arabidopsis thaliana]
  misc_feature (65)..(334): Homolog of NCBI NO: 9294274 NR Description: mitochondrial protein-like [Arabidopsis thaliana]
  misc_feature (65)..(334): Homolog of NCBI NO: 15233040 NR Description: unknown protein; protein id: At3g28610.1
  misc_feature (305)..(377): Homolog of NCBI NO: 9294274 NR Description: mitochondrial protein-like [Arabidopsis thaliana]
  misc_feature (305)..(377): Homolog of NCBI NO: 15233040 NR Description: unknown protein; protein id: At3g28610.1
MPPHGGMLAYAALALAALRLLLSYKSALYALRRLWRCADEWAQAYQYHEVPRFAGAQCGCDGAENPLFRKVAAYVAALPSLEDADAACVVSSASRTNGGLSLQLGPGHTARDTYLGARLAWTSAGGERLVLRVRRHDRSRVLRPYLQHVESVAEEMEQRRRELRLFANTAVDATTGAPRWASAPFTHPATLDAVAMDPDLKARVRADLESFLKGRAYYHRLGRVWRRSYLLYGPPGTGKSTFAAAMARFLGYDVYDVDLSRADAAGDDLRALLLHTTPRSLVLVEDLDRYLQGGGGDAEARAARVLSFMDGIASCCGEERVMVFTMRGGKDAVDAAVVRPGRLDVHIQFTLCDFEAFKALASNYLGLKDHKLYPQVEEGFHAAGARLSPGRAWRDHAGQPRVPEPRAPQRDHQAPARRVRRRRAAAEPGAQAEHELVRRLDRTAVGGPGPAGASQRGLRGGRRDGRRGTGDVRRGVRKGGAHEGVQEAVRADQGQEPEGGRRRRATGRRRARAADAGQP

SEQ ID NO: 7181 - protein, 513 aa, Zea mays subsp. mays
  peptide (1)..(513): Ceres Seq. ID no. 12379733
  misc_feature (222)..(383): Pfam Name: ATPase family associated with various cellular Pfam Description: ATPase family associated with various cellular
  misc_feature (2)..(442): Homolog of NCBI NO: 34902172 NR Description: Hypothetical protein [Oryza sativa (japonica group)] >gi|27476092|gb|AAO17023.1| Hypothetical protein [Oryza
  misc_feature (1)..(497): Homolog of NCBI NO: 37536122 NR Description: hypothetical protein [Oryza sativa (japonica group)] >gi|10122056|gb|AAG13445.1| hypothetical protein [Oryza
  misc_feature (1)..(473): Homolog of NCBI NO: 30690453 NR Description: AAA-type ATPase family [Arabidopsis thaliana]
  misc_feature (27)..(473): Homolog of NCBI NO: 25354579 NR Description: hypothetical protein At2g46620 [imported] - thaliana >gi|4415942|gb|AAD20172.1| hypothetical protein thaliana] >gi|18700084|gb|AAL77654.1| At2g46620/F13A10.15
  misc_feature (124)..(282): Homolog of NCBI NO: 15233037 NR Description: hypothetical protein; protein id: At3g28580.1, by cDNA: gi_18175626 [Arabidopsis thaliana]
  misc_feature (286)..(383): Homolog of NCBI NO: 15233037 NR Description: hypothetical protein; protein id: At3g28580.1, by cDNA: gi_18175626 [Arabidopsis thaliana]
  misc_feature (59)..(328): Homolog of NCBI NO: 9294274 NR Description: mitochondrial protein-like [Arabidopsis thaliana]
  misc_feature (59)..(328): Homolog of NCBI NO: 15233040 NR Description: unknown protein; protein id: At3g28610.1
  misc_feature (299)..(371): Homolog of NCBI NO: 9294274 NR Description: mitochondrial protein-like [Arabidopsis thaliana]
  misc_feature (299)..(371): Homolog of NCBI NO: 15233040 NR Description: unknown protein; protein id: At3g28610.1
MLAYAALALAALRLLLSYKSALYALRRLWRCADEWAQAYQYHEVPRFAGAQCGCDGAENPLFRKVAAYVAALPSLEDADAACVVSSASRTNGGLSLQLGPGHTARDTYLGARLAWTSAGGERLVLRVRRHDRSRVLRPYLQHVESVAEEMEQRRRELRLFANTAVDATTGAPRWASAPFTHPATLDAVAMDPDLKARVRADLESFLKGRAYYHRLGRVWRRSYLLYGPPGTGKSTFAAAMARFLGYDVYDVDLSRADAAGDDLRALLLHTTPRSLVLVEDLDRYLQGGGGDAEARAARVLSFMDGIASCCGEERVMVFTMRGGKDAVDAAVVRPGRLDVHIQFTLCDFEAFKALASNYLGLKDHKLYPQVEEGFHAAGARLSPGRAWRDHAGQPRVPEPRAPQRDHQAPARRVRRRRAAAEPGAQAEHELVRRLDRTAVGGPGPAGASQRGLRGGRRDGRRGTGDVRRGVRKGGAHEGVQEAVRADQGQEPEGGRRRRATGRRRARAADAGQP

SEQ ID NO: 7182 - protein, 438 aa, Zea mays subsp. mays
  peptide (1)..(438): Ceres Seq. ID no. 12379734
  misc_feature (125)..(438): Pfam Name: High molecular weight glutenin subunit Pfam Description: High molecular weight glutenin subunit
  misc_feature (40)..(438): Homolog of NCBI NO: 29247944 NR Description: GLP_26_54603_52153 [Giardia lamblia ATCC 50803]
  misc_feature (169)..(438): Homolog of NCBI NO: 5821145 NR Description: RNA binding protein [Homo sapiens]
  misc_feature (213)..(438): Homolog of NCBI NO: 23103907 NR Description: hypothetical protein [Azotobacter vinelandii]
IIKPYLSHRQQDEARASTTTTRTQGAARHATARRHARVRRPRARGAAAAAVLQVGALRAAPPVAVRRRVGAGVPVPRGAALRRGPVRVRRRREPAVPQGRRVRGGAAVAGGRRRCVRGVVGVKDQRRAVPAARPGPHREGHVPWRAPRVDQRGRRAPGAARAPPRPLPRAATLPAARGVRGRGDGAAPPRAAPLRQHRRGRDHGRAALGVGALHPPGHARRRGHGPGPQGPRPRRPRELPQGPRLLPPPRPRLAPELPPLRPAGHRQVHVRGGHGQVPGLRRLRRRPVSRRRRRRRPPRAAPAHHPALARPRRGPGPVPAGRRRGRGGARGQGAELHGRHRVVLRRGACHGVHHARGQGRRGRRGGAPGPAGRAHPVHALRLRGLQGAGQQLPGAQGPQAVPAGGGGVPRRRRPPQPGPSLARSCWPTARPRAARSAA

SEQ ID NO: 7183 - DNA, 1412 bp, Zea mays subsp. mays
  misc_feature (1)..(1412): Ceres Seq. ID no. 12556700
  misc_feature: MA Experiment ID: 108504 Result: Down-regulated in Transcription
  misc_feature: MA Experiment 108504 PARAMETER Experiment Name: Zm_Drought_P Parameter: Age (day) Value: 8
  misc_feature: MA Experiment 108504 PARAMETER Experiment Name: Zm_Drought_P Parameter: Organism Value: Zea mays
  misc_feature: MA Experiment 108504 PARAMETER Experiment Name: Zm_Drought_P Parameter: Plant Line Value: 35A19
  misc_feature: MA Experiment 108504 PARAMETER Experiment Name: Zm_Drought_P Parameter: Timepoint (hr) Value: 12
  misc_feature: MA Experiment 108504 PARAMETER Experiment Name: Zm_Drought_P Parameter: Tissue Value: Aerial
  misc_feature: MA Experiment 108504 PARAMETER Experiment Name: Zm_Drought_P Parameter: Treatment Value: Drought vs. No Drought
  misc_feature: MA Experiment ID: 108535 Result: Up-regulated in Transcription
  misc_feature: MA Experiment 108535 PARAMETER Experiment Name: Zm_Meristem_P Parameter: Age (day) Value: 8
  misc_feature: MA Experiment 108535 PARAMETER Experiment Name: Zm_Meristem_P Parameter: Organism Value: Zea mays
  misc_feature: MA Experiment 108535 PARAMETER Experiment Name: Zm_Meristem_P Parameter: Plant Line Value: 35A19
  misc_feature: MA Experiment 108535 PARAMETER Experiment Name: Zm_Meristem_P Parameter: Tissue Value: Root Meristem vs. Above Root Meristem
  misc_feature: MA Experiment ID: 108536 Result: Down-regulated in Transcription
  misc_feature: MA Experiment 108536 PARAMETER Experiment Name: Zm_Meristem_P Parameter: Age (day) Value: 8
  misc_feature: MA Experiment 108536 PARAMETER Experiment Name: Zm_Meristem_P Parameter: Organism Value: Zea mays
  misc_feature: MA Experiment 108536 PARAMETER Experiment Name: Zm_Meristem_P Parameter: Plant Line Value: 35A19
  misc_feature: MA Experiment 108536 PARAMETER Experiment Name: Zm_Meristem_P Parameter: Tissue Value: Shoot Meristem vs. Above Shoot Meristem
  misc_feature: MA Experiment ID: 108556 Result: Down-regulated in Transcription
  misc_feature: MA Experiment 108556 PARAMETER Experiment Name: Zm_Drought_P Parameter: Age (day) Value: 9
  misc_feature: MA Experiment 108556 PARAMETER Experiment Name: Zm_Drought_P Parameter: Organism Value: Zea mays
  misc_feature: MA Experiment 108556 PARAMETER Experiment Name: Zm_Drought_P Parameter: Plant Line Value: 35A19
  misc_feature: MA Experiment 108556 PARAMETER Experiment Name: Zm_Drought_P Parameter: Timepoint (hr) Value: 24
  misc_feature: MA Experiment 108556 PARAMETER Experiment Name: Zm_Drought_P Parameter: Tissue Value: Aerial
  misc_feature: MA Experiment 108556 PARAMETER Experiment Name: Zm_Drought_P Parameter: Treatment Value: Drought vs. No Drought
  misc_feature: MA Experiment ID: 20000108 Result: Up-regulated in Transcription
  misc_feature: MA Experiment 20000108 PARAMETER Experiment Name: Zm_Root-Tips_P Parameter: Age (day) Value: 12
  misc_feature: MA Experiment 20000108 PARAMETER Experiment Name: Zm_Root-Tips_P Parameter: Organism Value: Zea mays
  misc_feature: MA Experiment 20000108 PARAMETER Experiment Name: Zm_Root-Tips_P Parameter: Tissue Value: Root tips vs. Root mid region    35
  misc_feature: MA Experiment 20000108 PARAMETER Experiment Name: Zm_Root-Tips_P Parameter: Tissue Value: Root tips vs. Root mid region   Sequence Listing-Misc Features (4)
  misc_feature: MA Experiment ID: 20000479 Result: Down-regulated in Transcription
  misc_feature: MA Experiment 20000479 PARAMETER Experiment Name: Zm_Drought_P Parameter: Age (day) Value: 10
  misc_feature: MA Experiment 20000479 PARAMETER Experiment Name: Zm_Drought_P Parameter: Organism Value: Zea mays
  misc_feature: MA Experiment 20000479 PARAMETER Experiment Name: Zm_Drought_P Parameter: Plant Line Value: 35A19
  misc_feature: MA Experiment 20000479 PARAMETER Experiment Name: Zm_Drought_P Parameter: Timepoint (hr) Value: 48
  misc_feature: MA Experiment 20000479 PARAMETER Experiment Name: Zm_Drought_P Parameter: Tissue Value: Aerial
  misc_feature: MA Experiment 20000479 PARAMETER Experiment Name: Zm_Drought_P Parameter: Treatment Value: Drought vs. No Drought
  misc_feature: MA Experiment ID: 20000480 Result: Down-regulated in Transcription
  misc_feature: MA Experiment 20000480 PARAMETER Experiment Name: Zm_Drought_P Parameter: Age (day) Value: 11
  misc_feature: MA Experiment 20000480 PARAMETER Experiment Name: Zm_Drought_P Parameter: Organism Value: Zea mays
  misc_feature: MA Experiment 20000480 PARAMETER Experiment Name: Zm_Drought_P Parameter: Plant Line Value: 35A19
  misc_feature: MA Experiment 20000480 PARAMETER Experiment Name: Zm_Drought_P Parameter: Timepoint (hr) Value: 72
  misc_feature: MA Experiment 20000480 PARAMETER Experiment Name: Zm_Drought_P Parameter: Tissue Value: Aerial
  misc_feature: MA Experiment 20000480 PARAMETER Experiment Name: Zm_Drought_P Parameter: Treatment Value: Drought vs. No Drought
  misc_feature: MA Experiment ID: 20000492 Result: Up-regulated in Transcription
  misc_feature: MA Experiment 20000492 PARAMETER Experiment Name: Zm_Hybrid_Seed_Dev_P Parameter: DAP Value: 12
  misc_feature: MA Experiment 20000492 PARAMETER Experiment Name: Zm_Hybrid_Seed_Dev_P Parameter: Organism Value: Zea mays
  misc_feature: MA Experiment 20000492 PARAMETER Experiment Name: Zm_Hybrid_Seed_Dev_P Parameter: Plant Line Value: 35A19
  misc_feature: MA Experiment 20000492 PARAMETER Experiment Name: Zm_Hybrid_Seed_Dev_P Parameter: Tissue Value: Fert Kernel vs. Unfert Floret
cgaaaaaaccatttcttcttcctttttctatatcgcgttacgtccctacccagcgatctaggccgccgcctctcctactgcatctccctcgctctcgtcgcctcgttcgcttcgcctccgccccgccccgccccgagcagagcgcagccctatccggagctgggatggcggacgcgaagcagccagcagcagcagcagcagccacagcaggcggcagcggcagccaccggcgtgtggaagacggtcaagcccttcgttaacggcggggcctctgggatgctcgcgacctgcgtcatccagcctatcgacatggtcaaggtgaggatccagttgggtgagggctctgctggtcaggtcacaaggaacatgcttgcaaatgagggtgtccgttctttctacaagggtttgtccgccggattgctgaggcaagcgacgtacacgactgctcgtcttggatcctttagggttctaactaacaaagcagttgaaaagaatgaagggaagccattgcctctatttcagaaagcttttattggtctgactgctggtgcaattggtgcttgtgttggtagtcctgctgatctggcactcattagaatgcaagccgattcgaccctgccagttgcacaacgacgcaactataagaatgctttccatgcactctaccgtatcagtggtgatgagggagtccttgcgctttggaagggtgcaggtccaactgtggtgagagctatggcactcaatatgggtatgcttgcttcctatgaccagagtgtcgagctatttagggacaaatttggcgcaggagaaatttctactgttgttggagccagcgctgtttctggattctttgcctcagcatgcagtttgccctttgactatgtgaagacacagattcagaagatgcaacctgatgcgaatggcaagtacccatacacagggtctttggactgtgctgtgaagaccttcaagagcggtggcccattcaagttctacactggtttcccggtgtactgcgtcaggattgcaccccatgtcatgatgacctggatattcttgaatcagatccagaagtttgagaagaagatcggcatataggattcccatgggacggatacagggttgacagttctatgctattactgcttgactctgtaataacattccagctgctttcgcaccatggtagttggttttggtagagacaagtctgttacaattttttaccttagctttccaattattgtgttgcaataatcgaattaattgttgctgggggatttttttggggggttgggagggtggcatgcttttgttggctgggatgtagccataaggagagggggatactgcctagttatgtcattgaatggaattggaccatattttatacagatttttaccttcagttc

SEQ ID NO: 7184 - protein, 365 aa, Zea mays subsp. mays
  peptide (1)..(365): Ceres Seq. ID no. 12556701
  misc_feature (69)..(365): Homolog of NCBI NO: 2130089 NR Description: 2-oxoglutarate/malate translocator (clone OMT103),
  misc_feature (69)..(365): Homolog of NCBI NO: 2130090 NR Description: 2-oxoglutarate/malate translocator (clones OMT134
  misc_feature (72)..(365): Homolog of NCBI NO: 19913109 NR Description: dicarboxylate/tricarboxylate carrier [Nicotiana
  misc_feature (77)..(365): Homolog of NCBI NO: 7489246 NR Description: oxoglutarate/malate translocator - potato
  misc_feature (74)..(365): Homolog of NCBI NO: 15241167 NR Description: mitochondrial 2-oxoglutarate/malate translocator, protein id: At5g19760.1, supported by cDNA: 19510., supported by gi_13430481, supported by cDNA: gi_15810536 [Arabidopsis
  misc_feature (77)..(365): Homolog of NCBI NO: 10798640 NR Description: mitochondrial 2-oxoglutarate/malate carrier
  misc_feature (77)..(365): Homolog of NCBI NO: 19913105 NR Description: dicarboxylate/tricarboxylate carrier [Nicotiana
  misc_feature (77)..(365): Homolog of NCBI NO: 19913107 NR Description: dicarboxylate/tricarboxylate carrier [Nicotiana
  misc_feature (141)..(365): Homolog of NCBI NO: 19913111 NR Description: dicarboxylate/tricarboxylate carrier [Nicotiana
  misc_feature (148)..(365): Homolog of NCBI NO: 2331139 NR Description: 2-oxoglutarate/malate translocator [Oryza sativa]
  misc_feature (74)..(365): Homolog of NCBI NO: 15241167 NR Description: mitochondrial 2-oxoglutarate/malate translocator, protein id: At5g19760.1, supported by cDNA: 19510., supported by gi_13430481, supported by cDNA: gi_15810536 [Arabidopsis
  misc_feature (77)..(365): Homolog of NCBI NO: 10798640 NR Description: mitochondrial 2-oxoglutarate/malate carrier
  misc_feature (77)..(365): Homolog of NCBI NO: 19913105 NR Description: dicarboxylate/tricarboxylate carrier [Nicotiana
  misc_feature (77)..(365): Homolog of NCBI NO: 19913107 NR Description: dicarboxylate/tricarboxylate carrier [Nicotiana
  misc_feature (141)..(365): Homolog of NCBI NO: 19913111 NR Description: dicarboxylate/tricarboxylate carrier [Nicotiana
  misc_feature (148)..(365): Homolog of NCBI NO: 2331139 NR Description: 2-oxoglutarate/malate translocator [Oryza sativa]
  misc_feature (69)..(365): Homolog of NCBI NO: 2130089 NR Description: 2-oxoglutarate/malate translocator (clone OMT103),
  misc_feature (69)..(365): Homolog of NCBI NO: 2130090 NR Description: 2-oxoglutarate/malate translocator (clones OMT134
  misc_feature (72)..(365): Homolog of NCBI NO: 19913109 NR Description: dicarboxylate/tricarboxylate carrier [Nicotiana
  misc_feature (77)..(365): Homolog of NCBI NO: 7489246 NR Description: oxoglutarate/malate translocator - potato
RKNHFFFLFLYRVTSLPSDLGRRLSYCISLALVASFASPPPRPAPSRAQPYPELGWRTRSSQQQQQQPQQAAAAATGVWKTVKPFVNGGASGMLATCVIQPIDMVKVRIQLGEGSAGQVTRNMLANEGVRSFYKGLSAGLLRQATYTTARLGSFRVLTNKAVEKNEGKPLPLFQKAFIGLTAGAIGACVGSPADLALIRMQADSTLPVAQRRNYKNAFHALYRISGDEGVLALWKGAGPTVVRAMALNMGMLASYDQSVELFRDKFGAGEISTVVGASAVSGFFASACSLPFDYVKTQIQKMQPDANGKYPYTGSLDCAVKTFKSGGPFKFYTGFPVYCVRIAPHVMMTWIFLNQIQKFEKKIGI

SEQ ID NO: 7185 - protein, 273 aa, Zea mays subsp. mays
  peptide (1)..(273): Ceres Seq. ID no. 12556702
  misc_feature (1)..(273): Homolog of NCBI NO: 2130089 NR Description: 2-oxoglutarate/malate translocator (clone OMT103),
  misc_feature (1)..(273): Homolog of NCBI NO: 2130090 NR Description: 2-oxoglutarate/malate translocator (clones OMT134
  misc_feature (1)..(273): Homolog of NCBI NO: 19913109 NR Description: dicarboxylate/tricarboxylate carrier [Nicotiana
  misc_feature (1)..(273): Homolog of NCBI NO: 7489246 NR Description: oxoglutarate/malate translocator - potato
  misc_feature (1)..(273): Homolog of NCBI NO: 15241167 NR Description: mitochondrial 2-oxoglutarate/malate translocator, protein id: At5g19760.1, supported by cDNA: 19510., supported by gi_13430481, supported by cDNA: gi_15810536 [Arabidopsis
  misc_feature (1)..(273): Homolog of NCBI NO: 10798640 NR Description: mitochondrial 2-oxoglutarate/malate carrier
  misc_feature (1)..(273): Homolog of NCBI NO: 19913105 NR Description: dicarboxylate/tricarboxylate carrier [Nicotiana
  misc_feature (1)..(273): Homolog of NCBI NO: 19913107 NR Description: dicarboxylate/tricarboxylate carrier [Nicotiana
  misc_feature (49)..(273): Homolog of NCBI NO: 19913111 NR Description: dicarboxylate/tricarboxylate carrier [Nicotiana
  misc_feature (56)..(273): Homolog of NCBI NO: 2331139 NR Description: 2-oxoglutarate/malate translocator [Oryza sativa]
  misc_feature (1)..(273): Homolog of NCBI NO: 2130089 NR Description: 2-oxoglutarate/malate translocator (clone OMT103),
  misc_feature (1)..(273): Homolog of NCBI NO: 2130090 NR Description: 2-oxoglutarate/malate translocator (clones OMT134
  misc_feature (1)..(273): Homolog of NCBI NO: 19913109 NR Description: dicarboxylate/tricarboxylate carrier [Nicotiana
  misc_feature (1)..(273): Homolog of NCBI NO: 7489246 NR Description: oxoglutarate/malate translocator - potato
  misc_feature (1)..(273): Homolog of NCBI NO: 15241167 NR Description: mitochondrial 2-oxoglutarate/malate translocator, protein id: At5g19760.1, supported by cDNA: 19510., supported by gi_13430481, supported by cDNA: gi_15810536 [Arabidopsis
  misc_feature (1)..(273): Homolog of NCBI NO: 10798640 NR Description: mitochondrial 2-oxoglutarate/malate carrier
  misc_feature (1)..(273): Homolog of NCBI NO: 19913105 NR Description: dicarboxylate/tricarboxylate carrier [Nicotiana
  misc_feature (1)..(273): Homolog of NCBI NO: 19913107 NR Description: dicarboxylate/tricarboxylate carrier [Nicotiana
  misc_feature (49)..(273): Homolog of NCBI NO: 19913111 NR Description: dicarboxylate/tricarboxylate carrier [Nicotiana
  misc_feature (56)..(273): Homolog of NCBI NO: 2331139 NR Description: 2-oxoglutarate/malate translocator [Oryza sativa]
MLATCVIQPIDMVKVRIQLGEGSAGQVTRNMLANEGVRSFYKGLSAGLLRQATYTTARLGSFRVLTNKAVEKNEGKPLPLFQKAFIGLTAGAIGACVGSPADLALIRMQADSTLPVAQRRNYKNAFHALYRISGDEGVLALWKGAGPTVVRAMALNMGMLASYDQSVELFRDKFGAGEISTVVGASAVSGFFASACSLPFDYVKTQIQKMQPDANGKYPYTGSLDCAVKTFKSGGPFKFYTGFPVYCVRIAPHVMMTWIFLNQIQKFEKKIGI

SEQ ID NO: 7186 - protein, 262 aa, Zea mays subsp. mays
  peptide (1)..(262): Ceres Seq. ID no. 12556703
  misc_feature (1)..(262): Homolog of NCBI NO: 2130089 NR Description: 2-oxoglutarate/malate translocator (clone OMT103),
  misc_feature (1)..(262): Homolog of NCBI NO: 2130090 NR Description: 2-oxoglutarate/malate translocator (clones OMT134
  misc_feature (1)..(262): Homolog of NCBI NO: 19913109 NR Description: dicarboxylate/tricarboxylate carrier [Nicotiana
  misc_feature (1)..(262): Homolog of NCBI NO: 7489246 NR Description: oxoglutarate/malate translocator - potato
  misc_feature (1)..(262): Homolog of NCBI NO: 15241167 NR Description: mitochondrial 2-oxoglutarate/malate translocator, protein id: At5g19760.1, supported by cDNA: 19510., supported by gi_13430481, supported by cDNA: gi_15810536 [Arabidopsis
  misc_feature (1)..(262): Homolog of NCBI NO: 10798640 NR Description: mitochondrial 2-oxoglutarate/malate carrier
  misc_feature (1)..(262): Homolog of NCBI NO: 19913105 NR Description: dicarboxylate/tricarboxylate carrier [Nicotiana
  misc_feature (1)..(262): Homolog of NCBI NO: 19913107 NR Description: dicarboxylate/tricarboxylate carrier [Nicotiana
  misc_feature (38)..(262): Homolog of NCBI NO: 19913111 NR Description: dicarboxylate/tricarboxylate carrier [Nicotiana
  misc_feature (45)..(262): Homolog of NCBI NO: 2331139 NR Description: 2-oxoglutarate/malate translocator [Oryza sativa]
  misc_feature (1)..(262): Homolog of NCBI NO: 2130089 NR Description: 2-oxoglutarate/malate translocator (clone OMT103),
  misc_feature (1)..(262): Homolog of NCBI NO: 2130090 NR Description: 2-oxoglutarate/malate translocator (clones OMT134
  misc_feature (1)..(262): Homolog of NCBI NO: 19913109 NR Description: dicarboxylate/tricarboxylate carrier [Nicotiana
  misc_feature (1)..(262): Homolog of NCBI NO: 7489246 NR Description: oxoglutarate/malate translocator - potato
  misc_feature (1)..(262): Homolog of NCBI NO: 15241167 NR Description: mitochondrial 2-oxoglutarate/malate translocator, protein id: At5g19760.1, supported by cDNA: 19510., supported by gi_13430481, supported by cDNA: gi_15810536 [Arabidopsis
  misc_feature (1)..(262): Homolog of NCBI NO: 10798640 NR Description: mitochondrial 2-oxoglutarate/malate carrier
  misc_feature (1)..(262): Homolog of NCBI NO: 19913105 NR Description: dicarboxylate/tricarboxylate carrier [Nicotiana
  misc_feature (1)..(262): Homolog of NCBI NO: 19913107 NR Description: dicarboxylate/tricarboxylate carrier [Nicotiana
  misc_feature (38)..(262): Homolog of NCBI NO: 19913111 NR Description: dicarboxylate/tricarboxylate carrier [Nicotiana
  misc_feature (45)..(262): Homolog of NCBI NO: 2331139 NR Description: 2-oxoglutarate/malate translocator [Oryza sativa]
MVKVRIQLGEGSAGQVTRNMLANEGVRSFYKGLSAGLLRQATYTTARLGSFRVLTNKAVEKNEGKPLPLFQKAFIGLTAGAIGACVGSPADLALIRMQADSTLPVAQRRNYKNAFHALYRISGDEGVLALWKGAGPTVVRAMALNMGMLASYDQSVELFRDKFGAGEISTVVGASAVSGFFASACSLPFDYVKTQIQKMQPDANGKYPYTGSLDCAVKTFKSGGPFKFYTGFPVYCVRIAPHVMMTWIFLNQIQKFEKKIGI

SEQ ID NO: 7187 - DNA, 1521 bp, Zea mays subsp. mays
  misc_feature (1)..(1521): Ceres Seq. ID no. 12367423
  misc_feature: MA Experiment ID: 108535 Result: Down-regulated in Transcription
  misc_feature: MA Experiment 108535 PARAMETER Experiment Name: Zm_Meristem_P Parameter: Age (day) Value: 8
  misc_feature: MA Experiment 108535 PARAMETER Experiment Name: Zm_Meristem_P Parameter: Organism Value: Zea mays
  misc_feature: MA Experiment 108535 PARAMETER Experiment Name: Zm_Meristem_P Parameter: Plant Line Value: 35A19
  misc_feature: MA Experiment 108535 PARAMETER Experiment Name: Zm_Meristem_P Parameter: Tissue Value: Root Meristem vs. Above Root Meristem
aattggccgttattattgtactccccttctccattccactcgtccccttcctccccttccgtctcgcaacaggcgaggcgagagaactcgtcgtcgaagcgaaatatagccagcgcaccaatcccaattcccaacccgacgcaacgcaacgcaacgcaacgcacctcatcccggttgcttgcgccaacgtaggggatcgcctcgccccgccccgccccgccccgccccgcttcgcgctcctccttcctgcctgccgtaaccgcgccgtgcagctgtgcaagggcatttctgcattcatgtgggcaagctggatgattcaaagttgttgatatgtggtggttcagtaggttgttgagtctagataccagatgatggacctgtccacgacttcagtgctggcagctaaagcttacaaatacaaagcagaatcacttgttaaggagtaccttcttgcagattcgtatgtttcatacactgctgtacttggtgggatcctgatgtgcaagatggcttatgacataacaagcataatcagctcattgtactacaagggttatggttcacttacaaaaacccaaaagcttgagtggaacaacaggggcatgtccactatccatgcgatattcatcacagtggtgtcagtgtacctggttttcttctccaacctattctctgatgagctggatggactagtaacttatcggagttcaaatctatccaatttcactttgggggtttctgttgggtatttcatcactgaccttgctatgatattatgggcttatccttctcttggtggaatggagtatgtccttcaccatatgctgtcgcttatttctatagtctatgctatgtattctggggaaggacagttgtacacatacatggttctcatctctgaaacaaccacacctggaatcaacctccgatggttccttgataccgctggactgaaaaaatccaaggcctatcttgtcaatggtgttacgatgtttattgcatggctggtggcacggatcattttgttcgtctacttgttttaccacatttacttccactatgatcaggtcaagcagatgcatacgtttagctgcattctgatatttgctgtgcctacaatactgctcgtcatgaacacaatgtggtttgccaagatcttgagaggccttaaaaagacgctagccaagaggcagtgaaaagaagaatggtaaaacaagctcaaggacatcgatagccaaaatccatcccctcgtacagtcactttacagttacatgcacttcccgagtaaagccgtcagtgcagctcgccgtcagtaaagcccttgtacatgatcctgaaatacgctaaacacagctcatttttttccctggatgctctgccttgtacatacggccgtctgtattgggtgcttacaccttgagggatcatttggtgaccagaaaaatagatgggaaagaaatccctttgttacggcctcgttcgtaatatttttttctgaataataattcacatttttttct

SEQ ID NO: 7188 - protein, 275 aa, Zea mays subsp. mays
  peptide (1)..(275): Ceres Seq. ID no. 12367424
  misc_feature (35)..(275): Pfam Name: Eukaryotic protein of unknown function (DUF887) Pfam Description: Eukaryotic protein of unknown function (DUF887)
  misc_feature (10)..(273): Homolog of NCBI NO: 40538924 NR Description: expressed protein [Oryza sativa (japonica
  misc_feature (4)..(274): Homolog of NCBI NO: 18397885 NR Description: expressed protein; protein id: At1g31300.1, by cDNA: gi_16604307, supported by cDNA: gi_20466068 [Arabidopsis >gi|16604308|gb|AAL24160.1| At1g31300/T19E23_12 [Arabidopsis
  misc_feature (13)..(275): Homolog of NCBI NO: 22328807 NR Description: unknown protein; protein id: At4g19645.1 thaliana] >gi|26452622|dbj|BAC43394.1| unknown protein thaliana] >gi|27311621|gb|AAO00776.1| Unknown protein
  misc_feature (37)..(275): Homolog of NCBI NO: 34909246 NR Description: B1148D12.11 [Oryza sativa (japonica
  misc_feature (37)..(273): Homolog of NCBI NO: 18413327 NR Description: expressed protein; protein id: At4g10360.1, by cDNA: 1354., supported by cDNA: gi_16323148 [Arabidopsis >gi|16323149|gb|AAL15309.1| AT4g10360/F24G24_160 [Arabidopsis
  misc_feature (41)..(273): Homolog of NCBI NO: 21537382 NR Description: unknown [Arabidopsis thaliana]
  misc_feature (4)..(214): Homolog of NCBI NO: 25403400 NR Description: protein T19E23.9 [imported] - Arabidopsis >gi|6692122|gb|AAF24587.1|AC007654_3 T19E23.9 [Arabidopsis
  misc_feature (216)..(274): Homolog of NCBI NO: 25403400 NR Description: protein T19E23.9 [imported] - Arabidopsis >gi|6692122|gb|AAF24587.1|AC007654_3 T19E23.9 [Arabidopsis
  misc_feature (37)..(273): Homolog of NCBI NO: 7486070 NR Description: hypothetical protein F24G24.160 - Arabidopsis >gi|4538965|emb|CAB39789.1| hypothetical protein [Arabidopsis >gi|7267733|emb|CAB78159.1| hypothetical protein [Arabidopsis
  misc_feature (2)..(272): Homolog of NCBI NO: 30725869 NR Description: RIKEN cDNA C730036B01 [Mus musculus]
MMDLSTTSVLAAKAYKYKAESLVKEYLLADSYVSYTAVLGGILMCKMAYDITSIISSLYYKGYGSLTKTQKLEWNNRGMSTIHAIFITVVSVYLVFFSNLFSDELDGLVTYRSSNLSNFTLGVSVGYFITDLAMILWAYPSLGGMEYVLHHMLSLISIVYAMYSGEGQLYTYMVLISETTTPGINLRWFLDTAGLKKSKAYLVNGVTMFIAWLVARIILFVYLFYHIYFHYDQVKQMHTFSCILIFAVPTILLVMNTMWFAKILRGLKKTLAKRQ

SEQ ID NO: 7189 - protein, 274 aa, Zea mays subsp. mays
  peptide (1)..(274): Ceres Seq. ID no. 12367425
  misc_feature (34)..(274): Pfam Name: Eukaryotic protein of unknown function (DUF887) Pfam Description: Eukaryotic protein of unknown function (DUF887)
  misc_feature (9)..(272): Homolog of NCBI NO: 40538924 NR Description: expressed protein [Oryza sativa (japonica
  misc_feature (3)..(273): Homolog of NCBI NO: 18397885 NR Description: expressed protein; protein id: At1g31300.1, by cDNA: gi_16604307, supported by cDNA: gi_20466068 [Arabidopsis >gi|16604308|gb|AAL24160.1| At1g31300/T19E23_12 [Arabidopsis
  misc_feature (12)..(274): Homolog of NCBI NO: 22328807 NR Description: unknown protein; protein id: At4g19645.1 thaliana] >gi|26452622|dbj|BAC43394.1| unknown protein thaliana] >gi|27311621|gb|AAO00776.1| Unknown protein
  misc_feature (36)..(274): Homolog of NCBI NO: 34909246 NR Description: B1148D12.11 [Oryza sativa (japonica
  misc_feature (36)..(272): Homolog of NCBI NO: 18413327 NR Description: expressed protein; protein id: At4g10360.1, by cDNA: 1354., supported by cDNA: gi_16323148 [Arabidopsis >gi|16323149|gb|AAL15309.1| AT4g10360/F24G24_160 [Arabidopsis
  misc_feature (40)..(272): Homolog of NCBI NO: 21537382 NR Description: unknown [Arabidopsis thaliana]
  misc_feature (3)..(213): Homolog of NCBI NO: 25403400 NR Description: protein T19E23.9 [imported] - Arabidopsis >gi|6692122|gb|AAF24587.1|AC007654_3 T19E23.9 [Arabidopsis
  misc_feature (215)..(273): Homolog of NCBI NO: 25403400 NR Description: protein T19E23.9 [imported] - Arabidopsis >gi|6692122|gb|AAF24587.1|AC007654_3 T19E23.9 [Arabidopsis
  misc_feature (36)..(272): Homolog of NCBI NO: 7486070 NR Description: hypothetical protein F24G24.160 - Arabidopsis >gi|4538965|emb|CAB39789.1| hypothetical protein [Arabidopsis >gi|7267733|emb|CAB78159.1| hypothetical protein [Arabidopsis
  misc_feature (1)..(271): Homolog of NCBI NO: 30725869 NR Description: RIKEN cDNA C730036B01 [Mus musculus]
MDLSTTSVLAAKAYKYKAESLVKEYLLADSYVSYTAVLGGILMCKMAYDITSIISSLYYKGYGSLTKTQKLEWNNRGMSTIHAIFITVVSVYLVFFSNLFSDELDGLVTYRSSNLSNFTLGVSVGYFITDLAMILWAYPSLGGMEYVLHHMLSLISIVYAMYSGEGQLYTYMVLISETTTPGINLRWFLDTAGLKKSKAYLVNGVTMFIAWLVARIILFVYLFYHIYFHYDQVKQMHTFSCILIFAVPTILLVMNTMWFAKILRGLKKTLAKRQ

SEQ ID NO: 7190 - protein, 232 aa, Zea mays subsp. mays
  peptide (1)..(232): Ceres Seq. ID no. 12367426
  misc_feature (1)..(232): Pfam Name: Eukaryotic protein of unknown function (DUF887) Pfam Description: Eukaryotic protein of unknown function (DUF887)
  misc_feature (1)..(230): Homolog of NCBI NO: 40538924 NR Description: expressed protein [Oryza sativa (japonica
  misc_feature (1)..(231): Homolog of NCBI NO: 18397885 NR Description: expressed protein; protein id: At1g31300.1, by cDNA: gi_16604307, supported by cDNA: gi_20466068 [Arabidopsis >gi|16604308|gb|AAL24160.1| At1g31300/T19E23_12 [Arabidopsis
  misc_feature (1)..(232): Homolog of NCBI NO: 22328807 NR Description: unknown protein; protein id: At4g19645.1 thaliana] >gi|26452622|dbj|BAC43394.1| unknown protein thaliana] >gi|27311621|gb|AAO00776.1| Unknown protein
  misc_feature (1)..(232): Homolog of NCBI NO: 34909246 NR Description: B1148D12.11 [Oryza sativa (japonica
  misc_feature (1)..(230): Homolog of NCBI NO: 18413327 NR Description: expressed protein; protein id: At4g10360.1, by cDNA: 1354., supported by cDNA: gi_16323148 [Arabidopsis >gi|16323149|gb|AAL15309.1| AT4g10360/F24G24_160 [Arabidopsis
  misc_feature (1)..(230): Homolog of NCBI NO: 21537382 NR Description: unknown [Arabidopsis thaliana]
  misc_feature (1)..(171): Homolog of NCBI NO: 25403400 NR Description: protein T19E23.9 [imported] - Arabidopsis >gi|6692122|gb|AAF24587.1|AC007654_3 T19E23.9 [Arabidopsis
  misc_feature (173)..(231): Homolog of NCBI NO: 25403400 NR Description: protein T19E23.9 [imported] - Arabidopsis >gi|6692122|gb|AAF24587.1|AC007654_3 T19E23.9 [Arabidopsis
  misc_feature (1)..(230): Homolog of NCBI NO: 7486070 NR Description: hypothetical protein F24G24.160 - Arabidopsis >gi|4538965|emb|CAB39789.1| hypothetical protein [Arabidopsis >gi|7267733|emb|CAB78159.1| hypothetical protein [Arabidopsis
  misc_feature (1)..(229): Homolog of NCBI NO: 30725869 NR Description: RIKEN cDNA C730036B01 [Mus musculus]
MCKMAYDITSIISSLYYKGYGSLTKTQKLEWNNRGMSTIHAIFITVVSVYLVFFSNLFSDELDGLVTYRSSNLSNFTLGVSVGYFITDLAMILWAYPSLGGMEYVLHHMLSLISIVYAMYSGEGQLYTYMVLISETTTPGINLRWFLDTAGLKKSKAYLVNGVTMFIAWLVARIILFVYLFYHIYFHYDQVKQMHTFSCILIFAVPTILLVMNTMWFAKILRGLKKTLAKRQ

SEQ ID NO: 7191 - DNA, 1965 bp, Zea mays subsp. mays
  misc_feature (1)..(1965): Ceres Seq. ID no. 12406856
  misc_feature: MA Experiment ID: 108543 Result: Down-regulated in Transcription
gtaggatcgtcacatgtttaccaactaataactagttaactactctcggtaccacgggtccacggcgggccgaactcgagcccctacgccgatcttatggagcttctctaatctaaaatatatacgatgtaaccttttctaatctaaaatatatacaatgtaacgtagaagtagattacatactgcagagtttagttcaattcctcgtaaactttttttatgcctccatccctgtttgcaaaaggtgcatcacttcgatcggcttcaagctccatgtctaagattcatggacatggatgaacatgaacgtgagatgacagatgaggtagaggcgtagggctcatgtgcgcacgcacgacaaccaccagctcatggatgaagcagctgatgaacgcttcccggcaaggccgccacggccgcgtcctccaccttctcttcacccacctacgacgcggcgacagaggggcgtggtagagctgcaccgcgcggccgtccccacggcactccgcgcctgcgcgcgcctcggaaacgcctcttccggccgcctaatccacgcgctcgtcctcacccggttcccgtccctcgcctccgacgccgtcgccgccaccgcgcttctcgacatgtacgccaaatgtggccttgtcgcgagtgcccagagggtgttcgacgaaatgccgagtagggatgacctcgtcgcctggaacgcgctggtcgcatgctacgcgcgccacgccctcccggagcgcgcactggtgctggctatcaaaatgcggggccagtgcctgtgccccgacctggtgacatggaacgccgtcgtctccggttttgcactggccggcgacgaccaaatggccacaaaattggtcggcgccatggaggtggacgggttccagccggacgtggtcacttggacatcgcttgtatccggctcggtgctgaacttccagtatgccagggcgcgcgtgctgttccggagaatgatgaccactgccaaccctgtcctgccgagctcggccacgattgccagcatcctgcctgcgttcgccaatgttgctgacgtgaagcgtggcaaggaagtccacgcctacgccgtggtgaccggcgtcgaacaggagctcaatgtgagcagtgctctagtagatatgtacacgaagagcgggtttgtggtcgaagcccgcaggctgtttgacaagatgtcggaaagaagcacggtgacatggaattccatgatcttcgggctggcgaattccggtcactgccaagaagccatcggtctcttcaaccggatgctgtgcgacggagcaaggccggatcacctgacgttcaccgccgctctgacggtttgcagctacgccggcatggtggagctcgggaagggcctgtaccgcgccatgcaggaagaacacggcatcgagccgaggctggagcattgtgcatgcatggtgcatttgcttggccgagccggctggctcgccgaggcttatgatttcatcaaagccatgcccctggggcctgactgcttcgtttggggggcgttgctgggggcatgccggagccatggcgacatcaagcttgccgagctggctgcgtcccacctgctaaccgtcgagccggccaatgcagcaagttgcctcctactctcggactcgctggcaagtgtaggcagacaagatgatgttatgaagatgaagaggctggcaaagagacggcgcatgaagaagctgcatggctgcagctggttagagtgagtctacataatcgagagcgatatatggtctgagatcaaaggaacagaattgattgatcacagattcatagttgcccagatttgcagaagcaaacatccaagagtttcctacaaatgcatgtgttggtctatttgatgctaccatgaaagtagaaatgttgtgctacttagatttaatggatgtaatgtttagcattcacactgtttactcaacgtcg

SEQ ID NO: 7192 - protein, 458 aa, Zea mays subsp. mays
  peptide (1)..(458): Ceres Seq. ID no. 12406857
  misc_feature (352)..(386): Pfam Name: PPR repeat Pfam Description: PPR repeat
  misc_feature (31)..(458): Homolog of NCBI NO: 34902102 NR Description: chloroplast import-associated channel protein
  misc_feature (34)..(458): Homolog of NCBI NO: 15238469 NR Description: putative protein; protein id: At5g59600.1
  misc_feature (176)..(458): Homolog of NCBI NO: 34912348 NR Description: P0518F01.9 [Oryza sativa (japonica
  misc_feature (1)..(188): Homolog of NCBI NO: 34912348 NR Description: P0518F01.9 [Oryza sativa (japonica
  misc_feature (35)..(173): Homolog of NCBI NO: 34912348 NR Description: P0518F01.9 [Oryza sativa (japonica
  misc_feature (84)..(458): Homolog of NCBI NO: 15234045 NR Description: putative protein (fragment); protein id:
  misc_feature (176)..(458): Homolog of NCBI NO: 15237421 NR Description: putative protein; protein id: At5g16860.1
  misc_feature (45)..(186): Homolog of NCBI NO: 15237421 NR Description: putative protein; protein id: At5g16860.1
  misc_feature (29)..(458): Homolog of NCBI NO: 8671867 NR Description: Contains similarity to glycerine-rich protein Nicotiana glauca gb|AF151215 and contains multiple PPR PF|01535
  misc_feature (29)..(458): Homolog of NCBI NO: 15220869 NR Description: hypothetical protein; protein id: At1g53600.1
MDEAADERFPARPPRPRPPPSLHPPTTRRQRGVVELHRAAVPTALRACARLGNASSGRLIHALVLTRFPSLASDAVAATALLDMYAKCGLVASAQRVFDEMPSRDDLVAWNALVACYARHALPERALVLAIKMRGQCLCPDLVTWNAVVSGFALAGDDQMATKLVGAMEVDGFQPDVVTWTSLVSGSVLNFQYARARVLFRRMMTTANPVLPSSATIASILPAFANVADVKRGKEVHAYAVVTGVEQELNVSSALVDMYTKSGFVVEARRLFDKMSERSTVTWNSMIFGLANSGHCQEAIGLFNRMLCDGARPDHLTFTAALTVCSYAGMVELGKGLYRAMQEEHGIEPRLEHCACMVHLLGRAGWLAEAYDFIKAMPLGPDCFVWGALLGACRSHGDIKLAELAASHLLTVEPANAASCLLLSDSLASVGRQDDVMKMKRLAKRRRMKKLHGCSWLE

SEQ ID NO: 7193 - protein, 375 aa, Zea mays subsp. mays
  peptide (1)..(375): Ceres Seq. ID no. 12406858
  misc_feature (269)..(303): Pfam Name: PPR repeat Pfam Description: PPR repeat
  misc_feature (1)..(375): Homolog of NCBI NO: 34902102 NR Description: chloroplast import-associated channel protein
  misc_feature (1)..(375): Homolog of NCBI NO: 15238469 NR Description: putative protein; protein id: At5g59600.1
  misc_feature (93)..(375): Homolog of NCBI NO: 34912348 NR Description: P0518F01.9 [Oryza sativa (japonica
  misc_feature (1)..(105): Homolog of NCBI NO: 34912348 NR Description: P0518F01.9 [Oryza sativa (japonica
  misc_feature (1)..(90): Homolog of NCBI NO: 34912348 NR Description: P0518F01.9 [Oryza sativa (japonica
  misc_feature (1)..(375): Homolog of NCBI NO: 15234045 NR Description: putative protein (fragment); protein id:
  misc_feature (93)..(375): Homolog of NCBI NO: 15237421 NR Description: putative protein; protein id: At5g16860.1
  misc_feature (1)..(103): Homolog of NCBI NO: 15237421 NR Description: putative protein; protein id: At5g16860.1
  misc_feature (1)..(375): Homolog of NCBI NO: 8671867 NR Description: Contains similarity to glycerine-rich protein Nicotiana glauca gb|AF151215 and contains multiple PPR PF|01535
  misc_feature (1)..(375): Homolog of NCBI NO: 15220869 NR Description: hypothetical protein; protein id: At1g53600.1
MYAKCGLVASAQRVFDEMPSRDDLVAWNALVACYARHALPERALVLAIKMRGQCLCPDLVTWNAVVSGFALAGDDQMATKLVGAMEVDGFQPDVVTWTSLVSGSVLNFQYARARVLFRRMMTTANPVLPSSATIASILPAFANVADVKRGKEVHAYAVVTGVEQELNVSSALVDMYTKSGFVVEARRLFDKMSERSTVTWNSMIFGLANSGHCQEAIGLFNRMLCDGARPDHLTFTAALTVCSYAGMVELGKGLYRAMQEEHGIEPRLEHCACMVHLLGRAGWLAEAYDFIKAMPLGPDCFVWGALLGACRSHGDIKLAELAASHLLTVEPANAASCLLLSDSLASVGRQDDVMKMKRLAKRRRMKKLHGCSWLE

SEQ ID NO: 7194 - protein, 358 aa, Zea mays subsp. mays
  peptide (1)..(358): Ceres Seq. ID no. 12406859
  misc_feature (252)..(286): Pfam Name: PPR repeat Pfam Description: PPR repeat
  misc_feature (1)..(358): Homolog of NCBI NO: 34902102 NR Description: chloroplast import-associated channel protein
  misc_feature (1)..(358): Homolog of NCBI NO: 15238469 NR Description: putative protein; protein id: At5g59600.1
  misc_feature (76)..(358): Homolog of NCBI NO: 34912348 NR Description: P0518F01.9 [Oryza sativa (japonica
  misc_feature (1)..(88): Homolog of NCBI NO: 34912348 NR Description: P0518F01.9 [Oryza sativa (japonica
  misc_feature (1)..(73): Homolog of NCBI NO: 34912348 NR Description: P0518F01.9 [Oryza sativa (japonica
  misc_feature (1)..(358): Homolog of NCBI NO: 15234045 NR Description: putative protein (fragment); protein id:
  misc_feature (76)..(358): Homolog of NCBI NO: 15237421 NR Description: putative protein; protein id: At5g16860.1
  misc_feature (1)..(86): Homolog of NCBI NO: 15237421 NR Description: putative protein; protein id: At5g16860.1
  misc_feature (1)..(358): Homolog of NCBI NO: 8671867 NR Description: Contains similarity to glycerine-rich protein Nicotiana glauca gb|AF151215 and contains multiple PPR PF|01535
  misc_feature (1)..(358): Homolog of NCBI NO: 15220869 NR Description: hypothetical protein; protein id: At1g53600.1
MPSRDDLVAWNALVACYARHALPERALVLAIKMRGQCLCPDLVTWNAVVSGFALAGDDQMATKLVGAMEVDGFQPDVVTWTSLVSGSVLNFQYARARVLFRRMMTTANPVLPSSATIASILPAFANVADVKRGKEVHAYAVVTGVEQELNVSSALVDMYTKSGFVVEARRLFDKMSERSTVTWNSMIFGLANSGHCQEAIGLFNRMLCDGARPDHLTFTAALTVCSYAGMVELGKGLYRAMQEEHGIEPRLEHCACMVHLLGRAGWLAEAYDFIKAMPLGPDCFVWGALLGACRSHGDIKLAELAASHLLTVEPANAASCLLLSDSLASVGRQDDVMKMKRLAKRRRMKKLHGCSWLE

SEQ ID NO: 7195 - DNA, 1868 bp, Zea mays subsp. mays
  misc_feature (1)..(1868): Ceres Seq. ID no. 12404960
  misc_feature: MA Experiment ID: 108528 Result: Down-regulated in Transcription
  misc_feature: MA Experiment 108528 PARAMETER Experiment Name: Zm_Imbibed_Seeds_P Parameter: Age (day) Value: 5 vs. 2
  misc_feature: MA Experiment 108528 PARAMETER Experiment Name: Zm_Imbibed_Seeds_P Parameter: Organism Value: Zea mays
  misc_feature: MA Experiment 108528 PARAMETER Experiment Name: Zm_Imbibed_Seeds_P Parameter: Plant Line Value: 35A19
  misc_feature: MA Experiment 108528 PARAMETER Experiment Name: Zm_Imbibed_Seeds_P Parameter: Tissue Value: Aerial vs. Embryo
  misc_feature: MA Experiment ID: 108529 Result: Down-regulated in Transcription
  misc_feature: MA Experiment 108529 PARAMETER Experiment Name: Zm_Imbibed_Seeds_P Parameter: Age (day) Value: 5 vs. 2
  misc_feature: MA Experiment 108529 PARAMETER Experiment Name: Zm_Imbibed_Seeds_P Parameter: Organism Value: Zea mays
  misc_feature: MA Experiment 108529 PARAMETER Experiment Name: Zm_Imbibed_Seeds_P Parameter: Plant Line Value: 35A19
  misc_feature: MA Experiment 108529 PARAMETER Experiment Name: Zm_Imbibed_Seeds_P Parameter: Tissue Value: Roots vs. Embryo
  misc_feature: MA Experiment ID: 108530 Result: Down-regulated in Transcription
  misc_feature: MA Experiment 108530 PARAMETER Experiment Name: Zm_Imbibed_Seeds_P Parameter: Age (day) Value: 6 vs. 2
  misc_feature: MA Experiment 108530 PARAMETER Experiment Name: Zm_Imbibed_Seeds_P Parameter: Organism Value: Zea mays
  misc_feature: MA Experiment 108530 PARAMETER Experiment Name: Zm_Imbibed_Seeds_P Parameter: Plant Line Value: 35A19
  misc_feature: MA Experiment 108530 PARAMETER Experiment Name: Zm_Imbibed_Seeds_P Parameter: Tissue Value: Aerial vs. Embryo
  misc_feature: MA Experiment ID: 108535 Result: Up-regulated in Transcription
  misc_feature: MA Experiment 108535 PARAMETER Experiment Name: Zm_Meristem_P Parameter: Age (day) Value: 8
  misc_feature: MA Experiment 108535 PARAMETER Experiment Name: Zm_Meristem_P Parameter: Organism Value: Zea mays
  misc_feature: MA Experiment 108535 PARAMETER Experiment Name: Zm_Meristem_P Parameter: Plant Line Value: 35A19
  misc_feature: MA Experiment 108535 PARAMETER Experiment Name: Zm_Meristem_P Parameter: Tissue Value: Root Meristem vs. Above Root Meristem
  misc_feature: MA Experiment ID: 108544 Result: Down-regulated in Transcription
  misc_feature: MA Experiment ID: 20000108 Result: Up-regulated in Transcription
  misc_feature: MA Experiment 20000108 PARAMETER Experiment Name: Zm_Root-Tips_P Parameter: Age (day) Value: 12
  misc_feature: MA Experiment 20000108 PARAMETER Experiment Name: Zm_Root-Tips_P Parameter: Organism Value: Zea mays
  misc_feature: MA Experiment 20000108 PARAMETER Experiment Name: Zm_Root-Tips_P Parameter: Tissue Value: Root tips vs. Root mid region    35
  misc_feature: MA Experiment 20000108 PARAMETER Experiment Name: Zm_Root-Tips_P Parameter: Tissue Value: Root tips vs. Root mid region   Sequence Listing-Misc Features (4)
  misc_feature: MA Experiment ID: 20000487 Result: Up-regulated in Transcription
  misc_feature: MA Experiment 20000487 PARAMETER Experiment Name: Zm_50mM_NH4NO3_L_to_H_P Parameter: Organism Value: Zea mays
  misc_feature: MA Experiment 20000487 PARAMETER Experiment Name: Zm_50mM_NH4NO3_L_to_H_P Parameter: Timepoint (hr) Value: 4
  misc_feature: MA Experiment 20000487 PARAMETER Experiment Name: Zm_50mM_NH4NO3_L_to_H_P Parameter: Tissue Value: Leaves
  misc_feature: MA Experiment 20000487 PARAMETER Experiment Name: Zm_50mM_NH4NO3_L_to_H_P Parameter: Treatment Value: 50mM NH4NO3 vs. 100mM Mannitol
  misc_feature: MA Experiment ID: 20000488 Result: Up-regulated in Transcription
  misc_feature: MA Experiment 20000488 PARAMETER Experiment Name: Zm_50mM_NH4NO3_L_to_H_P Parameter: Organism Value: Zea mays
  misc_feature: MA Experiment 20000488 PARAMETER Experiment Name: Zm_50mM_NH4NO3_L_to_H_P Parameter: Timepoint (hr) Value: 8
  misc_feature: MA Experiment 20000488 PARAMETER Experiment Name: Zm_50mM_NH4NO3_L_to_H_P Parameter: Tissue Value: Leaves
  misc_feature: MA Experiment 20000488 PARAMETER Experiment Name: Zm_50mM_NH4NO3_L_to_H_P Parameter: Treatment Value: 50mM NH4NO3 vs. 100mM Mannitol
  misc_feature: MA Experiment ID: 20000626 Result: Up-regulated in Transcription
  misc_feature: MA Experiment 20000626 PARAMETER Experiment Name: Zm_Herbicide-Treatments_P Parameter: Timepoint (hr) Value: 12
  misc_feature: MA Experiment 20000626 PARAMETER Experiment Name: Zm_Herbicide-Treatments_P Parameter: Tissue Value: Aerial
  misc_feature: MA Experiment 20000626 PARAMETER Experiment Name: Zm_Herbicide-Treatments_P Parameter: Treatment Value: Roundup vs. No Treatment
  misc_feature: MA Experiment ID: 20001606 Result: Up-regulated in Transcription
  misc_feature: MA Experiment 20001606 PARAMETER Experiment Name: Zm_50ppm_KNO3_L-to-H_P Parameter: Age (day) Value: 19
  misc_feature: MA Experiment 20001606 PARAMETER Experiment Name: Zm_50ppm_KNO3_L-to-H_P Parameter: Organism Value: Zea mays
  misc_feature: MA Experiment 20001606 PARAMETER Experiment Name: Zm_50ppm_KNO3_L-to-H_P Parameter: Plant Line Value: 35A19
  misc_feature: MA Experiment 20001606 PARAMETER Experiment Name: Zm_50ppm_KNO3_L-to-H_P Parameter: Timepoint (hr) Value: 8
  misc_feature: MA Experiment 20001606 PARAMETER Experiment Name: Zm_50ppm_KNO3_L-to-H_P Parameter: Tissue Value: Shoots
  misc_feature: MA Experiment 20001606 PARAMETER Experiment Name: Zm_50ppm_KNO3_L-to-H_P Parameter: Treatment Value: 50ppm KNO3 vs. 50ppm KCl
cccgtcactcttgtgtcctcctaaaaccctaaccctccgccgcccctcggacccccaaccagcagctgccgcggccatccgccggcgagatggcgctgtacctgctgttcgagtcggcgtccggctacggtctattccacgcgtacggcatcgatgagatcgggcagagcgtggaggccgttcgctcctccgtgctggacctcgatcgcttcggcaaggccgtcaagctcaccgccttcaaccctttctcctctgccgtcgatgcactcaatcagtgcaacgcttatatccgaaggatcatgaccgatgaactgaggagtttcctggagctgaacctgccgaagcccaaggaggggaagaaggccaaatacagcctcggggtcgtcgagcccaaggtcggttctcacatctccgaggtcaccggcattccctgccagagcaacgaattcgtccaggagctgctccgcggtgtccgcctccacttcgaccgtttcatcaacgagcttaaggattctgacttggagaaggcccagcttggcctggggcatagctacagcagggccaaggtgaagttcaatgtgaatcgtgttgacaacatggtgatccaggcaatctttctattggatacgcttgacaaggacatcaattccttctccatgagagtcagggaatggttctcatggcacttccctgagcttgtcaagattgtgaacgacaattacctatatgccaagcttgctaagtttatcgtgaacaaatctgatttgacggaaaaagatattcctgctttggctgatatagttggcgacgaggacaaggctaaagaaattgttgaagcagcaaaggcttcaatgggccaggatctgtcaccagttgatttgatcaatgtccagcaatttgcccaaagggttatgaatctctctgagtatcgcaaaaacctttatgagtatcttgtgactaagatgaatgatattgcacccaacctgacatcgttgattggtgaagtagttggagctcgcctaatctctcatgctggcagtctttcaaaccttgctaagtgtgcagcctccacccttcaaatacttggtgctgagaaggccctattcagagcactgaaaactcgagggaacacaccaaagtatgggcttatattccactcctcctttattggccgtgcttcaactaagaacaagggcagaatggctcgttacctggcaaacaaatgctcgattgcttcacgcattgactgctactcggaggctagcacctctgtctttgggcaaaagttgcgtgagcaagtcgaggagagactggaattctatgacaagggtgttgcgcctcgtaaaaaccttgatgtgatgaaagccgctattgacagcatggtcaatggcacctcaatggatgatgatgatatcgagaagaccgatgcatctcccaagaaaagcaagaaaaagaagaccaaaaccaaggctgatggtgatgcaatggacgtggataaaccctccaacgttgctggtggagaagctgagcctggaactgagaagaagaagaagaaaaagaagcataagctggaggaggaggcacaggaggagaacggtgcagcagatactacccctaagaaaaagaaaaagaagagccgtgaagcttccgaagaagctgaacctaagaccgccaccgatggtaagaagaagaaaaagaaggctaaggccgaggatgatgagtagccaagttatttgttgtatggcgtatgaatccgagagtatttgttgaaaaacagagatgaacgcctgcctaactcaactagcttgtagttcatgaggcgtttgatgcaaacccaactcaaagtacgaagttttcctatcgtcttt
